United States Patent Application Publication US 2015/0376612 A1 - sequence listing, part 31

SEQ ID NO: 75444 - DNA, 1530 bp, Homo sapiens
aaccattagatctcgtgagaactcactgtcagaatagcatggggcaaccacccgcgtgttctgttcacctcccatgaggttcctcccccaacacgtgaagattacaatttgaattacagttcaagatgagattttgggtggggacatggccaaaccatgtcattccacctttcttattctgtcttggttcatacaactatacaactcaatgtaaaaacagactcttaaggatctattttcacataaaaagacctaccttttactaataacaccaggaagtaaatcagagcattgagttagcttgccagtcattgtgtgtctgtagcgatcttaccttcaggtcttagtatgtatttgttttttgattctctgggcttccttctccagctgtcatggcataaggtttttattttagaagacttggtggggaaaatggtgtttagttctaccaaatggctgaggattcttcacggttagtcttgatgtagctgtgtgtaactactgcatgtggatttagaaacttcaaacaatattccacaaattaaaataatgccataatttggcatgagattttgtagtttacaaagtactttcacatacattattttattaatccccattgtaaccctgcagtgagacaatatcttcatgttatagatgataagctgaggctcagagaggttaaggggtgaactggaattttaggctaggcctcctgagtccttaacccagttctttttctactgttgtacagtctgcaacttcactgtttacacgatttgagcagataatgaagcttaggttgccaataatacttaatatcctggattattttgtaacctgtgtaaaatttcctcactcaactttattgctatgtattcctcctgtttgatgattttctaaataaatttctcaattgtctggtaactttagtttcttaagtgtttcttctgcttttttaaaaaaacatatgttcaagcgtttacatctgtgcttgttagcattatgaattttgactacacaaatctttttctcctttttctctgttcttttttaaaaaattttagtttctcttttgatttcaacccgttagagcttaaattctcacgtgattgttttatttatagctagttaatcctcctgactagtaactattttgacagtctgacatttgtttgccatcttctaaacgctgtgcttctcttttgtaacgtgaattgttttctttcaatacattttttcaaaactttaatttcattaattcaacaaatagttaatatttactaggtaaaaaaaaagatgggaatgaccacttctacgtcaagtaaaaagctttccagagaaattgatgcttgatatgagtcttaaagaaagatgttacatcagccgggtgggtggctcatgcctataatcccagcactttgggaggccaaggtggatggattgcttgagcccaggagttcaagagcatcctggataacatgatgaaaccccatctctactaaaaatacaaaaaattagctggggatg

SEQ ID NO: 75445 - DNA, 2795 bp, Homo sapiens
aagcattaagtcatagcctgttcctcttccttatttgaaggtgtttttacttttctcagcattccacaagttacttcctccttcctttgttgtcctctgcctttgcttcttttaaaaagttctaagtcgctagccaatcaggacagatacagaatatgaggtcccgttccagccagtagaaaccagacacagtagtaaggtggacgcgtcagattataaatgaccctgtctcctttgtttggtgcactctcatggcagaactgctggcaagtgtaccctttctgcagaaagtaaaaatggccttgctgaggaaattaaatttgtgttcaagagctatttctttactgcaccgaggaacaagcatttctaacaaacatggtttacagcatttgttttcaaatcaccactcaccttaccacagctcatcagtttcatctctgccacctccatttcaattcttactggtttttctagggaggcaacattgtttagtgtttcaagaatgttaaggaccactggatccagacttggctcaaatcccagctctgctgtacactgtgcccctgagcaactgaaattccctgtgtcttagtttcttcttctataaaacgtggataatactatctacctcttgtgattgtttttaatagttaaaatatttaaagatcttaaaaatatcccatgatgaatagtaagttctataaaactgttagctatgattgtttctccatcttcctgcctattcttccaaatttccaacccgcttgacattcttggctctcctgtttcaatttgtagtctgtttcctcacttggcatattcttggcctgccatcttgataatcaactctcaaatgggcacagccctagatcctctgtaactgttgcctgcctttatgagaagctgtgatttttgtctggtttctcaggccccagaaagattggtgctgtcttgagttctcctggcttggacctgggagaagttcaccagtcattcttttacaaatctattgcctatgggagaggaggaattttttcccataaaagcattctaaattcttgagcatctgcttttgttggtatgcagatcctgtcaccaaatgtgagagataccaactttatccccagagctcatttagacgactctcccagctaccaggatttttgataaaatagagaactttacagttttctaaaagactgctcagttttcagttaaggcaaagccagtaatgttcctgttttttttttttttttgccatgccggcaagaaaaaaatggcccacaattcttcttatgatggagaccttagcatgaaaactatgagagaatcctcttaattgatctgcagttaaaccagcagtagtggggatggcagctaggttctggcacttagtgtaaaatctaacagtataaaataatcttgaatctctccttagtcaatggacgtgacagccattccttatccagcattggcaataaaaaccatgtgggaacagatacacagatctttgttgtcaaattcccttagtttgaatccttgatttaccatagttatatgcctttgggcaagttataatctctgtggcctaatttatttctcctttgtaaatggggatcattcctgcttccaagagttatcatcaggtgattattattatttagatttaattgaagtacatatatgcagaatgcttagcacagtacctaggtcaataagtgttagctaagccaggctggtatatttgctctttaaatagaagcctatcttctgggaattaaaaaaaaatacgtggtaaacctgttgtatttggggttggggggaagggtggaaagctttgactctatcaaaattacttcagcctatacttgataaccatatatacacgtacatacacacatgtactatatatattttcatgtactcgtcttaaaactacttaatcactccaagagttctgggagtcacagtgaagtttcacacttcaccttaattccttctttgaactctgagtttgaagaaaatgtagaactttctagctaagatgaagacaacggaatactcttcagcttctgattgcctctgttggattctgtagtctgcagaatggcaacctgtgttgttaatttctaacacttttgtgtgaccagtagtttgcagatttaattgagtgtaacagttactgggaagattgttaaaatacagattctcagatcttatccctggagatttggtacaagagatctgagctaggtccagacaatcttcctctttaatagaagaaattctgtttacaaggggttcgaagaccttactttggtaattctgttagttcataaaccccctagtctaaatggccagaagctgcctcatcttcactcgttttcacttacactctgagaattaccagttcagtcaatccaaggatgcatttcaagagattctaggggagttaaccttcttctggcaaattggtagttttatttaatctcttttgttctttctacctatgtattgccactctgtccttctaatttaaaacttctgtatcttattgatctgtattattttgtcagtgaggagaaggataaagtctccactataattgtggatatagttagcctggataaagttatattggtttttgcttcatgtattttgaagctctgtttttagatgtgtatacatttaggattattacatccttcgatgaaatactgcctttatcactttgaaatatccccctttatctctggtaatgtttcttttgttgaagtctactttatttgatacta

SEQ ID NO: 75446 - DNA, 1020 bp, Homo sapiens
tcacccaccttggcctcccaaagtgctgggattacaggtgtaagccaccgcgcccggcctttttgtttgttttgagatggagtttcactcttatttgcccaggctgaagtgcaatggcgtgatctcagctcactgcaacctctgcctcccaggttcaagtgattctcctgcctcagcctcccaagtagctgagattgcaggcatgcgccacaatgcctggctaattgtgtattttcagtagagacagggtttcactatgttggtcaggctggtcttgaactcctgacctgaagtgatctgcctgcctcggcctcccaaagtgctgggattacaggcatgagccaccataccctgcccattaatgtttattttaatgtcttactacattaagctatctctagataatatttataatcattgctctgtatgtttaaataaactcttcaatgactgctgggggtcaggtcaccctttggaaatgacattgttattggtacttctgtattccaagacctcagatactggaaaatccttgagaaatacaaattccatctgaatggatggcttttccaaataatggagagttaagcttttatgtgctagaatgtaatattaactatatgaatggaaatctctctgatattactaattgtctctggctccttctcagtggactatctttctgaacattgatgcaggatatcctttgagaaacatgatatgggacaaataactagttgtactatgttaaaacttttttttttttttttttttttttgagacaaggttttgttctgtcgcttaggccagaataatgtggagtgatcatagttcactgcagccttgacctcccaggctcaggcaatcctcccacctcagccttcaaagaagctaggtccataggtgcacgtcaccatgcccagctaatttttaaaattattacttgtagagacatggtcttcctatgttgcccagggtggtctcaaactcctgggctcaagcagccctcctgcctcagcc

SEQ ID NO: 75447 - DNA, 1040 bp, Homo sapiens
gcgtggcattttaaggaagtgaggtctacacctgcaggcactgtgacacatgaggtgggtttgggctttgaccaaccacagagaccaaagtatgtgagggatggtgtttggtcagggacaggatggagattgtgaagggagcacctgcacatgaatggcgcatttgggacaatagctggaaaagagacagggtagatatgcagtgctaaggagtttggcctttatcctgcgagtaatgaggaaccaaacagtagaaggttctttatacttacatgtgattaatgacaatgcaaaagttgagctggagagttggaagcagaatatcagtagaatgctagtgtcataaatcaggtgaaaactggtgggagcctacagaagttaacctaaaggtaatgtggacttccctttctccaaccttctttcctaaagcaaatagccattaggccaattatagcttataactagcataagagcaacacctatttttatctatattttagcattttctaaatagttctctacaagatacaatcctgtggatgtccaagcccttgtataagctataataaaaacacagtagtgctttttgtctatcctgtaatttgccatttctcacaaaatctcatataactttaattggtttcttaagtctctgtgtgtaagttttcacactttctaggagggtccagtccccgtatgggttcttcagcctttcttcaaatagaaaaactcatactatacgttgcagcttttgaccttgcccccattttacttttcctttttagctgttttggaaactgtctggttagtggtaataaaagtgtttgaaaaaaaatgtccagtaagttcctatgtagaatggtggtatgaatccattggccatttagatttttgtggcctaatttagcccactgcatctgggtgtcaaggccaacaagttagctatacctattctaaaagaaagattttattttattcttccttttgaacttgactagcagataaaatttgaactaatttggggtacatgaatcagaaag

SEQ ID NO: 75448 - DNA, 1929 bp, Homo sapiens
ctggaaccgtgagtagcgggccggggttagggcaggacgggctgcccctgcatgggccgatgcgcaccggtgtgggtttgggactggtcgccgcgaagagggaggcgcgtgaggcctggcgtttggctggggcaggatggagattgagcagggagcgtcggcagctgaagggtaaacgagcagatggcaaaacccaagctgcctggggtcaggaggactggataccttcgggggtagcgcctcctgggtgagccgggtgctgctgccatcccctggaagtgatccaggaccggatccgcagcccgaggtttaatttcgtgatcctaccagctttgtccacctggggatctggttctgtctcatttaccctaaacagcctatgatttaaatagcggcacgtcttctggagtaggaaggtttgagaggatctgctcgagaatcaacagcttagttatgggttcaggaaaagtaaaagaatccctggagggaaaggagataggttgttcccactgggtgtgttcggagaggtggaaagcactgcgtgaagcagctctggcaagtggctccgctccctcggtggaatactggattctgtctcttaggtcctcatttacatatttttgtgtttgcatcttaaccttgaaaaattaccatttctatgcctcgtcttcctcatttgtaaaaggggagaaattgtacctacctcacgggattgttgtgaaagtaaattagaaaatatacttcaagggcttggaactatggttggtacttacgtgtgatatgagtgttaacagtatttattagacaacaacacagacgggtttatagttagaataggaggaaggtgaccgtaaatatctgccagtgcatgcagcaaatattacgtatgtaatatataggagatattcaatagtcacagaagttactgaccaccagtattataatatgtaatatacacttttaattttcgtgggcccaatgccctaacttagatgtcttcattgattgtgacaacctttagatcctccatacaacactctgccctctattagatggattgatgacagcttcctttctgtatgttaggaccttaccatcggcagagcccgtcacctttatctttgtactctgatagggcctagtgcaatatatattcaataactaggtattgaattgcatcagtgattctgataatgttaaaacattcatatgttaagcatgacttactaagatagcaattccaacatgtgtcaaatcaccaaataaaataatagcaggaaatttaatttcttactgcacattaagatgatactaaaggcattcattaccatttttataaggtcagatttagtgagatctgttacatcattcacttttttagattatatactcactaaaggcagggtatgtttatattcattcagttctttcatattcagaatatttatatgtgcataacggtactcttgtgaaggcattaagaaagatggggaaaaggaaaatccttaccctttcagagcttcccactcggtgtttccttcaaatgacttaaacataatcatagattttttttcctgaagatagaagtaccaagacttagtggagtcagaaagttggataaaaatacagggtatccttggagaggggacggaaaccaagagatgaatcttacccttagattaaactgaagtatattcaccaagaatactgtgtgctctcttggtttttgataaaattgttaatgcctgcgtggtacttcactgtttacaaagtgatttttgacattgattattttacagtgatagcaaattaataccaacattatatacatgaagaaatgggctcagcgaaattaatgaacttgtccaaggccacttagctagaaagtgatgaagcagttcattcattagtctagtgggggaatacagt

SEQ ID NO: 75449 - DNA, 1061 bp, Homo sapiens
ttaagtgcctctcggtggtgaggctttgggcgggtgagactttcccgacctcgctcccggccccacttaagccgggttcgagctgggagacgcagtcccttcagtgcgccccaaatcctctggcttcaggtggcccggcgcgggggcccagcacgacgcaccgcgccgagaaccgggttctccgtgcgctgcgccagtagccctgggagcgcggcggccgcggggcaccggccgagggctctgccgagcgccgccgggagctcctcccggaccgctgaggctcgggcggcgggcgcggaggttggcctcgcctggaggggcgggcccgcgaggggcggggggctgtggaggaggggagggcgcgcaagccctttcgccgcctgccgcgggaggggcctcggcgctcacgtgactccgaggggctggaagaaaaacagagcctgtctgcggtggagtctcattatattcaaatattccttttaggagccattccgtagtgccatcccgagcaacgcactgctgcagcttccctgagcctttccagcaagtttgttcaagattggctgtcaagaatcatggactgttattatatgccttgttttctgtcagtgagtagacacctcttccttccccctccccggaattcactctgccctcaccacccctgctcgccggctgtcccttccgtcggacctcctttacaatatccacactctgctccctggcagcactgtcgctcccttcttggcccggcagccggggcgctggaagcgtacgggttccttttaaagtgctgctagcgcgcactcgccctctcagcgttgcaagaaaggggagcgcgagggagctaaagagatgaaagcccggggttgtaccttgagggctaaccactcccttcccctatccaacttgtctgggagagcccccagtgtctccgtggcgcgttcccactctcttgtcaaaactcacagaggtctctccggaatcgtctctcaccccttccctggggatgagcgggcacgatcaggcacttttggctgaatatttcaaactcatcggcc

SEQ ID NO: 75450 - DNA, 1047 bp, Homo sapiens
caccccgagttacattcctttcccccaataaaaagctctggggatgaaagttcttttggcttttatcttttcgatttaaaaatttgagaagaaaaatgtgactagagatgaatcctggtgaatccgaaattgaaacacaactcccccttccccttcctatcctctcggttttagaaccgcgctctcccgccccaggagattccttggggccgagggttttccggggaacccgggcgcccgccccttctactgtccctttgccccgcgggcacagcttgcctccgtctgctttctctacttctggacctctcctcgccgggctttttaaagggcttctgcgtctcaaaacaaaacaaaaaaaccctttgctcttcccaaccctttcgcagcccgccccagcggtggcgcgggaccagcaaaggcgaaagccgcgcggctcttgccgggcgcggacggtcgcgcaggggcgcccgcggcctccgcacccggacctgaggtgttggtcgactccgggcatccacggtcgggagggagggctgagctgttcgatcctttacttttcttcctcaaagtctacctgccaatgcccctaagaagaaaaccaagtatgtgcgtggagagtggggcggcaggcaacccgagttcttgagctccggagcgacccaaagcagcaactgggaacagcctcaggaaagggaggtcgggtggagtgggctttggggcaggagtcatggggcccgggccccggggacgacctggcgctcccggccctgctgaacgctgagttgcgcctagtcgggttttcgaagaggcccttgcgcagagcgacccacgcgcgcggcagcatcttcgattagtcaggacatcccagtaactgcttgaactgtaggtaggtaaaattcttgaaggagtatttgctgcgtgcgactctgctgctggtgcaacggaggaagggggtgggggaaggaagtggcgggggaaggagtgtggtggtggtttaaaaaataagggaagccgaggcgagagagacgcagacgcagaggtcga

SEQ ID NO: 75451 - DNA, 1405 bp, Homo sapiens
acaaaagtggatgcctttgttttcctctggggatctttcagtatatcctggaaaatgtagttttctcaaaccatttttattcaggaaatttggaaaatttttttttttttttttttttgagacagagtcttgctctttcacccaggctggagtgcaatggcgtgatctcagctcaccgcaacctctgcctcctgggttcaagtgattctcctgcctcagccttgtgagtagctgggattacaggcatgcaccaccatgcccggttaattttgtattttttttagcagagatgtggtttctccatgttggtcaggctggtcttgaactcctaacctcaggtgatccccccacttcggcctcccaaagttctgggattacaggcatgggctaccgcgcctggctggaaaataattttttaaaatcataaatatcaccgactttcagcagggctgcggctaccatgttctctcatgcgggcatcactgggctgttggcctggaccttgcagccacaatggattcaagttcgaaatacagcaacttcgaaagatgttaccaagcgactaaagtccatcaaaaacatccagaaaattaccaagtctatgcaaatggtagcagcagcaaaatacgcccaagctgagagagagctgaaaccagcttgaatatatggattgggatctttggctctggagaaaaagctggtatcaaggtgcctgaagacaacaagaaacacctccttattggtgtgtcctcagatcgaggactgtgtggcgctattcattcctccattgctaaacagatgaaaagcgaggttgctacactaacagcagctgggaaagaagttatgcttgttggaattggtgacaaaatcaggggcgtactttacaggatgcattctgaccagtttctggtggcattaaaagaagtgagaagaaatccccctgcttttggaaatgtgtcagtcattgcccttgaattactaaattctggatatgaatttgatgaaggctccatcatctttaatcagttcaagtctgtcatctcgtataagactgaagaaaagcccatctttttccttaataccattgcaagtgccgagagcatgagtatctactataatattgatgctgaggtgctgcaaaattaccaggaatacagtctggccaacagcatctactactctctgaaggagtccaccactagtgagcagagtgccaggatgacagccatggacaacaccagcaagaatgcctctgagatgattgacaaattgacattgacattcaactgtacccgccaagctgtcatcacaaaagagttgactgaaattatctttggtgctgtagctctggattaatgaaaatcaagttccatcctcagacaaggggtaaagaaggaaaattcag

SEQ ID NO: 75452 - DNA, 1032 bp, Homo sapiens
aatagacaaacttctgtttccagaccatatgttcattttgtattaaaatggaaccaagcaaaatataagtttgctaagactcaaaggattacttaaggccctaaacatggtgttccctggaaagcttgggtgggagtgggaggtattttcagcattgttctggaggattctggcaaaacatcatttacaagtcttaacacctgcattcttattttttaacattttttgatgttcttcctgtggaggtgttataatagagtaacttccaaatagtttccatgggtaactatttatgaataccaaagttaattactatatgttaatttaaaaaatgttttaatgtactaagaaaaacaaaaaagagttcgtgaaatgccacactggagtagtagttatttttttagtgttggatgatatcaaaattgaaagcttttgtgtttcaaagaatactatcaaaatgacaagactacccatagaatgggaaaaaatatttgcaatctatatatttgataagggatttgtatccagaatataaaaagaactcttacaactcagtaataaagataggccgggcgtcgtggctcatgcctgtaatctcagcactttgggaggccaaggcagaaagatcacctgagtttaggagtttgagaacagcatgagcaacatggtgaaaccccatctctacaagaaatacaaaaattagccaggcatagtggtgcatgcctgtagtcccagctccttgtgggactgaggctggaggactgcctgggcccaggaggtcaaggcaccagtgaaccgagtttacaccactgcactccagcctagatgacaaagtgagatcgtctctctcaaaagaaaaaataataataataaacaaacaacataactgaaaaatgggcaaagtatccgaataaacctttctacatgcaagatacacatatagtcagtaagcacatgagaagatgctcaacatcatcagtcatcaggaaatgcaaatcagaaccacagtggataccacttgacaccaattag

SEQ ID NO: 75453 - DNA, 1026 bp, Homo sapiens
tccaaccctgggaagatgggctctcaagtctagggagctgcctaacagccaggattctttggtgcccactcctctgatgagcggattctaatgctgagagggcacgcttctgaaaagaaggcacattagctttacagatctacaaaatgaagtgacatctgcagaatcttttcagtaacatgattaatgcaatatccttggcattgctagtgcagtgttttgaagtgttaggggaatgtacatgtggaagatgtccccagttatctactgcaaaggataattagcactgctttccattttttgtattatagtcattcatctgtctttattaaatgttttggtgatataacaagatcttccatagattttttttggccaagaatctacccaagaacgtaccaagtttgtattaacaataaccatctcattgtcctaggtgagaggatccattcccaaaacggactggggcaaaaactgagaagtaggtagatcctggaaaagtaaaccaggaagttcaaattttcattatcttgtttgaaatcctgtgtgcttttttagactacctggattatatttacttgtaaatttttaaaaactaaaagcataagcaagtggtatttgaataacagagtgctttggattttcatttcactgcccttttggattttcatatgtaaccttttggttacacatgaatctgtatttgtaacaacgaccccaaccacaaccaagcaagcaccgcccacctcctcaccttgatggtctgtattgccccggatcctcttaggtctcgcaggctgtctatggcttgctctggtgatattgtgtcagacaggtatagtaggagacaagcagctactaatggaacatgacagaaaaataatatgttattaaataactagtgacagggtacagcattttatatttaataagacttctgttgatacagaagactggtgtaattgttccaaatgaattaaaagactgagacttttagtgtgtgtttttgacagttaaattatgatc

SEQ ID NO: 75454 - DNA, 1580 bp, Homo sapiens
cctaaaagttgctattgcttagatcctttctgtaatgggaaagatccttgattgatcattcctttctatacaatggggatacacatggtacctgccttctaggactccttgaaggattaagcaaggtaatgtatataagagacctaacagggcctggcgtgaagtgagccctccagagatactcattctattattagacacaactccagagtgtgtgatgtttggatggcttctctaagctctgatccgccattaagctttcagctgtgccgttctacttgctaaaattggaagggaataggggacaactacagcatatgcactgagccaagtcatatgttaggcaaaagtccataaatgcaaattaaaatcactgtgaacttgtcattagtcttgtcattttctgtgatactagtttgctatataaagcatactctctcatgctctgagtttttttttaataattagtaatgttcaaattaacatcttttttcttcttttcagcatgatctatgttttggtgagctcttagaacaacacacagaagaattggtccagttaagtgcatgcaaaaagccaccaaatgaagggattctatccagcaagatcctgtccaagagtagcctgtggaatctgatcagttactttaaaaaatgactccttattttttaaatgtttccacatttttgcttgtggaaagactgttttcatatgttatactcagataaagattttaaatggtattacgtataaattaatataaaatgattacctctggtgttgacaggtttgaacttgcacttcttaaggaacagccataatcctctgaatgatgcattaattactgactgtcctagtacattggaagcttttgtttataggaacttgtagggctcattttggtttcattgaaacagtatctaattataaattagctgtagatatcaggtgcttctgatgaagtgaaaatgtatatctgactagtgggaaacttcatgggtttcctcatctgtcatgtcgatgattatatatggatacatttacaaaaataaaaagcgggaattttcccttcgcttgaatattatccctgtatattgcatgaatgagagatttcccatatttccatcagagtaataaatatacttgctttaattcttaagcataagtaaacatgatataaaaatatatgctgaattacttgtgaagaatgcatttaaagctattttaaatgtgtttttatttgtaagacattacttattaagaaattggttattatgcttactgttctaatctggtggtaaaggtattcttaagaatttgcaggtactacagattttcaaaactgaatgagagaaaattgtataaccatcctgctgttcctttagtgcaatacaataaaactctgaaattaagactcactttcagtgcattgtttgagattaaaaatagtatttcttaaacttgcttaatccatgataaagacatgttgctgtcatttttaaaaagtgacgtactacattatgggttttctgaaaaataccatgcctagatctaaaaaggaaaatttttaaatgccgagc

SEQ ID NO: 75455 - DNA, 1086 bp, Homo sapiens
ggtaagaccctgtctcaaaacaacaacaacaaaaaaacaaaacaaaaaaccaaaaaaaaccagtactcagaatgagaaagagaaggagaaagcaaatatagtaaaaatggacatttggaatatctgggtgaaaggttcttgtatcttttctgtaagtctaaaattatgccaagataagtaaaaacaaaacacctattttctttttacagttcttcctatttttcatggatttctgaaaaggcagagactagaagaaacttgtttagctatctcattctgctcatttaggggctctacttttaaaattaagatggtaaaaggaaagcattttacccataagtaaaagaatgcttccctttatggaccacctctcgtaacagatgttttagaagaaagacctgctttcttatctgaacatttactgccctttctgaatgcctaatagactgtgtttattccaggtatatgagtagaccagtgatgagtggcccaggactctatgaccctacaaccatcatgaatgcagatattctagcatattgtcagaaggaaggatggtgcaaattagctttttatcttctagcatttttttactacctatatgggtaagttgaaaaggtaaaatgaaatatgctttcactttgctgctttaaaagtttgcaggcattatggttttcacacctcaaaatccatttgaagaataacttagtgtcttaagtgtgcatggtgcacaccagcaaattcgcacacattcagtgtggcccacactggtgcttgtcaaggcagtaaaccagcctgccatcagaggcagaaggtttggtcagggatgctgcttcataagttttcagacacattcagtcagtaaaggatggtcctcattctccatggcaaagtgatgtcattgaaggatagggatgtgtgagtttgcagaaatttctgcttgtcttcagggtctctccagacattatgtttcattttttccttatcattcttcataagtggtgtgctctgccctttattttctgatttgcttgatttgagtggtatgaatgaaagaagtagttctaccttacagggtggtgcagt

SEQ ID NO: 75456 - DNA, 2008 bp, Homo sapiens
ttttctttctttgtcacctgaaatgatgccacaaagtggtgcagagtccctattttgactcttaatgtacattctagtgacccttgaggttgaagccacattcctccagagtgtggacaaaagcatccttacaaatgtatgtgtttgggcaccaatgggaacacattgaagagttcgaatccatctctagtgtcccactgagcactgtgccaagggaggaggagcatgcacagataaataaaaatggtccttctccctgagagtgtagaggggcagacagacctgtgtgtaaataccacactccagggtgagaaaagccatatcgatggcattatagagtcccatgctgtgtggagatgtgggcaattacttctgcccaaaggagttaggaaagcctgcagaaagaagttgacctaggaaggtttgttttttttttaggataaagaggaatttggataaacagttgaaattatttttctactcagaagattatttcgagtagagataagttgaaataacttgagcagaggcattgacgaaattgaaaattgaaggtatttattacagtaataccaaattttagtgatactgagataagagtgttttcactttaaatcgcattctggttctttttgtcatatatgagtttactgtaaattggtatttgggatcttggtgtacttttgttcttgttttattaactttaataattatttgaagatggggcaggtttgttgctgcttttaattaaagtgagtggtcctaactgttttaattttattttagattatagcatttgatgagctgaagactgattacaagaatcctatagaccagtgtaataccctgaatcccgtaagttataatataggatttatctttagattttaaaaatatgtttgtttttaacttgaagtaatttgaaaatggccagtattctgagtagcataatatatttgtactttttgaagtaggcagaatttaaaaaatcttctttttcctgtcgtgcttgactattctattattaatctgctggtgatcttgtcagctgtcatactaacattcttccaatctgctttttacattgtcggccaaagacagttgaaaaggtcaaaaagattaaaagagtcaaaattgcattaaaggtgtgtactgctttttagttaaatgttttaatgctatattcatttcatggggagggttagggcatttgtatttgtaacgttttgttcagtgtgctcgttcatatgcctgttgaggtttatgatttcatgaaatttcatattttatgcaaatatatgcttgctggcccagtcaagtagggaaagctgttaaatgcgtatgcgtttttttatgttatagccataggcacttctatgtgaaattatttggtgtagtacttgaaagttggttaacataaaatgactaatagatggtgagatgattctcgggttgtgacttattgtgaggtagtatgtgagtgaaatctttagtatggacttatctgccatatctagttttatctttggtttgcatattctggaataaatgagtcattctttcagctgatgtttattcagagcctgttaggtggatagctctgttctgggggctctgggatctcgcagcaatgccattctttggacttagggtgccataattttgtagataacaatttgtatacaaatgtctatgtggttatttctagtgtgtatctactttctgtttctaaaacaggcctgaattacactgagttctgagccatcatgaatttagtgataatgtagctccattgtgcttagggtttttgaaaaaatatatatgtatgtatttttaaattttcttttgagatgggggtgtctctatattgcccaggctcttatcaaactcctgggtcaagtgatcgtcctgcctcaatctcctgggtagctgggattacaggcacacaccagggtacccagtttgtttttttgtatttttgcctgcatttaggaagatactcttttag

SEQ ID NO: 75457 - DNA, 1050 bp, Homo sapiens
atgcttgtcagtaggagcagtaatttgaagagcatcttcagccctgctttgatggaagaacaatacctaagataatttgggatacagactagctcaaccttagtaggcctctgatgaaaatgtgtggttccatggccgggcgcggtggctcactcctgtaatcccagcactttgggaggccgaggcgggaggatcacgaggtcaggagttcgagaccagcctggccaacatggtgaaaccccgtctctactaaaaatacaaaaaaattagccgggcatggtggtgggcgcctgtaatcccagctactcgggaggctgaggcggaggagaatcacttgaacccaggaggcagaggttgcagtgagccgcgatggcgccactgcactccatcctgggcggagactccgtctcaaaaaaaaaacaaaaaaaaagaaagaaagaaagtgtgtggttccattccatctgtagatgtagctttaagtcattctgcttgatgggtattccttttttctgggatgatggggattcttagagtggtggggtaggctttttcacatttttacgttttgaaccaggttgtgtttggcttaaggaaaacctgaaccgcactttcaaaaaatgggtaatttcagcttaaacaaatgcgtgtctgggtgaagtaaataattttaagtcgtgttatacaatgaaaaaaaaattataccgcagattcgtggagagcttttatgcttagggatttcttcattcagagaattagtatccttttggaaacaattctaaataaatagatagttttaatttttctattacccatataaccttatgtttatcatcttaggtagtatcttagtccattcctttatagtgtttatagtgttgctatacaggaatacgggaggctgagtaatttacaaagaaaaaagaggtttatttacctcaggattctgctgactataagactgggcatctggtgaaagtctcagcctgcttccactcatggtgggggagtagtgtgtggagatcccatagtgagagaaagcaaaggaaaaag

SEQ ID NO: 75458 - DNA, 1390 bp, Homo sapiens
agttgtgtgtggtgagcaaaaaatttgggcttatgggataagaagtctgagctccgtaatgaagcattataaggccctctatgatctgatcccttgctaattcatttctaagtctcaccactgtcttgcacttaggttccattaatacagaattgctgctggtttcacctgagacacgaagctttatttttcttttcttttttccatctctgttgcgtttcctcattctgaactgtttccttggactgccagttctaccttctttttgcctggagaacttatcatcatctaaggccaacttaggaaacacctacagcaggaatcctgcctaaatgctccagggcgggctggctgtccttctttgacctttcagagcatcccacacacatccgtttacggggttataataacgtaattatttatttaggtgttcatttccggcactatactaagttctttcagtgcaggtactatcttattcatctttgtatctgaagcgagaagcgcggtacctgtaacaaactaggcattcattcaataaatatttgttgaaagaataaacgcaagaaggaaggaaaaatcaatcaacaactgtgcggacaatgtcagtgcaacgcagactccggccatcagagggcgccggggcggctgggctggtgcgcaggcgcgctgagagggctggcgccgcggcggtagcggtggcggtcgcggctgtggccgggggaagtgaatggttttacccagagggccctgcgccgcctttctccgctggcaacggcgccgctccccgctcctcctccccagccatggcgttcacgttcgcggccttctgctacatgctggcgctgctgctcactgccgcgctcatcttcttcgccatttggcacgtgagtagctggggctggggaaaggagggcgaggcggcaacacagcctcttttcgccccgggcccgcggtccgggccgccacggccgccggggctttgcgcgtcggggatgcggcccggctggcacgggccgcgcggcgaggggtctgggggccgcgggtactggaggagccggggcgcgcagtcgccaggtggacgcgcccgcgttgcctcggcacaggccgcgcgcaccgctactcctcccctactggatggggcggccgcggtccaggcgggcgcccgcggttccgcgctgcgttcgcaccgacctctgccggcccgcggccctgcattcccggggaggatgtcgacagcgcggtgggacggccgtagtgtgaatgaagttttccgaatttttgttaatacagattgactttcttttagggtttccacagaactgtggccaaaatgtaacctacttagggtgaatttccaactctacttttcagcacttgttcggtgctc

SEQ ID NO: 75459 - DNA, 4169 bp, Homo sapiens
gtcttgattgctgtactttggtaactgagtacttagcatttaaaagaagtgaagttctacctaaaaggtatatctcatttacacaggttaagtcatgaacaatatgaaaggaagcagaatttggtatttaatactcaaatatataaccaaaaatagtttggtgtataatactcaaatatattttaaaaaattcaaatatttgactttttttttggagtgtcaaagtatgacccaagttttttttttttttaaaggtatttgaaataagaaataccgaagacctaactgaagaatggttacgtgagaaacttggattttttcactaatgtgaacttctgtgtttctaaagtatttatgtattaacctgaccatactggaatcagacataaatacttatttatgcctaaaaatgcactgttacttacagtttgtttcctgcagtaaagaaaaattcttcatttgtgcaaaatttgaacaaagaggaaatcatcttcatagtaatgaaactttgtaaagtgtttccttatattggtaattgttaggtggactacttttctccagggactttttgcactcttgtgactaatttctataacttatggttcggaatttgttactatttacagacaccattggaaagtggatatattagattgtgagagacaacagttgcctccttttgacaaatactggatattagcagtttatttatgaaaatagcgtattatcacttgtcaaatcattgaaattcatttggggtcaaagacttgagtgacccagtattgagccatgaataatttagtgtaacctgtattacaagtacattgatgaattctgtatcttctttggtttcctgtatctttttaatcaagtctagaaactatgttcatcagtcactcatttttaaggtcgggagttagattttatgatagaattatgactgttagcttttctccttatagcatcttagtcttagaaattggtgggttgtaataatcaagggcttcattccttttatgtcatttctagacagttttgaatctaggttaataacactttatttataaagcacctcaatgtcctgtgaacactaattattttaaatgtgttaatactgtgcctttgatttgttagctttaaagttagtttaagacttttacactgccagtattccacatttggtgaaattaatacttttttaaagggtccaaataaaataattttctaatgtgtatatctgaaatttgtaataaaatcaacttcatattttaaaaattccaactatctgcttgcattggtgaatatatggcagtcgagagttataattttgggtatacttgtggttagttttgtgccataggaaaaaattatcttaaaactttggccatagttaataacattaacacttcaatagcaatcacatcttatatcctaaatgtcagaagatattctgaactggatgcctgaatagttaactaaaccagtcttgttagatgatggtactcttggcataaagcgaggattctgatatttggcatacttgtaaaaacaaatacataagtaaccattgaacattaatttgataataggtctagagactctaaaaactaaccaaacttggtgagtgtattcttatattaagaatatcttagtcatctcaaaactagcaaaatttaaattttggcatgttttccattcatatgttctttgcattttatttttgaggtttctgtgagaagtaaagatagttggaatttttgcgatattgaatagaacatcttctgttcccaacactgtttggcttcactaatttagaagtcaggaagcaatagaaagttggagatgaggaagtgctagagtaggtgtttgttttggttcttggagggaaaagattctttattccaatttccagagagaagagaaaactcacccaggaagtttaaaaattctttaaacaggtattttgatattggagaataacatgcatataattctgtaggaatgcacatgtaatccaagtgagtggagagtgtttttaatgtttttgaatgaaggaaatgaggttttgtttcacctgttttgcagcagtaagagaaactagtgctgcaagaatgtattttttaatgaagttccttattttgtcttgcatgttttagttttgcttatttttaaatttggaggtcctccataatgtcagataatattgacctgccatacgttagcactcttagttccgctactgtctttaacaggagcaaagagctgtgataaaccatgcttttttgagcttgtctgactcctaattaataacatgtttttggcaagacaacagattgaggttagaggatcagtaggacatttttattccatctgtcctatggggaaatttacaaatcccgtgctctaaaatgttctcaaacatttatatagatttccctttcatcttactaaattttgcattgttcttttcaagtatgtttcgtatttactgtctttttttctgccatttcccaaataataactccagatttcataattccagtttttacattccgttatctttctggtacaaccattcccattcagccttaaatctgagtcctttttagcagcaacttttttcctgggatcctccttcgtggtcttctaagtcagtgttagttttgaaatttttggccctgcataagttctgcatagcatctaatgtcaaaatagaaccaactggtaatcacagtattatttagtgtggtttccatgacaacaaaaatacatacgaagaaaacttctcaggttactatgctgaaattccaaaatgtctgagttttgaatagtgatcactttgttctggtattgacgcaattatattaggaaaaaagttggttgactgtttttgtttaattgacttctaaaatgttcaaattgtctagttctaaaagtttactaaatgcctagtgcagttaaacatactcttgtttaagtgtgtgttgctaaattttttactgtcattactaaataatctgtgtggcaaaatgtgtgtcagcacttttccctccttttttatctcctattttcaggagtcaaatgtagccataaactgtatccttgtctgacactttagctaaaaatttccagttaggggagtttattgccaaattaaatttggctgttccccccaacccatatagatattaaggaaggtgtacttaaaaaatgtttggactgcttttaaaacctgagcaatgtcattaatccatatgtggactagtgatgaatagatattttcataagagtttaaatgctgatatttggtggaagtagagagtaactcatattctatcaattcaagtattcttactatggttgctttccctatttgttcaatagactgataatactggaatttatagagtttgagccattacaacttttgtgaggatgtgtttcaaacatttctggacaaatcttattttgtatttctggaagaatgtagtaatcttctagaccgcttaaaaccaatgctcccaagctgaatattcttgagaaatttgtttttattatgccatttgacatttcaaatcagtgctcatatacagtaaacttgtgatagaaattgtattttattgctttttggattataattcatataaatataattacttgaatattgtttgagatcattaacatgccagggcagttcccactgatttagatggtccaagataatctcattcaggaggcttgaaacattaatggtttagtcttgtgaattttaacagttctctgtcatcgtttaacaaaaccaacaactgacacaactccttaagctgtggtttcagtctctgctagttcatattgcatgtttattttggacagtcttttgttaagcatggtgcttgtactggtttaaataaaatgttaacattaaaagacttccagcttttctttttttactcacctctttccccctttggagttactggtatgtacctggctagatttgtgtgagccataaactttatctggacaaactgagaggcaaaataaacaagtcatttggcagcttggtggaaggagaagataatcaagttataaaaatttctaaaacttggtctgatgctaaaatgtagaaaatgtcagtaaacagtagtagggacagacagagctatttc

SEQ ID NO: 75460 - DNA, 1145 bp, Homo sapiens
agtagaatgggtgcttggtgtatctcttaaggacttatgggtaagaaaatgtttaaaagttgcttttctctgtggtgccagggcatttcaccagatgaacttaaagatgaactacctgaacgacaacctcgatatccttttcttagtgctttaaaagatttattttctttagtggtcagacctgtttgtgagctcatttgttaaacatctaaaagtatccttctgtgtcatgatgacagccaaattaaaatatgtgtgcatatactagactaagaaaaatgaaaagttggtttattcgtgggatgaataattttctttttaaaactatttcctttattataacgtgtacaataaaaattgagaaaataatctgtattaaacttgtactttaaaaagttaaattttttgagagattatgtgattttataacttatccttggaacccatttaattttgtggaaagataataatgaaggtgtggcctaaaagaataggacagaaacttgcagctcagtagctccccaggtgttggtaaatacctgtctgagagcagtaactttagtttctttaacttgagaaaaaccttcattgtgtatagttataaatatcaacatgatgatggaagagtttcatatcctctgtgctttattttctccagtcctgttggtaagtgaatttctttaaataacacatatttggcttagatccaattaagccattttatactagacaaattttctgctgtttttaaagatgaacattgttgaataacctaaattgaggagggtctgtgtctatgtgtgtccatgtgcctgtgtgcatgcatccctagaaagaatgaagcatcatctcttagaacttattttcttaggataaatttctagacgtgtaattgttgactcaaatcatacatgtattttaaggattttgaaacgtgatgacattctaatatagcagaagtattttctttttatattttaatcatataaaaatgtgaacttcacatataattgcatatatttgtgtttcttttaaatagtagttaacagtgatatgcttataatcttgagaatggtcctagagtaatttacattgggtattaaaatgggttactggtatttaaggaattcattatcaccagaact

SEQ ID NO: 75461 - DNA, 2539 bp, Homo sapiens
taacacttttgttgcttatattttttttcccctgtaattgtgaggacaaaaaataatttattaattctaagtataatcagattattttcttgttcttccttcactgtgtaaaaatagtatgcttgactccctttctaacagcagacagtgattcttgactttccccatattcttcccttcctctccagttctgatgacattgcacattattatgtgtgtggtttttgagacattcattagccaaagagaaagttaaaatataccttacatatatgagatgaacaaatttgtaggattaagcaatgtagatccaaaggttggttgattttaaagttcttttaagtgttcatgtatttaatgctttcacttaattgacatttgtgaatgtcagtatgcattataaaggtattaggtttcataactttaacatgtacatatattgaagtcatggcattttatgtgtgttttttttcttttatagagtgagtctttggttgtttgtgatgttgccgaagatttagtggaaaagctgagaaagtttcgttttcgcaaagaaacgaacaacgctgctattataagtaagctaaaagtgattgcctcaaagttacatggtcttaatttgtttttaatcttgtagctacattgaatgaactgaaccgttggaaagcaatgttacttcctctgtttcatttccccaccaccacctttagatcactttaaaaaataagtaacagctaattctaatgtcacagaacagaggtggattgtcccacctcccccatagtccttttatcagctgcctgtacagctctggagaaggcggtcgtcttggtccttgggtaatgaggattcccatctgcagtgacccatccaacccatccttcttgggggactaaaaatagcctggccattcatcctcaaatagaaacctttgcctacacctaaaatgacaaagttcagcattgtgtacatagtgactttgggcattattccagttgtagatttgaactctggtttcaggaagagtacttttaagtggcactggcactatcttctgaaaatggaaaaagtgatttgcatattgctcctcccactgtgagctatatctgacattatgcagatttcccttgtattcataggcagtatttaatatgtaggtagtgatttagaaagatgaggaaaggatgagggggtgaaaatgtaaaactctagagaccatgcttaacagagatgcatctggcagatgtgatttaatcagaggtcatgacaacttgtcatgaattctgatttcattataaataaatactgcaatgtcgacatatggttcttaaaagtgaaaaaaaaataaaagtgaaaatgtgtgttagtgccatttactgcaaaagctgaaactatttgagattacattatatctcacaagatttactatcaaattggtgcaaaaccaaacatggtcaactttgccagactaacaggaaaggatagaggcatagagtatctaaacttattttgatttagctttggattacattagatatatttgaatgtagatatcacttctatttggttattcactttcttagaataatgataccgtgccatgaaatcctgaccttggagaagccaggaattttgaggtttctctattttgatccccgatcaggcactttttcccttgcagttctgaccatgttgcatatagaccaatcagttacagttaccctttcaggctttttcttattatctagaagttggatttgagttacaaagttctttcatatacacaggaaatgtaagaaattaacagcaagttctaaataagcaaattaggtactgggaattatgggtaaaagcttttaaaagctgacagcttgaaaagcaaagctagctaataaaccgtaaactaaaactgtgaattagttatatgcttctgtttcttgatgttttaattttagatgtccgaaaaaaaaggctgagattgtgtgggttgggcagatcagggtcacattagaatcccagcttactcatacttgatttttattttagtgaagattgacaaggataaacgcctggtggtactggatgaggagcttgaggtttgttcaatgaactaaatacaattttatagttaagtaattattatttctcaaaagatgctatattagttacatatgcttctaaaacgaatcttgaacctcctttaaatacatgctcattatgcataaaagcatgtgctaattgtgtagtttgtgatattgctaatttaactaccttgtttaaaagcattagtgaagtccagtgtaataagtggtataagttggggtcatatactgagtaagaagtgagtcaactttgtaacttgcttctaagttgcttgactagtacttaaaacctgaaaccctacaatttaaatatctggtttgtcaaattaagtaactagagtaaaaagaattcaattcttttttctgaaatcagacattgtttctttccgctaagatactggcttatgtcattcagtatttcctgacagctgggacat

SEQ ID NO: 75462 - DNA, 1382 bp, Homo sapiens
gagggcttcagcttctgagctgtaggttggagggaaaggggtctgccccatcggagggctccctcaattcctgctttccctgccagggccgtggccaggttccaggggttggtgggccccgagcatcttccacctggcggcgttttgggggaggactcgaattccgattgaattctctcggcctcaccttagcttctttctctctgctcctttccctagcttcctacagaggatttctccttatctttgctttcctatggcagttggaaacctttcgacccaaagctttggcactgggccttaaagtaattgtcaataactttagttttgttggttctgggggctgtggcttctgttcttacatgggatggaccccaagcataaaaataaagtggaaaattaaataaatcgccatcaaggatcttttggatccatcccattaggttttaaaatatgggtaaatttcattagaaacaacaaaacactgctctctgtgaccatccactcaattctcagcccactttcatcgaatagatcttgtcatggtcactgaatcgaatggattcttttcagttttcgtcttctctgaccttttagctgcattccagagtgttatactctcttgtttttgaagcattctcttccttcattcttcccctttggcttctgggatacagagctcctcctacttctcctattggtccatctgtttccctttcagactattctcctttccctggacaatgctcgaaggagtcccaggtttcatcctaatccttcattttccattctgtattcttcatcctaaactatggcttcagttaccatctatattcagatgacttgtgaatttacagctcagaagaccttgcttctgagatccaatccagatctgtatgtacttttttttctttgagtcggagtttcactcttgtggcccaggctggagtgcaatggcgggatctcggcccattgcaacctccgcctcccaggttcaagcagttctcctgcctcagcctcccaagtagctgggattacaggcatgtgccaccacgcccggctaattttgtttttttgtttgtttgttttgagatggagtctcgctctgtcgcgttggttggagtgcagtggcgcgatctccgctcactgcaagctccgcctccctggttcacgccgttcgttctcccgcctcagcctcccgagtagctgggactacaggctcccgccaccacacccggctaattttgtttttgtatttttagtacagacggggtttcaccgtgttagccaggatggtctcgatctcctgacctcgtgatccacctgcctcggcctcccaaagtgctgggattacaggcgtgagccaccgcgcccggccctaa

SEQ ID NO: 75463 - DNA, 1026 bp, Homo sapiens
attttggtataaattattttgatataacatgttcttttgtagatggtaggtaatagatggcagttgtttgcttttgtacttgcttggaaaaataagttgtctgcaggaccatataggaaccattagaattgtaaagaaagagatgcttaaatttgttaaggtgaagaggcatattcaggaaagccttcataaaaaagaatatgctgagtctctcttactttttttttctttattccttcctccttttttttttttgagtagaatcttggaagataggtgtttacttcgtggatgagaaatggagtgatacattaaagaaacagtagttatggctaaagcataggatgggacaggtaacagaggagtctaagaagactcaggttcttcctatgggtcctccatagccagatcctgttagaaaaatgaggagtacagaaagaatagcaagtttccaaagaaaggcaatgaattcaattttgaacttttggactttgaaattctttcgtgacagttcaatagaaataaagagtaggcagtcctagatacagttctgtagctttttttctgggccgagaccctgtcccttctatacttgcttacatttctggtttcttgaaaacaaataagccagatctttctctgcttttcatcctagtctagctactgccgtatttctcttcttcccctcacagccagcttcttagaagctgtttgcattttccttctcttagcctgcttcatttttactcctcagtgcagtgcagtctgacttttccctgtatccctttactgaaatggctttctctgaggtcactaattacgacttctgccctgcacttttgacccccagcagtcatcaaatccagtgggagcctttcagggctgagttaatgctctctctctagtattttacagagttgaccttcatttgcaacgtcctgctcccttgcgtctatggaccattcttgtctattcatctttcctgcctctaactctcagaatctaataactggtcagaaatcagtt

SEQ ID NO: 75464 - DNA, 1003 bp, Homo sapiens
ccaggcccgcttcctccagctctgcctggagcactcgctggccgactgcgccgagctgcacgtcctcgaacgcgaggccaacagccccggtaagtgtgcggcggccgccgccgccgtcccgcctgcccaacccccgctcctccctccgcttctctgcctcgggccaggccgaggccagtccctgccagccgcgccgggacctggacggcgtggccccgaggccctcggaatccaccccctccgggtgtccccccactaccgccccccacctacttacctccgccggccgctttgggattttgcccactgtgaactccgtcagccctttccgtgtggtagctacggtagcatgaatgattgatttttctctcatgcagtttcctgggaaataagtaagtcaggtcacgtagagtctggattttctgggtgtgtgtgttttttccttcctcctccttcttttgggcaacgtggctcgctggatttcagcaacacatgatagatgcccgggactgcccttcagaagccaagcttggataaggctgtgtgaggagtacatgaaaatccaattttattattcatttttccccacagatattctggttttagagcttcgtcttcagaataatatgcaggtgacgctagagactagtaaaatgacatttgcagcatatatatatatatatatatatatatatatatatatatatatatatatataatgcggttaagcttactgctcgtgacattatccatattgatacggatcttgtagaaaaaaagggtcttggagaaaggacaggcatgaagtgggttacttaatgcttttcgttaggaaactttactgaatagaacagaatcgtttcatattaccctgctagtatttacagacacctcaactagtatggaaagtgaatatagtcgaaaggtccagcagtttcctatttgctagcgtgggtggtgacagactgaaattatatcctggagggtaggaggaggctggggg

SEQ ID NO: 75465 - DNA, 1032 bp, Homo sapiens
gtattgggggtaacacatttagaatggggtgagggactgctgtaatcagtagtaaaaagtgacccctgacagcctgacaacttggaaagagacagaaaaactgtaactttagacaagaattggggcagaaactttgaaggcttgggaatattagggtgggaaccctcaattgaccttgtaggcaccactctataataacataaacaaataattgctatttactgttgttaacggtgaactatggaaataatacatttttagatacactctttaagaagagaaggaaatgttcaatatactttggaaatgtttacacccagaataattaacctctgagctgttttgatgtgtaaggctcttaccaattcagaaaactaggctgtgcagaatgactcattcattggattgctgagatttcctgtaccgaagtcatcttgtatcactttattttgtaatcatcaatttaaaaaaccctcacattttgtctagtgtttagagattttaaaacttggtaaatgggaaccaaattcatatatgggactcgatctcagtataataaaaaaaaattactagtaatagtatgaatatatctctcgttttatgcaggactgattttaaatagtgagatatcctgcgcattaaacatgatttatttgagatttgtgggatgtaatttggtgctttcattctcttaaatttattgagaatctagtgattcactggttcatcctttgcctcaggctcatggtcattggagattccaagaaatgattgaatcagtccctatggatttatttgtatgtgtttttcttttaacagatatggtcatgatcagttctctagtacagtcttgttcccaggatccttataaccttagataagtctcttcagctactgctccagttgaacattgagacttctggccagtctcagttccaggactagcaggtcatttgatacctacaagtagcaaaaatgcaacccactgactttacctgaagtttccaaaagaaaaatagactttgtggcatt

SEQ ID NO: 75466 - DNA, 2616 bp, Homo sapiens
ttagtcagagagtatgctagtagtgcaggtgtgtttcatatgatggaattattgacttaaaaatcttttcaagttttacttacgcatgtaagcactgaaatactgacgctttttagtttggtagtgtggtcactcattaaattatttgagcattttatatactgctctcagcaataattctctcaccggctctttgaactacctctcacagcctgcactgagtttgggtttgaagaaggccggagaatttccccgagctttttgaatatgctgaaatttccaggcactctagcgatcagtgtcttatggaaaatgaggctccaggaaagatttctttctttctttctttttttttttttttttttttttttttttttttttttgctgatgctatgggctgtaaagttgagctggaaagagcaggaatgttcattccagagactggatgggagagttctcttccccctacttccccagagcactcccataaagtgcagtcactggaatttctgaagcagtttatcctgatctgtcatagaatccaagcgtctgtgtgtgcagcataaatacatacacaacattgactttcattgtatacatttctatctgtgtatgtgcaccaaacatgtgatttaaacacagttaaaatgcatgagtaaaatgtcaatgctgaaccagttttgaaattttgaagagtggtaaatgaatgggagaaacaaactgtctgacttcagaaccactccatgtgcctcaagataaataaacttgtctccgtttgaaaaaggaaaaaggagggagaaaccaggttttgcacattgtaggcatctgagaggttaatattgggcctgtgcaagataccagaagaatatttaaaacatgatctatgagcgtatggatgaagaaataggaaccagcatggttttgctgtgagtgggaggatggaccgtggagaactaatgccatttcctatctgatggggcagtgggaaaggggggagatagcatttgctgagagacttctgtgttccaggcagatcacagggaatcccatatctaagtttcagcatagcctttgacaaaacctcttatttcctgatgaattaatggagaaatagcagcaggtgagaatctagttgtgtggctttagcgtggtttcagtgactgttacaggcctgtctccagccactgtctgcctaaagggagatctctggtgctgtacattgaagctcacatgttggacattatcactagtgtcgatggaatgtgacttagcctggggtccccaagaaggcagagcctgaggcaagggctggtgtgcgggtggcttattttgggcactgatcccaggcaacaggagaaggggctacaaagagagaaacaaggaaggaggaagagccaacacaagcctgcattatcaagctggtcactgctgtgggcagtgggggcttaatcccacagggatcctctgaggagccacatagaatgtgcttgggaagtggctgaaggacagatgaggtaggcatgtatccattattcccctctcccttggccaagtgttgccccagggtactgagtccctgtactttcaggtttgtacgtgtttctgcaggtgtctcaaagacgccccaaggcagaatgctagaaagacatggtacagccaaggcagggtgctgtcaggttatacctgtgtgaagctgggggccacagcaagggctgcagtgttatccaagctaagaaggtgtttgtaaagtctatggatgaacctagaaggatagctcatggcttgatgacagaatcatgatcaaaatatttgaatgtaaccagatgacatataaagcattaaagtgtagcccctacattggcatcccctaaacctaagctagagaaggcatagtgcttcaatagcatgcataaaaagggactctggcttttagcacacttacaacttcatatgaataatgtcacaatgtggttgcgcccaaagccactaaactctgtaatacagtcattgtactcagaacaagtctgtgctaccagtcgcactctccctggagtccaggaggcagttctgggtacacactcggagggagatggacaaatcaggatgtggccagagaagacagaatggcgggggggcactcgaaagccagggtgaactgagaagaagatgagcagagagctgtcactgcttactcagaaagctggcttggagttgaagggttaaattctccgtccatgtagagggcagtgagtggaagctgctgttcatttagctcagagtagagaaaaactttatgatgattagggctgcccaaacaatgcagtggcctgggcttcatcagatttggacgagcctttagcatcaagcagaataatcctttcgagtaagactggctcctgtttattgagcacctgctctgtgccagttgtttgcataacatgacctcatttattcttctcaataaccctatgagatgaggtaggaactgccattattccatttgtcagggaggaaacaagcactctggcttcggaaccaccccacatgcctctccactgtaggaatttagtgtctatttgcttaggaaagaagctctgatttcttggatgacttcca

SEQ ID NO: 75467 - DNA, 1044 bp, Homo sapiens
aaacaaggaaaggggccgggcgcagtggctcatgcctgtaatcccagcactttgagaggccgaggcaggtggatcacctgaggtcaggagttcgagaccagcctgcccaacatggtgaaaccctgtctctactaaaaatacaaaaattagccaggcatggtggtgcgtgcctgtaatcccagctactcgggaagctgaggcaggggaatcgcttgaacctgggaggcacaggttacagtgagccgagatcatgccactgcactctagcctgggtgatatagtgagactgcgtctcaaaaaaaagaaaacaaggaaagaactataggaagggccttctctcctaggagctgacgccttaggcagaagatcacagccactgacaaagcactctgccagggagggagccgacggggagatgccccagcctttctctcctcagggtcctgctggcaatcccattggaggacccaaatgaaccccagggaaccacgagatgtagtctgaaggggcagcctcccagggcacacatcagggtgagaagggtggagagtggttcttggtgggggagggggtaaatgcagaatatccagccgggagagaaaagcttcaggttctgaaaggtagccttctctgttcatagccttcctgaggattctgttgcttgtagccagacctctaaatcagatcttatgaaagggagccccatgcagaagtgttttgtttcatgcccattgcattttattgaaaaagaaaacaaacaaaacaccatatatctgtattagctttggggagtgacacctcaaaatctgagtttctttttttttttttttgaaaaatggaagatttggcagcaccaaatatgcattcctatgtgggtacaatctgcttagcgtgtaggagctgtcctgttaggtaggcatgcttcagtttgcctcaatccccacatctctctatctctctgttgtggtctttttctttttcttttcttttttctttttttttgagatggagttttgctcttattgcctaggctggagtgcaatg

SEQ ID NO: 75468 - DNA, 1028 bp, Homo sapiens
aaagaaatggaccctaatatctatgatgaaggatttggagttagaagacctgagtttcaattttggcatggctgtttgtctagctctgtgatcttggacaggtcaattgacttgtcttaatcttctcatccatttagtggagacagcaccactattcacaggactattgtcagaattacgagacaatagcataggtgaaaatataaagtactttgtaaactaaaatgttacacggataagctgatatcattggtagcaagagcaacactattccgaagtttttgtggtgtagttccctctgattattcttcatattacaggtcaatcaattgggtagacatcctcttaaacctctgttcctcttttcttcttaaaacactgagatctcttcatctgaaataaaaatttcgagagagtttatagatttgtagtcttggatcctggagagaagagacatgtattcctgtatacacccagatcattaatcctacttttaattctactccaaaccttgtaccacatcatttcctactgccaggctggagtgagtaatgacaaccttttggcagatcaaatttcagttttagaattcaggaagcaaagctgtgtcctggcctttctttcttctttttaaattatagctaaatgtccttttctgtttgggggcaagttacatgcctggttctgccagagcaaacgaaaaccaggcaccttctcctgagcatgtcactgtcataaacccaggcagtctggtgaggcagctgcttaagaaataatattccaccattaactgccccacccctgaaattagcatctttggaaggcattatccaaggttttgttgttgttactgtttttgtttttctatttattcctaaaacaaatcttcattaagttcatccagtgcttccattgacccagctgcttggaattcagtgaactgtcaacagaatataatttctttcagaatttgttattctactggaactacactgcagtgtctttgtgattgagttagccaccagata

SEQ ID NO: 75469 - DNA, 1550 bp, Homo sapiens
acggggtttctccacgttggccaggatggtcttgagctcttgacctcatgatccacccacctcggcctcccaaagtgctgggattacaggcgtgagccaccatgcttggccccattattttattgtatccttaattcccttagctcacccttgctgagcatagttgtctgtggtagaattagccattggctccttgcttgctcttccagtttgtggtgtttcaaggtgctggaatccaccaccaagaatggtggcttcccacaatgccttttaacaagaatgtgtctcttcaatgcacgttgtaactttctctttgaatttattgaagaaccacaaattaagtctgtgtctttattgaagcaattcaggtgatgggaagaggctcttgaatcaagaaagaaaggaagaaccaggagtggtgatattaggtaaggggagatttaggatcactcttccgcaatacaaaatgaacttcctgtgctaagaaaacttacagccctgaataaggagttgatggcatgtctatgcaacgtacaattttattcctgggacgtcgttggaaaaccattatattagatgatcttcaatcttttgtagttctgaaaatttatgaacgcttatacatgttgcttataaatcctaaatgaaaaaagggctccctgtcttaaatttatgttctatctaatatgcacttttaaagtttgagtttttattgcacttctgatctttttaaaattataaaacctatcatacatacaaaagagtatataacacttattaatatgtatagttaaagattaataagatgaatgcccctgtgcctaccacccagcctaaaaaacagaacattaccagtgtctttgaagctgtctctgttaatgtgcatttctagactgctttaacttattggatttgtgcattgcagtgttttatttgtgagcagttatatcagtgaataccaagtgagagtggctcagccatttttaccttatgctcaaactcctttcagatttccaatctgtctgatattggatttaagaacagttaaatcttactgcttggaaactgatctttaacaagctagttttcctgctttaaaataatagtgttgttcgtgatgttaatttccctgtttcacttgacaattacagcgggggtagcttccctgagcacaggatgaggatcagtcagcttgagtatctggtacagaaggcaagctccctgtgcaccaaaaatctactcaggccctggagaaagcaaaaaaaaaacccagcagagcataattaatggaaactatctttaagtcatcaacattaaatgtgattgaggtagcagtatttcctgggtgcatgattggggcattgaagtactacactttgatttctgatgtgaattatttgttgccatctgaagttccaaagagccaagattggatgtacatatttttaaaaatatgtgctttggtgaaaagcaaagttttggaagggtagaaaactttcagtagccaccaaattgtgttattttaaaatgagcagggaaacctcacaggg

SEQ ID NO: 75470 - DNA, 2960 bp, Homo sapiens
tgaccttgtgatccgcccgcctcggcctcccaaagtgctgggattacaggcgtgagccaccgcgcccggcctcaaggtcttattttaatggctataataatttctgtattgcttcattgtttggtatttgactattatatatgggcaacatggtgaaaccccatctctactaaaaatagaaaaattagccaggcatggtggtgcaaacctctaatccccgctactcgggaggctgaggcaggagaatcacttgaacccgggaggcagaggttgcaatgagcccaggtcacaccagtacactccagcttgggtgacagagcaagactccgtctcaaaaaaaaaaaaaaaaaaaaattggaaaagtaacatgccatgccaggaaaggaggaccctcagccactagtgtcgagaggacagaagcgaagagagcaaaccatttggactaagaaggcctgaatttgagtcctgggctttgccacctactttatggccttagctgagttactgaagctttttggacttgaatttcctaccttcatgttggggatgatcataatattttccatacctggcccagttgtaagtggatcagggagatggtgtactggaaagcacttggtgctctgtggtgtcctgtacaaaacatagaaaatctgcctccagtctctgtctcagtccaggtcctcacctgtcataataacaattactttttgttatatactgcctaattggaaagattcctgttgcatatatgttcttaatcgtatgctctcacatatgtattgaaaggaaatggggcataaataacagaaaatagcttgcctctgtatcgccccgggaaatattggaaaatgccatgctaagcccaataacagcagggagtatgccacttttgtctaatactggacatgctgtgctggcacatagtaggttattgagtttgatatttcggtgaatgaaggtcttgccaaattctttgagcaatggattttgcatttacactagctggagaaagggagttacattcagagcagcccaactgtgtatttttagtggaagaagaaggctctttcttaggtaagaatataaaaagaatcgtagatatagaggtggaagggacaaaagaagaagcaatagcatggtctccatactaatcccactttaaaggtgagggcgtggagaaaccatagctggacagttagcaacggaagacagctatgagtccagaccttttgagatgatgttaaagtcacttaacaagaataagtaaaaggcgcttttcacatgtcagaatgttttttcttgaaaattaatgaaggcaaatgttcattttattcctggtaactaacagcctctcagagatgtgtatgtcctaatctccagaacctgtgaaaatgttatgttacatggagtagggggatttaggttgcagatgaaattcgttcttggttgagtttaaaataggaagattatcccagattattgtagtgggctcaatgtaatcacagcgcctttataagtggaagttggaggaggaagagtcaatgagagagacgtgatgtgagaaatactcagccagccactgctgacttcaaagatggagaaaggggctatgagccaaggaatgcaggcagcctgaagaggttggaagaggcaaggaaagagattctcccctagagcctcccgaagatgtgaagccctgctgacactttgatcttagtccagtgagacccatttcagacttctgaccttcagaactgtaagataataaaagtgtgttattttaagccactaaatttgtggtaatctgttacagcagccaattggaaaagaatacaattccagcatagcctgctcctgatggtcaccttgtgaagaataatgtactgtttggcattcagatgctttaatggagggctaatttatgacgtctggaaaggaaggtaaatttaacaagacaagtttgaaagaaatagctgtaattgacgagtgcatcattacaggttcctcttggccacgctgcccttttttctctgccacacaatttctctgagtggacccttcttgactgtcgaaaaaagtaattaagtcctttatgagtcagactgacagcaaaagttagcaatcttgttacagtattaaaacttgcttacaggaccaaagactttatttggtctttgaaataaaagtaaaatcaccatctctttgtgggtttcttttcacaatgaggcattgatttgcttttggagagatgggagcccattatgattttactttttttgttggcgctgctgatattaaatcagcgtacctcaggtgatgaggttatatatgccgtgtttttaactttcatctgcttagtgaattccttttgtcttttgatctctctcagcaacctagtttttgtttttaattttagatatgaccctgcttttccagaactagatcactttcattctgttttgaatacttaataaaagttcccaaaatgaacacgagttttcgtagccttttgttttccaaacaagcgagggctcatttcttccaattagaatgaaactaaaatgcgaccaagtcagcattttcattggaaatgtcaagaatgtatttctacaaaaatataaactgaactttaccatgtaaagaaggaacaaagtcatctgtcgaaaagcaactccaggccccggagctcacagagtgcccattatagtcgtcccagaaaagcgttttctttaccagagaccttaccagctagctcagcctggcaccgcaatgggctgacaccagctcttactattctctttgctcggggtctgaaaagtattttttggcacatatctctgatctttggttctctgcctctacaactgggggttgcttatgactaaatgttttctgtgataaagttaatttctgaagcttttaattttttatgagccaagtcacctgtaacactaact

SEQ ID NO: 75471 - DNA, 1441 bp, Homo sapiens
caaatttctctttaaacttgaaaatcaactgaagaatttaagtcaagtttagaatagataaatatgtctttgagtatattttacaatgtctgtttgatttagtagatccttctggggacaggtctttctagagtttggagagttaccaagttactaaggtgtatttcctcagggctgcttcttgcttgttctcagagaagttggccaatcactgacaaaatgcatttcttttcccccttttcctgtcgtttgttttatttttaagctagcacttgtattttggaaaaattatttactcaaagatatcttgggcaggaaagaaaaatgttttacttcagttatttattggatctctataaagcaatatgatttctcctaaggctaactatatagtaggactagcatcataaaaaagtcatgtctttaaaaatgccaaaaatttgattttttgtatagaaagaaaaaaagagcccctttattaatcaaatatatgtccctttaaaaatgttttgagggtaaatttatagaatcatttccaatgtgtagacaactgccatcaaatgcattcttaacaatgatttaaaatagaatgaactgtaagtgggaaaattgctaaggatgataatctcctgatacaactaataggtaattattttaagtcaaaatgttaattcatcaaaatcagtttcttaattcagatatggttgttatcaagactttgaaaatgataactttcttttcatcctatccaaaattctatttaaaattctttaatccctcggggtaggaggagtaatcttgagctcttgccttctcatctacatttttcttttctgactgtgtctatatgctgtaacttagtgctcagcccatttcacatagcaggtgttttttccctatgtaacatattcttagagggaatgactataacaagtttaaccaagggcatgttaagaaattggggaggggactgtgccttggctagggataaccttttttgttttaatcattttttttaatttaattttttaaacttttaagttcaggggtacatgtgcaggttttgttatataggccttgtgcccactagttatttttcctgatcctcccaccctctccactctgataggtcccagtgtctgttgttcccctctatgtgtccaagtgttctcatcatgtagctcccactggtaagtgagaacatgcggtatttggtttctgttcctgctttcgtttgctaaggatgatggcctccagctccatccatgttcctgcgaaggacatgatcttgttcttttttatggctgcatagtatttcatggtgtatatgtactcagcctattttgttttaactgaaagacaaaaacagggtcaggtaagtcagttaattttttaaagtattgtttattttcctttggacttgaaagactttttttttctt

SEQ ID NO: 75472 - DNA, 1048 bp, Homo sapiens
cttttagttgtttccgaagcatgctaagcaaagtctgtgtttagctcctgaccgaggcttggtgttgactgtgggacatacttacagaatagcagctctactgctaggtgtgtgtgtgtgtgtgtgtgtgtgtgtgtgtgtgtgtgtgtgtgcgcgcgcgcgcgcgcgagtgcgcacatgtgcatgcatgagggacagaaagagacatcttgtttttttttagactctagcttccaggaggtcaggaaaaatagtggctctagtttaattaacatcctgttttagcaccagttacagggtcattaccacagtaaatgttagatgttagactttatctcttctccatcagaatttcactttccacaggatactgtatttctttcaggctaatctatattttaatggcttctaaattgtcaattgagatggtaattagttctaatttagtgataatgctgtgaacatggagtaagaagctaattgacatggcatgctaccaactagaattttatgaactaaaacttcttatctcttgcacaacagtgagtgttctcattataaaggtgccattcaggaagggagagtggctttgcccacaggtgttcggtaccttgtggatacgttgctgattgctaggtgatggccaactttgactttccaagtcgaacgggtctcccttaaacctgcttttggaaacttgtactaaaaacccctcctatatgcatatttagttaggacatgtttgtttccagttgcgtttgtttttcctactagatataaggaattcctatggaggctgagggatatacaagcaggagaacagcaattctctgttcaacacatctggattctggtagaatagcaatacattcactgaaaagttcttaatagtttacagaagacttgcacatatgtgacttcatttgatctcataattgaagtcagggcaggcattattatacccattttagagctgaagaaacagaagttcagggaagttaaatagtttgtccgtgattatttgactgggtaagtgggagagccaagc

SEQ ID NO: 75473 - DNA, 1049 bp, Homo sapiens
ggtctttgcagatgtagacaagttaaaatgaagttatgacgtgatggtgggccctaatccaatgtgactgggtatccctataagaagccgacaatgccatatgaagagagacacacaggaagagcaccaggtattaataatcacagaggcagagattagagtgaggcagctgcaagccaagcaatgcccaggattgacggccaccaccagaagcttggaagaggcaacgacagattctacttagtgtctcagggagagcatggccctgctgacacatcttgatttcagacaacctgatttgttttcagaactgtgagaataaatttctgttgttttaagttacccagtttgtggtattttacagtcatcctaggaagctaatacaaatatgtttttattgtaccagattcaatcagtaagccccagtatggcatacagagtgatacatgaatatttcgttttatctgtcccttcccatcttattggtaactgctaatgacagtttatctcctttctatgcatgtatatttatgttagtttttatataatgaacctatattatattcattttctgctattcttttttttctttaaagcttactggtatattctggagatctctaagtatttggcttaaaaatttttttttcaattgcggtaaaatacagtttatcaacttggccatttttaagtgtacagttcagtggtatgaagtgcattcacattgttatgcagccattaccaccatccatctttagaactcttttaatcttgcaaaaatgaaactgtgtgtgtatattaaacaatcacgccccattacttccttcccctggcacccactgttctattttctgtctgtatgaatttgactcttctagatacctcatataagtggaatcatacaggacttatccctttgtgtctggtttatttcattagcataatgtcctcaagcatcatcatgttgtagcatgtgtcagaatcttcttccttttggaggttgaataatattccattgtatgtatatatgtcattttgtttacccactc

SEQ ID NO: 75474 - DNA, 1058 bp, Homo sapiens
ttccatctccccagtgttcctccaagcctctctactcatttcccatcctaacgtccttactcttcaccctcttgcatagcctcgtattactattgtcactcattagaagtcaggctgaggattcgagcatgcccgtggctgggcaccttttccacgctttgtggggggcagaagaatcagggccaggcttgtgcttaggcaggataacctggccaagtaacctggcctctctgagattcagtttgcacacctgtaaatcaagaatgcctggctcacagggcccttgagggcttgatgtcataaggaagaaatcaggcaaggaaggaaatagacaaaacctggaatccagtactatatcctgtttctgactgctagtaatattaaaaggatatgtgttttcttggtcccttacagaggtttccccagcctttttttatgcccagacacaggctaacatttgttgaagacactagggttacccagctatcctgggtcttgctcggctgcttgaggactgatgagatcaaaatctctatgggtgtggaatgcatttgaaatacatcatagttggggactcagtctcacagttcctgagcaatatgccatcttcccttggtggtatccattcattcttatcagagctctgtgtgtgtgtgtgcgtgcgcacgcacacacatgtccgtctgtctctctttttggtttgtttggtttcgcagtgtgggttttttgtttttggtttctgagggattttgattatttgttgctcttacataaccttcttttacctggacaatgaataatcagtcatcaaatgactcctcatcctgtgtctcattcttcagcaaatatttactgtggttattctacgtgatgctttgggggaacaaaggtagatgaatatgtctcctccccaacctcaggtgctgatagtcatgaggtataatgtgaaacctaaaaatgagggggaagagccaaggagcccagctgttggagtgtggggtaaccctgaactctggaaatttagtttggaaactacttgtgctgcaacattacctggc

SEQ ID NO: 75475 - DNA, 1066 bp, Homo sapiens
aagcagatgtggtgagagtgagagcaagagttgggttgtggacatgttgactttgagatcatctgagtgagcatggagagggtgcagttggagtgtgaatctggggctcaggggagaaacctgggctggaaatacaaacgtggagttgtctgcatactcatgggccagaggtcagaaccgaggcaggtggctgggggagctggcctggtttttgtgccctctgggaatggccagcctcagacctcctgactggtcatggccaggaggtcagaaatctgaaggtgaatcctaaccctaacttgagtccttggctgagatctcaggactacttcccagctggcctgggtcctcaaggagtaaaggagcagtcctggagcacccagctgtgccggtacctggggaaaaagtaactacagatggaaagtctccatggaagaaatgaccagatctctactctggaaaggtaaagggctcattggaagtatctgctagggcaagaggtacctggttcttgccttttgaggatggtcagatgcctttgaatgaccagcacctgatgaccttctgctgtcagaaaagactggaatggtcataatggtctatacagtccactacatagatgcctgccttttctagtgaatccaagggacagtagcattttgaagtgatctttaccaagtaaccaaaagctctctgtattcattaactattgctgtgtaacaaactaccctaaaacttaatgacttaacataacaacaagttatctcagttttctgagggtcagcaatttagaacagcctggctgggaagctctgccttaaggtctccaacaaagctgtagtcaagaaataaactagacctggaggagccacttccaagctcactcacatggctggcaagttgattctggctgttggcaggaggcctgaactcctccccatacaggtctctccctgggatgcctgagcatcttcataattggtgtgactggcttcccccagaacaagtgaaccaagacagcaaggtagaagctgcaatgctttttatgacctaaggtcagaacgcc

SEQ ID NO: 75476 - DNA, 1058 bp, Homo sapiens
ccacccatgaatgtgccaaaccagcctctaggacatggatggatgtctcatgaggacttacgagctagaggaccccagtgcctcccatccgatcatgcccccctgtctccacaaagcagtgtagcctcttcaggaagtggtgggagtgaacacttagaagatcagaccactgctcgtaacacattccaagaagaaggtagtgggatgaaaggtgagtgactaaatgagaaaccactggggaaagagcccctccctttattggagaccagagggtaaaaaaagagaggtagtcagcaagagagaaggagcccaccccttccccaggcttacgcatttgatctgtcccttccagaactccaggttgaccatggcagaaagggctcagattccccttccagtgcttcttgccaaaatctgggaaataggaaccagagtaagagaggtcaacccactctctctctctctctttttttttttttttttttgcattgcagtgacttgtagaccattaaatgagtcacagctaatggtgataggatcttctgtttgtaaagctactgagctgctccaaccttgtacctcattgctgtggccagggacctgtcagtaattcagaaaaacaaaccacgggatttttttttttcctttataagtctatgttaatgcagaattgcagtagtgcttcctttctctctcctcttctctttgatatccaaagaaacctttaaaccctttcctctgcatctatttaagggacatgaaaataccactgagaatctctaacagtgttttaatcctgataacagatttgcatacaggtgataaaggccttttgtgtagcataaataaattcctccattgccttgtgaatctaccctcttctaaaagatattcatcaggagatagatttccaaattacttatgataggtacaaagaggatacgtgcatgctatatttttagactccacttgtacaagggctgggaagcccttaggcaaagatgcacattcagagacacactagtaacaattttagatggtgaaacagtaaccactca

SEQ ID NO: 75477 - DNA, 1100 bp, Homo sapiens
ctgtaaccttgacagtgctgctaaacttctcttcatttttgaaaggaacatcttccatcccacttcagtagtgaagagtgggtaccttcttacccctcagttggctttcctcttctccccctcagagatcaagggtgcagtcatatcttggagggagagagcttttgagagcagtctggcttgctgtggtgaatgggagttgatcttccatctgcagttaccaggaccacccctacgtgagcccttgtgtgggaacaaggctgttcatgtttctgtctgccagagatgcctttctccctgcccttcatgctgcattcgatattgggctcttcagcaatatcgatcccatctttctgtcttctggggtttccttgtttgtgggtcgggtgctgcatggtctgttgatctgactcaaatttgcagccatttctgcagcatgcattagagacaagcactcccagttctaactggagccctgcttctgtgtgaactgttgtacacaccgcacagcctccctgtggctggtttatctaaattctaaaaaggaaatagaaatcagcatgatttaaaactgaatcccactggtaaagaccagcaggcaaatatagaacatatacaagatgagtgtagcactattatcaagaatgaccatgagaagataaatcagtgtggacttgcagcaaggtctaggagctttctgaaggatgaagactgtgggatgagacccactgatgtgcacatgcatggtggtgctttgtcccagaaacctcctacctgttggcattctctccttgcacttccccctgaaagtctgctactcccagagctctagcatggctctcaccccatgctctttgccagagagattcacccacttctgtggctaaaacaaccaccatgaactactgacaaggaacctcgttctccagctcagacttttcttccaagaccttgactggttgacttctccccttgtatgacccaaaggcattgacagccagctgatctcaaatggagtttaccctctctctcttctcaccccaaacctgctgctcccctgttttctctgtctcaccaaacctgaatcaaaggagtcatct

SEQ ID NO: 75478 - DNA, 1051 bp, Homo sapiens
tcctcttgggttcagatctgagacccccaattccatcaagtgctgcagagaaaccgcagataaacttaatattaaatgctaaatatttctggagtaataatgccttataccagtaaggtgcattgtatactttttaaaaatgtttcacccctatcggtggatttggcccttacagcaaacttcctaaggtaatcaggagagctgctggtatcctgattttaagaaaaagaaactcgagtgagtccaaactccttagaaagttggttgctaaggacttggaaaagctcttcagcttcatctctggccaccctgagccctgctcggccacgtatagcgtcctgtcatcctttgttcctttcatgctgtttatcctttcctgaaacatgcagtggtggtcagggatccctcttatatgttcccacagctccctgccctgatgcccatcataccgtgtgggtcccagaaactgcaagcaccttagagcaaagattatgacttaatttgttttcatatccccagtgtgtaacagtgcctggttgatgacagggctcagcagctgatgggtgcatgagaggaggaaagaatggatgcgctagatacaggagtcctgtctattatgtgagaatcccaattcttacacaaagggaaggatggagctagagatatcacatgagtgctgaggacacttcggctgctcaagactctcttttccagatggtttgcagcttgttgtcatatgcccaggaaaggcactgaaccagccttcctccaagacccaagttagccacatcagggctggtataagtcaggaagtaatttccttcctgcttgtctcctgagtgatggctgtggtcagtggtggaccagacttcccactgtctgctctcaaaggagctcctcagctttgtaacagcacgttagttaatgaacagcttcactgtgcctctttgtgtttatcatgtgggattatatttttggtatgaaggatcagtaaagacttgggtggattcccaattttttgtcaacaaggagaattaattcttacagtcaa

SEQ ID NO: 75479 - DNA, 1097 bp, Homo sapiens
aaccccttttagcagtctgtagttacctgcaagtctctaaataatatgcttcgcacactggacttaaaactctggaacgctttgagtgttttttttaaaatctctcaagtattacaaacccacttccagcaaggtcttaaagatcctcacatggcatttttaataacagccaaagcacaggaaaaagcccgctctaaatttcctgattgcaaataaaccattgaacgctggacaggagccactcctaagtcctgcccagcacgctcagcaccatgctgggtggctcttccaggacatgcataaagggcatgatagggcagggcctggccaggacccaggatccctcactgaaggggaaggaggctgcagaaggcccctgcttaagggcacagggttgaggttcctcagcccttgccaatcattgtcaaggccacaggtcactgtagtgacttttccttcctcccaaggaggcagcctcctacccagggacgacacctctgacctccaagcaggtccagacgaaggctcatcctagagtcatagagtcagggtcctcatcctggattcagagccgcttctgctcttcctggattcagagcctcttctgcagatgggcctttccacacaaagcagtgcaatctggttcgctatggagacttcccggggcttgtggccaggcgttaaaactagactacaaatatcatgtcaggacagcaaaaatcaggaagtcagaaagtggctttcatctgtacatgaacaggagtaatagtgaacacaaaatgaaattgagatgtgtaactaacccaaaagtagatactcggaaaactgttatcatacaatgcagtgttttcctcctggctgttagatgtcttcagagaatccattgtaaactgggcaaatcttgaagactacaatgcatttgaaggatgctttcattctgtaaacctaaaataactctactgatgggagactttaaacgtctcatacagagaagacagagggctagaacccaccaagttgcggatcaattcatcagtcaccttgctcgggtttacaggactcatccctcgttcctggttctacacaattcacgggca

SEQ ID NO: 75480 - DNA, 1075 bp, Homo sapiens
atactttgcagccttttttccccctggtccctctcccgttttgattttgtgagagcgtaggtcatcctcgtaaacatatcagtagacctggggttggttattttgtcatttgtttctgtcatgggatggtttggtgtgtggggtggggaggggtctctagggaattatgagactgggaggggggtggagggaatgcaggtagctctctggatggaacggggacaggggaaagagtactgccatgaaagagataggagacacataagaggacagcagaagccctggccctggggaggcttctcggaaggcctggcttcacaggcaggccacagaaggatatcgcgggcacgtgcacccaaagcaagatagtggcttcccttttatatccaatctaatcctgattggatgtccctgaggcccctgctggaaacagccataggagagggcccatggcagtaggggaaagaaggaagaaattccctgcaacaaaacttcagctaaactttgatttgtgtattgtttacataataattttaaagggtacataatgtgtaaagagtttggatagaacctctcttcatactatggttttcgtaaaggatctgttgttgttacggattcattttttccctctatttttataagagcagcagagttgtcttctcaaaacggctgccaagctctgcttcttgggaagatggatgcagtcatgtaggcctgagctgtccgtctttcaccgttaggtgggaggagcgtatgggtggacttgaaggacatggacgtggctggaatgagcacagcattgggtgagcgcacaaggatgaggacatcatgtgatcagttatgggtttgctcgcagggcacccagagattctcaaagaatcctgcagcctctttctgtgctggatttgcttgtcacggagaggcctccctccctttccaccccacccatggggcattatcctgtcactcccagccttgctccacacacacacaggtgggtacaagttccactggaggagaaaaggcaaggatggactttttccccttgtgagaggtttgatacccagaaaat

SEQ ID NO: 75481 - DNA, 1051 bp, Homo sapiens
attggagatggctgactgcttccctgtgagggctgaggaagcacagacactggcagtgagtcatatccccacctcagccattttcactggaagattatgtctattcgctaaagataatgggaggcaattagatactttgtttatacaaaaatgcatcttagacacttcatactgaaatgtagcaatcacaaaaggtttttctttttgaatcacaaacctctcggatttattaaattagactgctgtggtgaactaagaattttaacaacttctaagatgtgaagaggaacaaaaacataaactatttactattctctcctatatcatgggtgaaaggtgagtttatatcccaagttttaaagtatattatagaaatgctcttctcatcattaaaaggtactattttagatgtgtagctcactcaaattttgatccattaataatttttgtgcttggtttgttaatgaacacttatataggacttagttgtgttcattgccagaaagagcactgtgaataaagaagaaaaaataacaaggcacttttgacatattatatgattggaattttggacatgtctaagtggaataaaacagttaagaagttactgagaaagggggagaaaagccaatcctaatagtttcttttaaaaatggattatctataaacaatttttctgacatgggaagaaaaatcaatatacataacttcactatagcaagcaaagccttcaggttggtactcgtactagattcccagggctgctatcacacagtaccgcaaactaggtggtttaaatgacagaaataaacagtctcacagttctagagactaaagttccaaaatcaaggggtcagcagaaccatactcactccagaacctgtagtgggggaggctgtccttgcctcttcccagcttctggtggtggccgtcagttgatggtgttccttggtttgagctgcgtcactccagtcgctgcctctgtcagtgtccatgtttttgttttgtcttataagaatgtcagtcatatgaggcagggtccactttactc

SEQ ID NO: 75482 - DNA, 1044 bp, Homo sapiens
gatttttttttactcatctttgaatatagactcgagtctttgggaaactcattatatatatattttttaaagagtttgaagcaactgtttgtctttataagataatgtagtaattatattggtgtaggtaacaggacatatgtaaaaactatcatctttgcagattactctgcctccaaatgcagggcctttcagagatgcattgtgattgtaattactgagttgaagctccaaccaatttgaatttgtttcttaaccttgaaaaatcattaaagccaaggtattaaaacctttgtgcattaataccttctaggggtttggttcatttggtttttgtcatgtgcaaggaaggacaatagtcctctttccaagtgtgttagcatagacttctctatatgtttctactagacctaggggatgacgtcttttaataatactggccctaaacatgtaaataatcttgtaggtgagactttttcttttgtgtttcggaaatttcctatgtggctttcagttgtctgtttgtatagcctggatttttttgaggtaaatgaaactttctcatttgtatatttggcttgatatggtcttaatattatctttccacgaaatggatatatttctagaaaatatatatttactaccataatttctaccaccacccccattttgctctgcattatacacagtagagaagaactgaagacactgctgtgacagtattgcagtccaaggcatcatgtgctcttggtgggatactctgattatcagcatcaacagtactttactgagcaagactttgaaggcctgagaagagagcaaagttatggaaagtatttaactcttattttatattgaacaaacaaggtttaatcatgtcatacatttttggttttctaagcagagactaatacaaatgcagccacataaaggcagtgtactgggggtgggagggaaggaaacaatcacataaaatcagctgactcaaaattgaggatagttaataggttgaaagggaaaaagtatgttgaaaatttagacata

SEQ ID NO: 75483 - DNA, 1024 bp, Homo sapiens
ctgtctagtattatagatgtcagaagtcatctattttctaccattattaagcaagggtttcttttttgtgaaaggtgcagttacctttagcagccaaggacgagtaaatccctttaaggtaaactcttccaagtgatgttttatattatttaaatacatttgtatacaaagaaatatttccaaatgatgagatgactctccccagacttggaggcatgaaagactgatctgtgtggaaacagaagaaagcagcacttgggctgagagttgtcttttctacttaccttctaagtacctatggttttgaaagatacctctgtctttcttggggatgtggtatttgggaatatacgtatcattcttaatttggattgtaccaaatgtatttagttctaaagatgagatggcaatacaaacttaacagaaatttcaagaaaaaataagtctcttgggattttatttttcttctttaaacatacagtgctaacactagtttgctctttaggtatcagccagttccaaagaaccagccatgtcaatgaattcagcacgttcaactaatattttagacaatatgggcaaatcatccaagaaatccactgcacttagtcgaactacaaataatgaaaagtctcccattataaagcctctgattccaaagccgaagcctaagcaggtactgtttcagctaccctcatctgcagtaagcagcatgggatctgtttgtcttcagttttgttcactgtttcagatataggataggaggttctgattgtttacaattgtcttgctagggaagtgggttcaattctgtttttgcagctaggcacagtggcacatacctgtagtcccagatactcaggaggctgaggtgggaggatcacttgagcccaggagtttgagtccagtctgggaaacataagagataccccatctgaaaaaaacaaaccccaaaacagttgtgttttttgtttcagaatcactccctattctgcctcgtgagttgttacacactttgtagcag

SEQ ID NO: 75484 - DNA, 1525 bp, Homo sapiens
ttttagtagagacggggttttgccatattggccaggctgatctcgaactcctcacctcatgatccacccatctgggcctcccaaagcactggtattacaggcgtgagccaccgtgcccagcctcccccttgaattttttaaacaaatttcttaattttcttgcaattagtagattaaagtggtatgtaatatttcatcaaatctaagccactgtttattgcatagtgcaccattactttattcatttaagccatggagacataaaaatgctgccaaactgacccaccattaattgtaattaattgtaattccaatttcagagatgttaaaacttgtaaaaatgtgcatcttagaattagggagatagagtagctagaaaactattgtctcagttttactagtagtgtcagtatctttaaaaagttttacttgatgttatttgatctcccccccccccccctttttggattagctttcttgtaaactggagcgagaattccgttgtgtggaacttgctgatctaatgactcaaaatgctgtgaatttagccattaaatatgcttctcgctctcggaaattaatactggctcaaaaactaagtgaactggctgtagagaaggcagccgaattgacagcaacccaggtggaagaggaagaagaagaagaagatttcagaaaaaagctgaatgctgggtaagaaataatttagttgtttgaattttcctttactgtcttgaatgttaagttggtctttgcatagctctttattgaataatattattttctcttagttacagcaatactgctacagagtggagccaaccaaggttcagaaatcaagttgaagaagatgctgaggacagtggagaagctgatgatgaagaaaaaccagaaatacataagcctggtgagatacattttcaagcccataaatcatgagaactatcatggatgtggcttttcccattttgcttaactgagggaaattgaatactcatactttttttcagacctctttgctatctggttgttgtatattgaggatgactatattttccccatttacattatattgctttattttaatctgtaggacagaactcgttttccaaaagtacaaattcctctgatgtttcagctaagtcaggtgagaaatatttataaatttgtaatatcaaggaaattttgcaagtcatctgcaaagtgacacatctacgcaaatacaccttaactcttaaggccacttttggtgtgtgtgtgtttatgtttttgtttttttaatctcagatgttgtttgtgaagctatggtcatttaacagatgtttataaaatgcctattgagtgtcaggcattttacttaatggtggatacagaagtcaaacagacatgtgtggttgatctctgttttaatgctattttagcccagctgagaagacagatgttgaagacagatctgggtatcactgaggaagcatgcaggatactggagaaacagttaaaaggaattgaaggctgggcgcagtgg

SEQ ID NO: 75485 - DNA, 1041 bp, Homo sapiens
acaaaaaaaaattagctgggcgtggtggcgggtgcctgtagtcccagctactcgggaggctgaggcaggagaatggcttgaacctggaaggcggagcttgcagtgggccgagatcgcgccactgccctccagcctgggtacacagcaagactccatctcgaaaaaaaaaataataataataaataaataaataaatgaaattattattatcttccagcaggtggcatagttttcactgaaactcagttttttcactttatttgtgtaaattttagtcatatcaaatccaatgttttttctttttttagttaggtcttactttatatggttaatgaaattttacgtaataatcttagattatttgcttctgttttgtgttttgcttttgaaagcaaagttgaatccttggtatgtataatatatttgaaatagggttcctttaacaacatgtagctatgtctccaagtgatttttctgttggtgtttaggtaccccttgttacgtggattcagaaggaattgttcgaatgcttaacagaggacttggtaatacgtggactcctatatgtaatacaagagagcactgcaaaggaaaatctgatcactactgggtggttggtatccatgaaaatccccagcaactaaggtgggctattaaaagaagtctaaagttgactctttttaaaaagtatgttgaaattctttttatgaggccctttaagtgtatttgtcttttatcttagtccaattacttgctttccatagtcactaaattaggaatttgttcatattcactctgaagttttcagtcacttgctttacttgaaacatgttgaacaaaatagaaataattaggatgaccttaccatcatttcagccacacagggagaggaattctgattaaacatggcatttcaccttttattactgtcttttattttaataaaataacaataaatataaaagttaaagtgaaaataaaacaatatatattcaattgagaattgaaatatacaattaagctgctttttgagatgttttg

SEQ ID NO: 75486 - DNA, 1031 bp, Homo sapiens
ggagctgcaatctttaggcaaggtagccattgttttatgtataagatcttgtttttatttttatgttcttttaagacagggtctggctctgttgtccaggctggagtgcagtggcatgatctcggctcactgcaacctccacctcctgggcttaagccatcttcctacctcagcctccttagtagctgggactacaggcatgtgccaccatgcctagctaatttttgtattttttgtagagacagggttttgccatgttgcccaggctggtctcaaactcctaggcgcaagtgatccacccaccttggcctcctaaagtgctgggattacaggcgcgagccactgcacccggctaagagctctcttcatgagaattctcattagaaaacttataaagaaggaaatatatttttctgaaagtattaaatagcaaggaggtgatacaaatcaataataagttgtgtcttttccagcagatcatacagaaaacttagaattttctagagcttcactgtttactacaataactagtatgtgtgtctgttgagcacttgaaatatggctgagatgtgcttgtatgtgtaaaatactctggattttgaagacttagcatgaaaaaagatataaaaatcaatttttttatgttgattacatgttaaatgataatatttgagatatcttcgatgaaataaaatgtattattaacattaacttcatcctttttttctttaaaaataattttttttttggctgggcatggtggctcatgcctataatcccagcactctgggaggccgaggcaggaggatcacttgagcccaggagttcaagaccagagtgggcaacatagtgagatcccatctctatttaaaatttttttttttttaaggaataaattaggagtcttgctctgttgcccaggctggagtgcaatgatgcgatctcagcttactgcaacctctgccttccgggttccagcaattctcctgcttcagccttctgagtagctgggattacaggcttgcgtcacc

SEQ ID NO: 75487 - DNA, 1045 bp, Homo sapiens
caaggatgggctgctgccgctactagtgccctgcttcttcgattgtttactattggaggggttcaaaaagaggtattcagccttgctggacctgtggtgtcaatggcaggacatggagaacagcttttcattgtttatcacagaggtagatttttttcagtcttttatgacttgaagtaaaatggaaattacttgagcttttttgctgtttttgttactctttttgtcttggattatatacttccttttgaatccgtgtaatctttaaatgtagataattttgttgtgttcactagcagcaatgaaaatgaaaatgtttcttaatagaactatattatagagagaattccaaggtggaatttggttaattacttccatgtctaaatcttaccattttggcaagcacgaccagagaactttcagcgttgaaattccacaaaaataactcctagtaggaagggccaaaacaactctgaatgtgacactttttaaaagctgctgcctcctttttcctcccctcatgtctttcttcagtccccgtcactatgctaagactggtcttatcaaggtaaccgataatctctgtgcttttttaaaaaaataattccattgaaaataccttcttctcatgacttctgtgacatcatactttcaatatttttcctcactggcagctccctttttacttttttgttggctctatcttttagctggagtgtatcccctttttctctactactctctaggtcagggtctttcagtctttttgtctgctttgccacagtaagaaatagattcatagattctggaccaggtatggtgtggtgtggtgtggtggctcacacctgtaatctcagcactttgggaggccgaggcgggagagttgctttagcccaggagttcaatacaagtctggatagcaatagcaagcccctgtttctatttttaaaagaaaaacagaagaaaagaaatatattctatataactgttctataaatatctgcaaatgtaactgaaataaaagtctcctggacaatgtttactc

SEQ ID NO: 75488 - DNA, 1051 bp, Homo sapiens
gtgcttttttttttttttactattataagagtaatatacattcattgtaaagaaaaaaaaccagtatacagtatagaagtttcggaaaatgaaaactcctcccagaattctactctcagatataactgctatttacaatttgatatgtatccttccagatttctttctatttgaacctcccttattttaatttactttattgagatgtaatttatttacaataaaatgcacccatttgatgagttgacaaaggtgtatatacacagataacccctaccacaatcaaaatacagaatgttctttatcacccgaaaatgttttcttatatccctttgcagttagttcaaccctagccttggccaactattagtctagatttttgtcactacgtctttatcacccaagaatgttttcttatatccctttgcagttaattcaacctgagccttggccaactattaatctacatttttgtcatgatggattaaatttaaaatctctcttcgagaaaggaaaaaaaaacggaaaaacaaaccaaaaaatgtactagtcacccgtttgctttttctacttaatattttttggatgtttacatgttttgataagtaggtaggtaagtaaataggtagatagatgtcaagaaaaaaattatgatgggaaagcaatgggtgcagaatgtttttcttttcaaaagaaaagaaaatattttttcagctttttgttaatcaagagattgccctctcttgatcccttcttcagctgattatagtactgatacacttcatggattttactatcttctatgtgatttgaaatttgtatccttcaggctgggcatggtggctcacgcctgtaatcccggcactttgggaggccaaggcggacagatgacctgagctcaagagtttgagaccagcctgaccaacatggtgaaactgcatctctactaaaaatgcaaaaattaaccaggtgcagtggcacccacctgtagtcccagctactcgggaggctgaggcaagagacaggagaattgcttgaacctgggaggcgg

SEQ ID NO: 75489 - DNA, 1089 bp, Homo sapiens
ctcaaatgttatcattggcaacaaattctgccagttattttttcttaattgataggctcacttcattcatttacaagaaaatgtttgccaaagatccaattctgcataaccgtagtttatctggcatgtgttttttaagtaaaagtagtgttgtatgaaaaaaaatcacttagttcagcttacaactcaaacaattgcataagtgctttttttcaagacaaccatcacacttctcattttagcacacagaactttaaaaaaaaaatctgtgtaagcgtcaagatttaataaaattaatatttttactgcaagtgagtagtggttaacaatgcagtaacgactaatacagttaggtgccactgccttgattggtgccaaggcaccaggaattttacccaccattgcttttgcaccatcactgcatctctttaacacagtgaaagaggcaaatagcatgtcagtgtcattgaatatgaatgaaaaagttactagattccataatgctttcctttttccaaatcattggtattcgtgattcccttaattatgatcctttgtgttgtagatatttcaatgctaaaaactggttctagtcttctcaaagaggaggaggaagatggtcaagaaggcagcattcacaatctaccacttgtaacatcccaaaggccattttatgatggacccatgccaactccccggcaaaagccatttcagtcaggttctacaccgttgcatctcactcacagattcatggtaagacttggatctacacttaacttcttagtaggttttcagcacttttttcttactatagttaatttttttggataaaacatatttttaaaaactttgattaagtagcctggagcactttggttgattacagttttgtggttggtttattttatggttagctcacagttttaatcttgtttcaaccttattgaaaatgatgttaaataaaattctgctttccaaaatgacattaaatgaacataagtaaatattactatcttgcaatatttcttggcaatactttcaaaccttattcttcatggtcattgttacatagaagattatactgactcc

SEQ ID NO: 75490 - DNA, 1043 bp, Homo sapiens
tttgtttttctattggttctatcactttatttttataagtatcaaaacactaactttaactgagataatataaagaaaatgtatcttatgcagtattttgttcaaaataaaagtaaatgagagactgtcttacaatatgacagactttatagggactttatcatattaatatcacttcttttctagggaatgacttctgaggaataaaatcttattttatattttggcatatacagtatttgtttacatgtcagtccctatactcccatcccatccccagactacaaggcatttgaaataaggactgggtcttattgtgtaaatataaatacaattctcataaatacatttactaattattcttatctgttcagtgagtttgctgcttggtagaatttataggtgcatattaaaagtttacctttttagtaattgagtttttctaaatcattcacttttactttataatttgtattaatttgttcaaggtatctagcagagtggaaaaggattataatgatctttttgatggagatgatatgagtaatgctggtgattttctaaatgacaatgcagttgagatcccttctttttcaaaagggattataaatgatgatgaggatgatgaagacctcatgatggcttcaggtcgtcctagacagcgaagtcacatcctagaagatgatgaaaactcagttggtaagaatttgactttgtgcatgtgattaccctgttgattaatattttagattttttattaacactattaaagtcattattgaatttgtagaatgtagctaagtggtgcttagaggaaattttatagcattaaatgactttgttaaaaaaggtttcaaatctataatccaagcttctgctatggcagactagaaaaagagaaaactaaaccccaagcaaatggaaggaaataatacagagcaaaattcaataaaattgacaacagaaaacctatagagaaagtcaatgagaccaaaagctggttctttgacaagatcaataaggccgggcacggtggctcacgt

SEQ ID NO: 75491 - DNA, 1035 bp, Homo sapiens
aagaaaattgaatttggtaataaaatgagtatttagtttgaaattttacaaaatcattatttattaactgtttttctttacagaccctcaatatagtaacctggtctccctgtgggcaatatttagctgcaggtagtattaatggtctaatcatagtttggaatgtggaaaccaaagactgcatggaaaggtatgatttagtgtatcttttgtctcttctttgctcatctctattagttttgtatttgttttattttgaaacatttcaaatttgccatcagattgtcagaatgaaagtataattaaatttatattatttataaattattgtcaaaagtcatttattctttcctaactaaaatttacctaaagaaatgtacaatttatatttttcttgacagtatttttagaacctactttttaatttttagggtgaaacatgagaaaggttatgcaatttgtggtctggcatggcatcctacttgtggtcgaatatcgtatactgatgcggaaggaaatctagggcttctagagaatgtttgtgaccccagtggaaagacatcaagcagtaaggtaaaagggagtatggtacaacagtttcttcaaaatgtttctgtgatcatatggatttggaagacaccacaaactgccttactttcttggaaaattacctttcatgttactatagtagatgctgagtagtaatctatagtaagaaaacttcttacttgttcaacctgatgtctcccaagtgtattttactaagaaacttttttctctccatataatgcctttccaaggaatacctttcattaaatactattttgtatcaggtctcagtttggcctgcaaactgtttctactctgaattagccttaactcttagaactacctatacacctcctctgcttagtcaaacagctttactgagcaactttaaacaggcaccttgttttataccttcttgcttttgttcattattcaccctgcctggcagatgtacctatttatattcaagtcttagtttagacttct

SEQ ID NO: 75492 - DNA, 1168 bp, Homo sapiens
ctcaaacaaatgggaggaatttttatatcagaaggacctagattccttaagaagtagtattgaaggtcaggcatggtgtctcacgctgtaatctcagcactttgggaggctgaggcaggaggatcacttgaggccagagttcagtatcagcttgagcaacacagtgagaccccatctctacaaaaaaacaggaaaaaaattagttgggctgtagtcctagctatttgggaggctgaagcaggaggatcctttgaccccaggagtttgaggctcagtaagctgtgatcacaccactgcactccagcctgggtgacagagcaagactgtctcttgggggaaaaaaaagtaatcatatttaaagtactagtaattacaagttctccattttttgggtgcaagcaatagagtgatcacctttatttttttctcttcccatgacaaattatcacctattttttgcttattgaagttttaagtaatgttctgagtttcattagttgccaattaaaatacagatttgcgcctggcacagtggtgtatgcctgtagtcccagctacttaggaggctgagccaggaagatcccttgaacccaggagttagagaccaacctgggcaacatagtgagacaccgtctcttaaaaacagaaacaataaaaactaatttgcttttatgtcttgtaaatatatctgaatgaattttgtgcctttttccttcttcaaattcaatttaatgtaaacttttgtttacgttgtttatcttttctaatagttactggcaattcctgtggaaaaatctgttaagctatatagaagagaatcttggagtcatcaatttgatctttcagataatttcatctctcaggtaggttttacaaagtgacactttcagtgggctataaggagcagttaatgcgtagtttgcctgaatacagttgcagttaaatattattggaatggaaaacaactcctggctgttgtatgtggtccatcttctaacagctcatcctttcttcatttgatcaataactggatactaaataggtctttgttataagaagtcagatttaacccttgcatagtattagaacaagttgttctaaaatgatcagtagttagcctttattgttaagtgagtttcactgagacttgtgatcatggactctgaaa

SEQ ID NO: 75493 - DNA, 2847 bp, Homo sapiens
ggaggcttggctttttcttatccacactgaaaattagctatgagaaaggaactcactcttcactctatggcactattaagttatcatgtatattatataatatatagcatgttatttaagtgggaacaaagtgtcttgggactcccttccaacatctctttttcatgtactaactgtgcttttccctcttgtgtctaatagaagcttaatatgtaaactagacaaggtagatgacaaatggttaatgacttttttttgttttctttagatacatccagaaagtgcccagaagaaacttcctgctggaaaaaatgaaaaagcagtatttataacattagaatctggataatttgttaacatggcagaaaataatgaaaatattagtaaaaatgtagatgtaaggcccaaaactagtcggagcagaagtgccgacagaaaagacggttatgtgtggagtggaaagaagttatcttggtcaaaaaagagtgagagttattcagatgctgagacagtgaatggtatagagaaaaccgaagtgtctttaaggaaccaagaaaggaagcacagctgttcatccattgagttggacttagatcattcctgtgggcatcgatttttaggccgatctcttaaacagaaactgcaagatgccgtggggcagtgttttccaataaagaattgtagtagtcggcactcttcagggcttccgtctaaaaggaaaattcatatcagtgaactcatgttagataagtgtcctttcccacctcgatcagatttagcctttaggtggcattttattaaacgacacactgctcctataaattccaaatcagatgaatgggtaagcacagacttgtctcagactgaattgagggatggtcagctaaaacgaagaaatatggaagaaaatataaactgtttctcacataccaatgttcagccctgtgtcataaccaccgacaatgctttgtgtagagaaggtcctatgactggctctgtgatgaacctggtttcaaataacagtatagaagatagtgatatggattccgatgatgaaattctaacactttgcacaagttccagaaaaagaaacaaacccaaatgggatttggatgatgaaatcctgcagttggaaacacctcctaaataccacacgcagattgattatgtccactgtcttgtaccagacctccttcagatcaataacaacccatgttactggggagtgatggataaatacgcagccgaagcactactggaaggaaaaccagagggtacctttttacttcgagactcagcacaggaagactatttattctctgttagttttagacgctatagtcgttctcttcatgctagaattgaacagtggaatcacaactttagctttgatgcacatgacccctgtgtcttccattctcctgacattactgggctcctagaacattataaggacccaagcgcctgtatgttctttgaaccacttctatccactcccttaattcggactttccctttttccctgcagcatatatgcagaacagttatttgtaactgtacaacttatgatggcatcgatgcccttccaattccttcttctatgaaattatatctgaaggaatatcattataaatcaaaagttagagtactcaggattgatgcaccagaacagcaatgctagtaacaggatgggaacatgggaatgataatatatattttttcttttaatattttatttttctttttatgccactttggatttttctacaaaggcagtggtgtccaaaataaaatctctgccctaaattttactaataaatccatttttctagtgatacacaaattgtttaaggttatacactcgagcttaaatagatatttttaaccaggtgtttggtttttgtttttaccgtgtaggttgtatacttacattttttctttccttaatttatacatgatcctttttccttaatttatacatgatccaggcacatttgaaatttggtaggcattgcaaacacatttgaatattgtgtatttcatactattctttaaaagtaatcttatgtcctttcctacatgtaaaatattttgttaatctatgccattagtagtattatatataaaatatagttccccgtcccccttttcattgagtttgatattcttcagtaaagctgaatgttgtaattcaccattcatactaatgttattgacttttgtaacttactaatagggatgttaaaagtaacaaaaccaagtcaaacttggtgtatttttattttaaatattaactctaaagcaggattactaaatttgattaatctggtcaatgagaatcaaatggaaacatatcattctggaggtgcacttactcttctacaatgtggccggatcatttgtcattcctgaataggtctttctctcaacctgcaagagctaaaccatcttcaaaacataaatcttgttcctttctcattggaagctttgaaaataatgataacactattagtagctagtagttactaaagtgctaaagtaattgtggggtttttctgtattagcttatgaactgttgcttctacttagcccttttatagaaactctgagctgttactttggggaaattccacaatgtattagcagccacaaatttccactggtaaccaaagagtacctaagtagtttttcattattttaagttgaatttgaataaagattccagaaataaacatggagctcagtattcaggaagcttaatactgtttttgatctacaagatccaaataattatccctatcttcagaattaacttagtctgtaatgtggcttcaaaaaaagaaagcc

SEQ ID NO: 75494 - DNA, 3567 bp, Homo sapiens
taacatgaaaatggcatttttccataatagctttaaaataattttttagtaattattacaaaattaaggaaaatctctattaccgttatcttttagcattttttttttcctcagtgatctcaagattgtcttagtctcaatgagatgtagctacaaaaatggcacctcttagcagtgatgaggctcaggatatcggatatcataacaccaatgtcaggataaatatctcttctaaagacgatatttaccttttacaaggttagaaaagtctcatactacctcatctttattgtggcgcttttgtagatcactgagaagcttatcttattaaccaatataccacttcctaaatatccatctttggtgaaagaaaatagtgtggtaagagtacccatgattatagttttttatcagaatttgataagattttctgtttctgtgaaacaattattttaaatatttttcttttaaaaataactttttatcagtacagaaaaacctaagggatgactagcttacaaatattctgttaaggggtagttttataaagaaaaatgatatatagttatgttgtcttttatagtgttaaaattagtatttatatgaaagtcaagatctaagtaccttttcatataattcaaactgattgcttgtgatatgttttctctggcttttttattttttcaacttcaaggtattaacagctgttaacacttaaaaagtactgccacatatgtagccttgaagtagttgatctaataaatgagagcagggaggagattcattgactctgaaatgatttttatttttcctttggtatttgctacagtgaaaagaagtttggaaagtagatacataaagacttgagaagggaattgtttaagggaaaagaaaagagtaataattttttttaaaacattaaggaattggaattcagaaaggttacccccttcctctgtgtctttgtaaggatacatttggaagaacatacagtattcagaaactaacctatataaaatgtaaacaatatattgattgcactatataaatgagtaaattttgagaggaacaatgtgggaatgtataaatttgtctaaaattttataactgttgaacaaagggaagatttgaacagtgtaaattccagagttgagaaagcatttagcatggtggaaatgtggagagcttattggtgagagaggatggagctaagagaaataagatcaaatattaaaattaggaatttaggcattacctcagggaaaagccttgacagtgaaaagaaactacttaatcgctaatagctagtctggaccagacacttaactgcgctttgggaatcatcctgggctaatcaggaaataaacttgacttttctatttttctctgaagctttacaggacatactcccactcccatttttttctaagcctacagcatcttgattcatagtataattcctgaagtatgctgaatggactttttaaggttcctttagcatttttgtatagagttatatgtgatctttctataaccatgccattcacttaaataattcatgaagggaatggtttaatttaaaggaagacctaataggaagaagattaaaggaagcttttagtcagcctgtggctagatttattgatttggtgatcaaacctgtgctatttcctgaatttcagctaatggccaactgtggtcaaagaatggctttcagttaaagttttgacttcttattataaataatataaagaatgtctcagtaattagaaatcccttaataagtagaacaaatgtggcaagtaggactcctatcggtatacaaattccatttctttttataagaaaaacacataaaccattatcatttattcatgagccaaagccattaagaagataaatccagttatcagcttcctgtctctgaagtttggatcattttatagatccacgcaatagagagcttccttcctatgaaacaaaaaccttgagatctctttttttttgagacagagtctcgctgttgtcagcccaggctggagtgcaatggcgcaatctcggttcactgcaacctctgccttccaggttccagcaattctcctacctcagctcccaagtagctgagatgacaggcgtgtgccaccacgcccagctaatttttgtatttttagtagcgatggtgtttcactacattggccaggctggtctcgaactcctgacctcaggtgaccacccgcctcagcctcccaaagtgctgggattacaggcatgagccactgtgcccggccaagatctaactcacgcttacttttcattaaaatatttcttgtcgcttttagctattgtcagaatccaataaacagcttacgcattcattttggtaaagcaaatttcacaggaaaatagacaaaattataagagattcctggagacaacacaaggaaaacaatgtttaaaagcaaaatagcctgtgtaatgttaggtaatgtaatgcccaagtgaataaaagatttttcgtcaagcaaactactgtttctactttgggggaaaaaagtcagttttacatttgtaatttaaggaaagaacagaaagcacaaaggtttttcttttctttattaatggcctactagaaatgagcagtgcaagagtctacctgtactattctaatacagtaagatattggacacaaaatggaggtaactttttaaaatagattggcttggaagttgaaatgtagattaatggatataacccaatagaaagggattttcaaataaaaccaaagtctatttttttatttactttctaattttgaacagatgactcagtcctaaatctttgcctttatttcctataaaatgtaggtgatacttgtaactcgacttcctggagttaattcttcagcaagaggtgaccctgggagcgtactttaaaataattgctgtacagccattgagtactaacatgatgataggttttcaaaatatctttgtagtggatgctgcataattacattcacttctcttagactgtaaaagactttcttgacttgttttaacagtagagatagcagtacaatttgaatttatggtttaggctctgcaattagaggaacaattgcagtttcctcctacccttcatatggtctgtgtaaaactgatgtttgcttaacttattttaaaagttgattacgttttcagaaaataaagataatcacttttgccatggttataatcaaatctaagctttcagacttgagagccatggtgtaaaactcaaggaggtttatttaaattatgctgactttgctagaattggataaattctgtataagccaagtatgagttcacatgtactcgaatatacagttttcacaaagctattactctcatcagtcaggcttgtatgatctattccttaccacaaaagaagtagacaattgccacttttatttctaatccttaagttgaatgtttcttcttggatgtaagttcaaataaattgatctggataaattttcatttctacttaattaaaacttcctatgtaaaatccaaaggctttgtg

SEQ ID NO: 75495 - DNA, 2460 bp, Homo sapiens
tgcaaacgtcttccctttcctgtattaatattttccctctccccacttttggcccgaggatctgagtcctcgggtcaggccgaaatcagaccgcgtccatacccagcctccttcgaggcctagctgtaaaaaccgctgagcaaaaggaatccagaatcagccctcaagcaactcaagacaagttagcaatttccgccgggaagccgtgaacatcggcagccactggcgtttcctccgagtcctcggaactccggaaactctgggagcttttagcccgcccaccaggggaaagcggcccggagccggcgccaggtggagcccatccccctaggcctggcgggccgcagtaccgccaggggcctgcgggaggcgcacgcggcgcggcctgaggggagggggagaacgggcggaggcggtgcgctcggcgcttcctgttccggcgccaggaggagccgcgcgctgctggtgctgttgccgccgctgctctagctgccgtcagtcaggctgcgcccgcgtcttcagggcccagtccctcggacccatcgccgcttctagaccctactgcggtctcggatattgccgggtgaggctgcttcggtactagtgggagtcgtgaaggggaatcggggagctggggttgcggagcccgcgggcgcggccaagcgggaagcgggcgcggtgaccgaggtgcatcgagtcacgtccagtgctcgggccgtggtcgcctgcctggcaccaggactaagcgtttctatcggtcgccttcctccacgctgcgggctgcctggggatcgccccccagggagaaggtgtcggaggccgctgacgtcgcgcccgacgggtttctgggcgcctgacgtcaggtctggctgcggggcggggcgggcgcgggccggcccctcccccaccccttcccggcgggcgcgacccgctaggaggccggttcgctccggttgatcccggactccctttgttcgtgcgtccctaaacggctgccggcctcgcgccccttggccccgatttcccctctacccccaccctattacactcattcattaatttttaataaaaagggaaaggcctgaaaagattcttacaagagtctcgggcgcttgttaatccgcagtgtgacaacgttctggttatgacttactagaggaattgctcacggatacattagatgaatacccagggcaaaccacgagaagggcagaattcagtgatctccttttttaggactgaggagcacatacctgcgatagcgtatgcatagctggaccgttttcctctttaccttgaaaagcaagagtacagcttttaataggtaaagattccagtgttaaagcatgaagccaggctcactcgaccgcaagaattttttttagttttactactagagaaatacacacctgggggttgtaaaggtctgtttcgaaaaggaaccctcattacaggcaaaggtagccttcagaaacatttcataagttctttgttcactggtgttctttgggggaagaatagaaatttttcatgctggcatctctgagcccacaatgcaaagcgagtttgcttcagaaacttggagtgaattgcaaatattggaatgttcttttcctcactccaggcggaatgggtaaaatccatccccagtctcttaactgaaacttttgaagctagtgtgttttgaattcaaaaatacttggattttatcttcatctttttagaaagtcatgttagacgagagataacacccccagcagagtggggcaccccataatccaacattaatatttgcagcaatagatgtgaacattcattctaagtgggggcgaatagaaactataaatagcttcaggtcacattttgccaccatgtaagttttgtgccaaactagggcagataaagatttatggacctaaaagtaggcatcataaaagctaatatttgttgaggttttgctatattccaggcagcgactaagagatttgtttattaaaagttttacagcaaatctatgatgtgggtacgattccgatcttcctttgcctcaagtttggagagttggacttgtcaactctggccgaaccaaccagtgaagagctgcagttatagctagataatcatactttaacgtttacttttttacctataagctagatgtccacatacaaagaaaagagaatttggtatttgttttccacccaagcactatttttttaggcacttgattggacagagtcccatttagttcctcgcaacattactggcctggtttttatttgttttgttttttaaactgcgtgctttttacaaatagtatggcctgttctttatagttcgggttcattcagatgagccgacttttagtgaaataattcaaaccctcgtctaaggtcactctgctaagactttaatacaacccttccctttctcgctatattctaacccatctgaactgct

SEQ ID NO: 75496 - DNA, 3750 bp, Homo sapiens
ttttttttttttttttttttttttgatatggagtagccctccgttgcccaggctggagtgcagtggcgcaatctcggctcactgcaagctccgcctcccaggttcatgccattctcctgcctcagcctcccaagtagctgggactacaggcacccgccaccacactgggctaatcgtttttttgtatttttagtagagacggggtttcaccgtgttagccaggatggtctcgatctcttgacctcgtgatccgcctgcctcggcctcccaaagtgctgggattataggcgtgagccactgcacccggccaaaaaattttaatctcatatatgaaagctagtctgcttagtatcttacaaagcagtgagagaaaaagatgtgctactgagtaataaaatgatcaaaggcaaagagtacctacagtcttttatttatataaagtcaaagaacaagcaaaattaagtcaaaaattgactgccatgaggcaaggtagttgattggaaaagagcatgagtaaactttctggagtgagaaatgttctgtatcttggggtggttataggggcgtatacaattatcagagcttgttaatctgaacacttaagatctctgcattttgttgagtgctaattacacttcaatttaaaaattggtaaaagtactccaggacatcaataaatttaaatttgggagtacacacagtggctcatggctataatcccaatactttgggaggctgaggcaggagggtcctttgatcccaggagtttgagaccgggtctgggcaacatagtgagacacctgtctctgcaataaatttttaaaattttaagaaatttgctgggcatgatggcacacacctgtagtaccggctattagggagactgaggcaagaagatgacttgagcccaggaggtcaagattgcagtgagctgtgatctctctcgccactgcactccagcctgggtgacagaatgagaccctgtctccaaaaaaaagacgaggaaatgtaagttaaaataagacgctaatttttaatatctattgtcattataaacaataaatttaataatatccagtggtaaaaggagttagagaaatgagtgtaaattggcatggacttttcaaatggattttagataaatttatctgttgactctaaattccatgtccagtgctttttcctggtgttagattctcacacacaaacaaagaagtgttgagagatgttcactgtatcatacttaaaacaacttatactgctacaaaaagaaggtaaattaaattgcaaatcatttttgtatgatgtgcagccattaaaagggatgaagttaatagagctgtatgaactattatggaaaactttcctatgtaaagaaaaacacattacataaataagattccgcttaagtaataataatgtatgcatagaaagttccttaaggaatatttaagaaatggtgaacactgattttgaaatttttctttcttccttcatttcttttctttttttaggaaaatgtctgatgaattttcggtaagttgatcagtttatctgtgataagtttttcatctcttaagaaaaacaacatggtcctaactgggctacgtaaatcttttcacttaaaagagatgctttaaccaggcatggtggtgtgcacctgtagtcctagctacttgggaggatcccttgaccccaagagtttcaggctgcagtgagccatgattgtgccattgcactcctgcctgggtgacagagtgagactctgtctataaataaataaaagagatgctttttgtgattcttggctttgggggtagtaaagagattttgataggtgatttgccttagtttactgagataatagcatgtttggaaatgtttcctgtatttatgaaaatatgtatttctttaaatgaaaatttaagatgttacttctgttgttctcttttaccctgatagtattaatagccaacatttattagaaattattatataccaggcactctgtgaaagtgtactacatgaaatatcatatttaagcctcaagttaaccctaaaacagttttgaaactgaagaggctctatctcagagtatgtagctcctttgaggttaagccaggattcaaatccatatcttgactgttagttctatcttcttaattactgtattttgttgtattaatacagcagagaaatgaagcacaatatgattagttgtatttagaaaacgagtttctctgaagaatttgcactgtaaagttgatacgcaaagtagcatctcaaggtttatgttaaatagagtattttttaaatgactagcttagcttttgaagatattcttgaggtttataatccctgcccctataggttactattctctgtgggtttataatggtgttcgatgtaacttttccctagataggaaagacgtatctgttttgtgttccagttggcagatgcactacctgaacactcccctgccaaaacctctgctgtgagcaatacaaaacctggccaacctcctcaaggctggccaggctccaacccttggaataatccgagtgctccatcttcagtgccatctggactcccaccaagtgcaacaccctccactgtgccttttggaccagcaccaacaggaatgtatccctccgtgcctcccaccggaccacctccaggacccccagcaccctttcctccttccggaccatcatgtcccccacctggtggtccttatccagccccaactgtgccgggccctggccccacagggccatatcctacaccaaatatgccctttccagagctacccagaccatatggtgcacccacagatccagctgcagctggtcctttaggtccatggggatccatgtcttctggaccttgggcgccaggaatgggagggcagtatcctacccctaatatgccatatccatctccaggcccatatcccgctcctcctcctccccaagcccctggggcagcaccacctgttccatggggcaccgttccaccaggagcctggggaccaccagcaccatatcctgcccctacaggatcgtatcccacaccaggactctatcctactcccagtaatcctttccaagtgccttcaggaccttctggtgctccaccaatgcctggtggcccccatgtgagtgttcaatttgttatttaaagtgtactaattgtacatagcacaactgacattgtttctccccagttttggatggaagattaagaaggcttttaagtttttaaaagagggtgtgtgtatattaaataagtaaatttcaaaccttcaggtaaagcatttaaaaggatgaaagcactgttttaagtattccttgtgctaaaaagaagaattttccaaagatccccaaagactttgtaatgtagtaagcagtgtcctcaatagcatcctttaggtaaactctgagattcatttcattgggctttttgttttattattattatttctcagtattgttttatagcatcacaccaaagtacagttcagtaaaagcagtctctacctgtctagcttgatagaggtagatttttagagaatccaaggcaatgagtaggtaatgttcatctttcaagcagttctcgagctcaagattacacccctattctttattgtcagttacatgtaatgctttatgctttactgtcagacaacccagtgtggggttaacatcttagttgaggagcctgccttggtcatataaccaaatggaa

SEQ ID NO: 75497 - DNA, 1409 bp, Homo sapiens
ctcctgacctcaagtgatccgcctgcttcagcctcccaaagtgctgggattacaggcctgagccaccatgcccagccaggaaaaaaaaaaaatctgttaactcttagtacgaaaataactagccagatctctgattagattagtcaaacatccaatccagctataaaggaaaagaaatctttaaagtacccctaaaacttcctccttgcattagtgtaatttctttcttgctatatatattatctaaaaatatttgttttgcaaagtgtatgccagagtaaatgatgtgacttgctgtttggatttattaagcaataaatttactttaagccacagtaaggagttaataaactccatttgcaaaatctagaagttgactttttcttttttctattgcagtcttaccattaagttaacaatggacgaagagatgacgctttgctttttgaagtacatgtatatgcacatgaatgcatatataaaaattgctggtttcactattagagggcattcatgaaagaacaactcttgcacctctcagagaagataactgcctcttgtacttggatgcgtagtacatcatatgtatacaatcagataaaagcatagaagtaaatcattcggatgtgatttttatttggttttcatggaaagttaaagtgataaagtatattgaatagttctttgacagaatttgtttaaactatgaaactacacacttaaaaatctaagatgtggattattgttagaatctgcaacttcattggcaaattatttcaagtatttttctataatcactttccccttctaaataaataaacttcgagaataacccatcataatccaaacaaatgatgcctcaacattttgagctgctctgtcggacaaataaacctggtcctcttgaggttatattttggatatacatttttaaactgtcagtaattattgtcagatgtggagttcaatagccagccagtgttcatttttatccttgagcttttagtaaaaacttcctggttttatttttagtcattgggtcatacagcactaaagtctgctatttatggaaactaacttttttgtttttaatccaggccaacatgtatgtaaattaaatttttagataattgattatctctttgtactacttgagatttgattatgagatgtgcatattgctttgggaagagctcgaggaaggaaataattctctcctttgttttgaacctcaaactagataaaccctaggaattgcttaactgcaacaagtaattttcattcccacaaaaacctgaggcagctcttttgcccagagcgttccctgtagccacccccaccccacttgcccttggttctttagaaggagcacacacatcccttgattcctccctgatgtggtaaactgg

SEQ ID NO: 75498 - DNA, 1038 bp, Homo sapiens
agaggctcatagtctataagtaacattacagaatttgttagcatacccattcattattagttttacctaaacgtgttaggatcactactggtggaaattgtaaccagcctttgggcatcttaaagggtgacatgtggcatgcctttttttttttttaagaatttaatgtttttcaagattgtagtgttgatcagcgcaacaattcaagtgtgcaaagtaacaggatagtttgcctcttcactttacccctggataaaggcactttcactgcctgtcactgatcagcagatactgacttgttgccattaagtgaacttgacttcttatgtgtgctctatgagtttgttgtaattttcttcttgaaattgtgatttttcactgacagtaatgacaaatttaatgtatgtaattgtctatgcattttaagttaaactgcctaaaatgtgatttgagacatatacatatgtttgtattataaattgtaagcaatcagtttgagatactaggttttatcacctgctgctgtatttgtaaacaaagacaaatgttgctttaagaagtaattataattaggaataggctatggatgtgatacttggtattttttaagataaacttgtttgcttttgtgtattatacctggaaactttttttaaaaaatgtattttcatggtttcacagatttttcatgttattttattctttaggcccaattctgggcttctctgagcaagtccagagcctaattaactgtaaatttgttgtcaaaaaggaagaaaaaagggcctgagatacctctttgcatgtgacctgcattcactaaggatatctggaaaccacccttcctccgcaaaccctctcagcaacatggtgtccattgtggtgattttctcttcttttaaggctaggctactcttggtaaccagattatccgtatatatgataatatgaagtcagggaactttctctgtctgtccctactcccctcactcccccactttctgttatgaaagatagttctacttttatcattaactg

SEQ ID NO: 75499 - DNA, 1075 bp, Homo sapiens
gagtgggatggtggctatacatgagtattcatttgacttatttaactccaaatatatgtcattctcttgcatatataatttacatgtttttaaaagcatatgggacctgagaacctaatattgaaagaaaactccagtttcactcagactgtctttgagagaggcagacaagcctaacttcagtggtgactgatgtctgaggcatgtaacagtagcacgaggctgtgcctagcatccatggtttccttttatgctgataactgaaaatctcaattactttaggaaacagggctgtcatttagaacacaagagcataaaagggtcttcccagtagtccactcagtctagtgtcctgtctgacaatggcatccagaaatgtttttgtgaaagagcataactgggtcataaacccagcatgccagacccagctctgcaccaatggggaggcaattgtcaagcattcaattgtgtaaagcattatgttgagccagtacaacaagaatcgcagaataaagatagccccacaaatacggaagacaatagggatggtatttttcactgtgctattagggagaaaaatgagaaaaacataattagagtgaggacagaggcagcgtagtatagaggtagagagcaggctgggcgtggtgtctcacgcctgtaatcccagcattttgggaggctgaggtgggaggatcacttgaggtcaggagtttgagaccagcctggccaacgtggtgaaacctcatctctactaaaaatacaaaaattagctgggcgtggtggtgcgtgcctgtagcgccagctacttgggaggctgagacagaagaattgcttgaacctgggaggcggaggttgcagtgagccgagatagtgctactgcactccagcctgggcgacacagcgagactccatctcaaaaaaaaaaaaaaaaaaaaaaacaaaagaaaacaaacaaacaaacaaaaacagaggtaaagagcacaggttctggaacctggccagctgtgtttaaatcgtgactccactgcttactacatagatcacactggctgaattacttaaccttgtagtg

SEQ ID NO: 75500 - DNA, 2129 bp, Homo sapiens
gtccaaaactaatctatctggatcacgcctgatcttgcaccaggctccatgtttgatccattccctaaactaattgccatcattaaaggaaagactcaaaatacaagtgaaacaataacaatatgtttatgagtgtaatgctgctttttttcttctttaggagcagcatagaagatgctcagtgtcctggattaccagatttaattgaagaaaatcatgtaagtacaattccagtgtggttagatagcccagtatgtcatatgtttatatcattatagaaagtaactttgtaaagcatccccagaatttccgttggaaatctaaatcagtcatgtagaattgtagttcttgtttcaatgacatttgggttgtttaaaaccatagtgtcattttgtattcttcaactcatatcagaatgaatatggaaccagtgaactagagcagaaatcagcaaactttggcccctatttttacaaatcatattttattgtaatagccacacatttgtttatgtattctatctggctgcttttgcaatacagtggtagagttgagtacttatgacagagaccctgtgactcacaaacctaaaatatttactatttgatcttttacagaaaatgtttgccagtccctgagctagagtataggtacttgctgagaaacttgccttcaatcatactatttctataatattatctgaactaattgttgaagaagcaggatagtaggatttataatgttcttaagactgtgtccgggatgtcatccttctgtttttcttgtatttaatagcaacaagacttttaaaatttgttccaagtaattaaattgataattaaatataatgccatttttacttccaggttgtaaataagacagacttgaaggtggattgtttatccagtgagagaatgagtttgcctcttcttgctggtggagtagcagatgatattaatactaacaaaaaagaaggaatttcagatgttgtggaaggaatggaactgaattcttcaattacatcacaggatgttttgatgagtagccctgaaaaaaatacagcttcacaaaatagcatcttagaagaaggggaaactaaaatttctcagtcaggtgagatatttaaaatatatttaaacgagcctttattaaagaaatgaacttggattaaggtataaattatcctataaggtccattttacattagatctaactattgaggatccttcattgttagtgaagaccctgaattagaacaattccctcaagattttttttttttttgagatggagtctcactctgttgcccaggctggagtgtagtcgtgtgatctcagctcactgcaacctccacctcccaggttgaggcgattctcctacacatgtaccaccgcgcctagctaatttttttatttttagtagagacagagtttcaccacattggccagcctgggctttttttttagttgtccttttcaacacatatccccaagtctttcttcaaaatatcctatttttcttccctactgcctagttctacctatattgttgtgatggttctgcaataggaaatggctcctatatttttgttataatgtgtgccagttttacctgccattttcatcagttagtctgtagctggtctaactggggcctatggtaaaacaaaaggttttaacctcggccagacatttaatgtcctccagctgttcttcatcagcattttctgggtacctttaatgttacaagcatgagatttgtttacagaagtctgcttttataccaaagttaaggataagaatttaactactttcaaaaaacattatagcataggggtctatatttttgtcttagcatttgatatgtggaacttttcatatttttcatggctttgtccatttctaacagccctcgaatgtgagaatattctttaaaaagtttttttttgttgtttttcagaactatttgataataaaagtctcactactgaatgccaccttcttgattcagtaagttttccaacttgacaagtccctttatattctagatttgttttataaaatgaatattgcttttctatttgtgtacaaggcttaaaatgtatatcttgtcattgttttgcttactca

SEQ ID NO: 75501 - DNA, 1008 bp, Homo sapiens
tgggaatctgaggcaggtggatcacctgaggtcaggagttcgagaccagcctggccaacatggtgaaacctcatctctactaaaaatacaaaaattagccaggcgtggtggcatgcatctgtagtcccagctactggggaggctgaggcaagagaatcacttgaagctgggaggcggaggttgcagtgagccgagagatcacaccactgcactccagcctgggtgacagtgtaagactctgtctcaacaacaacaaaaaaattatctctgttcatgtaaaagtagtgggatgtcaaaaggaagcagcatctaatatgcatttaaatactatctttaacagaaagtcccaggcatttgtctttaacagacattatttgacaggagaaagaggctaattgataggattttcaccgtattcctagttataatgaaaagcaaaagaactatttggtattgaggtgatttctctcatcttctaggactttctgtctcttctgaaggcccttctcaaagacttggaacacctaagtctgtcaacaaagctgtatctcagagtagaaatgagatgggcattccacaacaaactacatcaccagaaaatgccggtcctcagaatacgaaaagtgaacatgtgaagaagactttgtttttgagtattcctgaaagcaggtatttctttaacatgttaataagagtttaacagttgctgatactaaataccatttcagattgttaagatggtaaaaggtgccagacatatatttttaataaatttcataatgaccctgcaacatataggcagtactccctttttataaatgaggaaactaaagcttaaggtttcaggatactaaatggtcacgtttagttgggtaaattctgcagcagtaagaagaaaagaagcaatatggtatcctttggtgctaaacatactacaactttggtgctcaacagttctgagctgagaagagctctgtgacttactagctatgcaactttggggcaagt

SEQ ID NO: 75502 - DNA, 1090 bp, Homo sapiens
aaacatctctctagcacttgcctcaccccatcttttagtttgatgaaatatggtttcagcataggtgctacttcctacaacctttcctgatgcctgaagattggtttaggtgtcatccttatttattttcttttaatgttttactttttttttatttactttttttgctttttcttttttatggggggggggtgtcatggttataatctaaaggatgtcccctaaatttatttctaacaggacatttatccttcttactattcttcccagatcttctactaagctgcaaactccttgagggcagcaactctgtcctttacctttttaccttttagcacatactaggaacttgataaatatatgatgaatgtgaaatattttatgtatactttatttttaaaaattaaatttttaagtgatgaatttgtgtttgttgtgtgtttttcttgtaagatggtaatgggcagctttactatgttagtttctctttgcagaaaaaagttgtctcaggtatagcaagtaaaccaaaacaggatgatgctggaagaattgcagcgagaaatcgcctagctgccataaaaaatgcaatgagagagagaattaggcaggaagaatgtgctgaaacagcagtttctgtgataccaaaggaagttgataaaatagtgttcgatgctggatttttcagagttgaaagtcctgttaaattattctcaggttagttgtttttgattttttattttttttgtttttcctgagactacttaagagaaatatttgggatagatgggggcttgtgtaaggtgaaaaatagttttttacatgaagagacataagtttttctgtgatttttagaaaatagactatgctcgctcacaaacactgtaaatcacattttgatgggtatgatcagattagtttaagtgcgataagtcttctaagattgcttttctactttctaagtgatttcacatctgtaatgtaattaccatgtaaccctacagtctatgagaaaggtcacaggatcccaagaggtaagagaaatgacggaagcatgaagaagtaaactgattttcttcaggtcagttagaag

SEQ ID NO: 75503 - DNA, 1062 bp, Homo sapiens
aaatgagttgaaaacttatgtccatataaaaacctgcacacggatgtttttagcaatatagcagctttattcataattgccaaaacatggaagcaaccaagatgtccttcagtggaggaatggataaataaaaaaaaaattagattgtgttcacattgtgtaatttaagaaacaacatttaggatatcttttctaccattttagcattttagtcaaaaataatctaggagagttattcatgtatgatattctttatgtagattttggaggtttgtaagacgaaagataatgaaaaactttaccataaaaattatttgaacactaaattgagaatgactcagtccagttttaataactcatcatttctgaatcactatttttaatttttttttagtcttcagctcattcgtttataactttaatatggctagcattaatctggtaaacttgtgctttattaacagatagaagatgtaatccacaaattcaacaatctgatcaaacttgaggaatctgggtggcaagtcaataataatatgaatcataatatgaacaaaaatgtctttagggtaagtttgtgggttttatatccaatttttttttttttagttaaggaactgttatacatacatccaaatttctaatatagattcttctacttcttgtttttaagttttaaaaacatttaggtttagatttctcattattttacaaagttaagtctttatactacttagagtgtacttgattgcctttgaagaaagagcaaggaaatcgatcaacataaaatttaggatagttatgtctagagagaagaaaggaggggctgtgattgaattggggtacccagagggcttctaagttaccacatactggatatatgagtgttggttttattcttcttcttctttttttttttttgagatggaatcccgctctatcaccaaggctgcagtacagtggcgtgatctcagctcactgccagctccgcctcccgggttcacgccattctcctgcctcagcctcccaagtagctgggaatacaggcgccagccaccacac

SEQ ID NO: 75504 - DNA, 1050 bp, Homo sapiens
tttagtagggatggggtttcaccatgttggccaggctggtctcgaactcctgacctcaggtgagccgcccaccttggcctcccaaagtgctgggattgtaggcatgagccaccgcgcccgcaggcatgagccaccacaccggctgacgttgagttcttataaagtacaacaagaagtagaatgctatttagtatatagcaatatgtatgagaaaatattgttaattttgagcaggaattgaagcaaatagttagtactcagtatttgtatgacaaagttttgtggtagatattttttgttttgcttaacaacctgtaggccctaggatgtttggagtgaagtcttatcagtgggctgacttgcaatgaatgtcccgttttgtcctttaattttaaaaaatctcttatttccttcagctaaagatcttattcgcacagcagttggtcaaacaagactccttatgaaggaaaggtttaaacagtttgaaggactggttgatgattgtgaatataaacgaggtataaaggagactacctgtacagatctggatggattttgggatatggttagttttcaggtatgtggttcaatatttcaaatatattaacttagggcttttttttttttttttttaagtagcaggagtaaaatggggtaatagtagctgcttatgtacctgtaatattaaataagatgttataaagcactttgataaactgtaaaacatgatctaaattttatgactgatgtcctcttctcccatatattctcaggataattttttttttttttttttttttgagacggagtctcactctgtcacccaggctggagtgcagtggtgtgatctcggctcactgctgtctctgccccccaggttcacaccattctcttgcctcagcctcccgagtagctgggactacaggcgcctgccacctcatctggctaattttttgtatttttagtagagacggagtttcaccgtgttagccaggatggtctcgatcttctgacctcgtgatccacccacctcggcctcccaaagtgcta

SEQ ID NO: 75505 - DNA, 1101 bp, Homo sapiens
ttaattataacacatacatttttcaaaagaagaaaattgctatactgctttagctcagatacgactttttcctcattttcttctggcttagtatttagaaaaactggccctgaagacaaaaatgattaatttgcaaaacaagggaaaaatcagttggaacctttaaaagaaaaggcaagatcattttgcaaagactggctggcagcaaatatactaaaaactgctcagcagcatctaagactgttaagtgtttatgttccattaagaaatcttcaaaatctttgaatctgattacaattaattagtaaaaatggacattcacactataggtgtttacattttctcccctccagaatacacattttaaaaaaatagaaacatttctattttagcccagatctacaagtgacacaattttgaaaccctttatattagatatatggagttcatgtttcatgaagtatatttttgctattgtttttagtgatgagtctcaagcaacaaaagaaattttggcacaaaaatgtaaaacttactctaccaagacaatacagcaagattcaaataaattgccatgtcctttgggtcctctaactgtttggcatgaaggtatagtatttaattaatttattcattttttagaataatgttaatacaaaaaatattttgctttcaggtatagtaattacatttttacttttctggattattacttgtcagatttgtttggagctctttttcaccatatcatttggggatgtgaactcagggtcagaaaagacgggaaagcatgggtaaagatatctgaagagaatattggaatgaagaatacagacagaagaggggaaataaatgtaaatttaaagaaaaaatattgagagctactttagaggaaatgtgaagtgattgaggcagaaataaaattttaaaattaaacattgaaaaggatttttaaaatgtctttttaggggctgtcattttaggaattgttgctttgaaatttatatgtaagattttctttaatttatagaacatgttttaaataaaaatgaagctactactaaaaatttaaatggccttccaataaaagaagtcccatca

SEQ ID NO: 75506 - DNA, 1019 bp, Homo sapiens
gttaaggttatttataatctaaggttatttaacttaagaatttggtccttaatgatagtcattccataatgttagatttctgattttaaaccattgtaattatcaacataattttttttttgagacagagtctcgctctgtcgcccaggctgaagtgcagtgacacgatctcggctcactgcaagctccacctcccggtttctcaccattctcctgcctcagcctcccaagtagctgggactataggcgcctgccaccacgccccaataattttttgtatttttagcaaagacggggttttgctgtgttagccaggatggtctcgatctcccgaccttgtgatccgcccgcctcagcctcccaaagtgctgggattacaggcatgagccaccgtgcctggccgtaattatcaacataatttaagtaaaaagatacgtatttgttgaataagtttttccatattaattttccattatcttttaatttgttgtaatacccaaaaggtattagttagtctttaaataagaattggttcggggtgggtgcggtggctcccgcctgtaatcccagcactttgggaggcctaggcgggcggatgacgaggtcaggagattgagaccatcctggctaacacagcgaaaccccgtctccactaaaaatacaaaaaattagccgggcgtggtggcgggcgtctgtagtcccagctacttgggaggctgaggcaggagaatggcgtgaacccgggaggcggagcttgcagggagccgagatcgcgcgactgcactccagcctgggcgacggagggctactccgtatcaaaaaaaaaaaaaagattctattcccgggtaatagcaatggatttagcgtaactggtcttctgattccatgtatacacttaattgtatctgtttttgtctctcaaattatgtacatagaacatatatttctgttgtcatattttcagacctataaaaattggttgaatatatcctcagaagagagaaatcttactctacttt

SEQ ID NO: 75507 - DNA, 1073 bp, Homo sapiens
ataaccctttttataatatggcttttaataaaaaaatccttcaagacatatattcctactgttgcttcttttcctttcccaagttacctagtattttcatgtagcatttctatctagtaaaataaatattttattgttgttttagaaaacgaaccagaaggaaaggtgccaagtaaaggaagacctgccaaaaatgtagaaacaaaacccgacaaggtagagaataaacatctttttaattctagatgctttgaaaatctcattgctactttcataaagttgaaattaaacataaagaactgcttcaaaaggttaacctacatgtgtgttaaaacttcctgaaccataagaaagcatcaagaggatttactcttgttatttttcaggtatcttattttcagagctttataggtagagaaagcataattttgttagaagatggagaaaaataataaaaacacagctgagagaaacctgtatgtgggaattagccaagacatagggtgaagtggggtgaaatgcattgactttggattcatttaggcctgggtttgaatactctctctgcttccaattagttgcataaccctgggcaagttatgtagtttatgagcttcttttcttattcctaacatggaatacctgcatagagtagttgtaagaattaaataaactaaaatttctgcctgcatctagcatggtttctaataaggtcttcaaaaaagatgccccatttgaggacccaaccccttggcctataatctatgatatagtttattttcttttattttattttttgagacagagtctcactctgtcgcccaggctcgagtgcaatggcgcgatcttggctcactgcaccttccgctccccgggttcaagtgattctcctgcctcagcctcccgagtagttgggattacagacgtgcaccaccacgcccatctgatttttgtatttttagtagagacgaggtttcaccatgttggccaggctggtcttgaactcccgacctcaggtgatccacctacttcggcctcccaaagtgctgggattacaggcgtgagccaccacg

SEQ ID NO: 75508 - DNA, 1025 bp, Homo sapiens
aataggtatggggtagaattttgattgggcagttaaggaaggcctccctgagatgaaagccttttgagtgaagtcattatggaagtggagaagagaaccatgggaaagcgctttttatccaggagaagtattttctaggcaaaattaaaaggtcttgaagtgaaagtatgtctaggagtgtttaaggaccttcagaaggcaagttatagtgagctgtttttaatagcttgggttattagcattttccaaattctgtgattgtgaaaaaggatgtaagcttttttggaagcttaatggaaagcttttctttatctcattttatttggggtagttttttgttgttgttgttgggtcatttacgatgatcagatttcatatgaggaatcaatttacagattaaaaatatgatggtctgattcattatgcaattaaatcacatagcacctaatctcttaaatagattgataacgagagtgatgttcgagcaatccgacctggtccaagacaaacttctgaaaagaaagtgtcagacaaagagaaaaaaggtaggaatattagcaattactataaatcctctgaggctaccacagccataattttttttaagtgtcttgaaggtcaactggaatttgttcgtttgtttgtgacagagtcttgctctgttgcccaggttggagtgcagtggcacaatcatagctcactggagcctccacctcctgggctcaagtgatcctcccacctcagcctcctgagtagctgcaactacagacttgccaccatgcccagctgatttttatattttttgtagagacggggtctcactatgttgcctaggctggtttcgaactcctgggctgaagtaatcctcctgcctcccaagtagctgggactacaggcattgcactaccatgcctggcttcacagcaataatttcataactacaagggacatttgatgtagttatttttttttcccacagttgtgcagcctgtaatgcccacgtcgttgagaatgactcgatcagc

SEQ ID NO: 75509 - DNA, 1018 bp, Homo sapiens
aaattggtgctaagatgtcgatttaggatataatattgggaatatggatgagtgtttaagctgtaggactaaatgagaccattccaataaggatatataaaattatgaaaaagtgggctctagagagcacttttaggtaggcagaagccaggtaccaggctgaggactggtcagagaggcaggagaactaagagaggatagaagctcatattaatgatgattccaatacctggaaaatacggtttgaaatttctttctcactgagaaatgtgagtaatttttgaagttactaacttaatttaaatcaagctagaaccagaaaaaggaatttaagtatctttttgctataagagattaaggataaaatttaactttaaaatgggaactttattttgtaataagatatggaagtaaacctttaccagttcatattttaagttcatcttcttttgactgttctaaggctattccatcttctgtacggattacaaggtcaaaggccaaagaccaaatggagcagactaaggtatagttgatagtagataattgttactaaaatgataaattgcacttttttagtaagtaaattcattttaaatctagtatcagattcaaacataatgattaatttactagagttaacaggtaccaaagtcactgtttttagtatggtgatgtagagcaatttcacttaaaatatttgctccaacattccgtatgagatccatggcaaactgtctttgtgtcacactcttgttttgtttagtgggctcctattatgcattccaagttacctgcatgaaatgcatatggggaggaaagcacacagggtaggtgttataaacttacgggtcttcaaaatactgtaatagagatatcaggagggttactaaaacaaagtgaagtgggcaagaagggaaataatatgcctctttatcaggtgaggaagctaagttccacgtatgcatatatattttgcattgctatgatgttcctggtgttgtaggcttttggatat

SEQ ID NO: 75510 - DNA, 1025 bp, Homo sapiens
tgaaagcctttttttttttcttgagacggagtcttgctctgttgcttaggctggagtgcaggggcgcaatcttggctcactgcaacctccatctcctgggttcaagcaattctcctacctcaacctcccgaatagctgggattacaggtgaccgccaccacacccagctaatttttgaatttttagtagagatgggatttcaccacgttggccaggctggtctcaaactcctgacctcagatgatccgccctcctcagcctcccaaagtgctgggattacaggcgtgagccaccgtgcctggcctgaaagcattttttagcagcagttgaaatgacacaaaaataattgtttatacatttgcataacttttcatctgaaatgttttatatactgtgtggttttggttttttttctgcctaggggcaatgaaaactattctaggtgatcaacgaaaacagatgctccaaaaatacaaagaagaaaagcaacttcaaaaattgaaagagcagagagagaaagctaaacgaggaatatttaaagtgggtcgttatagacctgatatgccttgttttcttttatcaaaccagaatgctgtgaaagctgagccaaaaaaggtaaatttagtgtcttaatataaaggaatagtttcttttatttggtattttcttcaagacattaagtgactaacccctttcccttagtctcattattaactggttggtagaaggtgggaatgacataatagtagctcagaagaatgaaaatcaggtctcttaagatagctgtaggtaagttgagataggataaaactaggaaaattggtagaatcaggctgaacaatgttatgcaaaggatttggtgtttatcctgtaggttttgcagaatcaggagaagtttataaataagggtagtgccgttgtcaaattaataattcaggaaaataccatagccctaaagattttagtctggaaagggaagcatttatagatagggagaccaattgtgagactattgtaatagaata

SEQ ID NO: 75511 - DNA, 1013 bp, Homo sapiens
gattatccctatatgactaataggtacctggtgtggggtttttgtttgtttttggttttcttttggctttagaagaaatgttagactacctgcattcctcatcatgggtaaggaaacccttgtgtacatggtccttcacttaacctattttcacctttatttcacgcttttctttttgcagtgttctctgtggtaagcccagagcctcttttattctggactatcacttactggctttctcttcactggtcaagcaagttcctatttaaaacccccaaataggtagcttcttattctctgataatcttcttctcacttttcagtgttacatatttatttcattgcacattttatatttttatttcagaaggccctgaagtgggacaggaaatgaactgtaatcttaattttttaaataatgaaaattcatgtaagttgggttttgtccttttccttgacaggatgtcttcatcacattttgccagtcgacacaggaaggatataagtactgaaatgattagaactaaaattgctcataggaaatcactgtctcagaaagaaaatagacataaggaatacgaacgaaatagacactttggtttgaaagatgtaaacattccaaccttggaaggtagaattcttgttgaattagatgagacatctcaagggcttgttccagaaaagaccaatgttaagccaagtaagtaaaggtctgttgtaattttaagtactttgaagagtgaataatagttggtttaatgcctgtgtgagtaaaaaactctggccagaagagttttgaaataccattctataaataactttcctttttggtctttttccttttttttttttttttttttttaaattacaagagacagggtctcactgtgtcacccaggcgggagtgcagtggtgtgctcactgtaacctcaaattcctgggctcaaggaattatcttgcctcagcctcccaaagtgtggggattacaggtgtgagccaccgcgcctggcccc

SEQ ID NO: 75512 - DNA, 1140 bp, Homo sapiens
tcaaaaccacaatgagataccatttcacatccattaggatggctaaaaaaatttgtttaaatatacagtaacaagcccggcatggtggcttacacctgtaatcctagcactttgggaggctgaggcgggcagatcacttgaggtcaagagttcgagaccagcctcgccaatatggtgaaacccgtttctactaaaaatatttaaaaaattagccaggcgtggtggcaatcacctgtaatctcagttactcgggaggctgagacaggagaattgcttgaactcaagaggcagaggttgcagtgagccaagattgagccactacaccccagcctgggtaacacagggagactccatctcaaaaataaaataaaataaaataaacaggaggaaggagcagcaccaaatccaagatggcggccagcaggaggctgatgaaggagcttgaagaaatccgcaaatgtgggatgaaaaacttctgtaacatccaggttgatgaagctaatttattgacttggcaagggcttattgttcctgacaaccctccatatgataagggggccttcagaatagaaatcaactttccagcagagtacccattcaaaccaccgaagatcacatttaaaacaaagatctatcacccaaacatcgacgaaaaggggcaggtctgtctgccagtaattagtgctgaaaactggaagccagcaaccaaaaccgaccaagtaatccagtccctcatagcactggtgaatgacccccagcccaagcacccgcttcgggctgacctagctgaagaatactctaaggaccgtaaaaaattctgtaagaatgctgaagagtttacaaagaaatatggggaaaagcgacctgtggactaaaatctgccacgattggttccagcaagtgtgagcagagaccccgtgcagtgcattcagacaccccgcaaagcaggactctgtggaaattgacacgtgccaccgcctggcgttcgcttgtggcagttactaactttctacagttttcttaatcaaaagtggtctaggtaacctgtaaagaaaggattaaaaatttaagatgttctagttctgctctctttgttttaaaaatcactgcttcaatctacttcaaaagaaaaaaaaaaca

SEQ ID NO: 75513 - DNA, 1024 bp, Homo sapiens
ataatggatgctaaagccagtggcgggggtgctggggaatgtgatgaagaacacgatattcatataacataaaagtagctctcgccggcccccgccagctgcggagcaacccgcgagcgagctcacaccggtttctctccatcctcagcttgcgcgccaccatcgccgtcgtgctggggccgctctccaccgctgcgcggtgactgcaaccgcccgggccggccctcgaggcctcctgcattccgccccaacccccggccccgccgcggctatccagtcagttcactgctattcccatgggtcacgagacagatgaggagtttgatgctctctgagtaacatacttcaacaagccagatatagatgcctggcaattgcgtaaagggatgaacacacttgttagctatgatccggttccagagcccaaaattgttgatgctgctttgcgggcatgcagacggttaaacgattttgctagtgcagttggcatcctagaggctgttaaggacaaagcaggacctcataaggaaatctacccctatgtcatacaggaactcagaccaactttaaatgaactgggaatctccactccggaggatctgggccttgacaaggtgtaaaccccatggatgggctttgcaaggatttattgatattgctacttgtgtgtaaacagttacctggaaatactgatgataatatataccttatttgaacaagttttcctttattgagtaccaacccatgtaatggtaacctggactttaataaaagggaaatgagtttgaactgaaaaaaaaaaagtagctctccacaaaatacctattaataacttttaacctagtaagtacaaaatacttattaattaattttacagtgaagaaattcagcagacaccatcttaaccaagtgataaaagtcaaccctgatagaaatagaacaaattacgttgttgccttctgatgctgcactgagaagaacatagcatcacttctgtggtacgcctccataaaaacccactacc

SEQ ID NO: 75514 - DNA, 1032 bp, Homo sapiens
ttcatgttcaaattgtcccaatttaacacaactttttcacacagtttgtcccattgctttattctctgattttattttttaaatcttgaaggatggttttgtaaaggctgcgatggctgtgttaaaattcaaatgtgaagcttaccctttctgaaaaatcactccttggttttcttatgctgtctcatttctctactgtctcatttctctacctttttctttgcccatttttcaaattgtttctgtactgactcccttcacaaatctgttttcttctccatctcctgaaaggtggtagttttttggttttgttttttacatcttattttttaaattcattttttaaaaatcttgtatgttcttccaatgaaaaaattatttctttaattgacaaattaaaattgtatatatttatggtgtacagtatgatgttttgaaatatgtatacattgtggaatggctaaattgggctaattaatacatgcattacctcatacacatcattctcttgtggtaagaacgctgaaaatctactttcttagcaatattcaattatgcaattcagttttgttaattatagtcattgtgctctacagtagattccccaaacttttttaccttgcagttgaaagtttgtgtcctctgaccaacatctccccatttcccttcccagctctggcaatcatcagtctacactcttgcttttcggtattccaaatttttagaatccacatatgaatgtgatcatgtggtatttctttttgtgcctggcgtatttcacttaatataatgtcctccaggtaaatccatgccgttgcaaatgacgaagcttagttcttgacccacagatttaatgtgaagtctttctcagaggtgtcactcactcataacttcaaataatcacctttgcaattgtctccaatccttactgtgtttcaggcctccatttccaactccactaggaggcactgtagtgatctaaaggcagtacacctcaaactgaaatctttcatccaaaactattaatagctg

SEQ ID NO: 75515 - DNA, 1641 bp, Homo sapiens
ctgagcgtccccgcgggccacggagggtcgggcgggtagggagcggggtcctgggtccccgctgaagccgaggagattcacggataggccgtgagcttgcaccggaccggcgctcccacttacgggacccagggcggtgaggaagtcagcctctggactggggtcgcctcgcccctgtcgcgccctcccgggctcggccactctgcccttccctgccccagcgcaggtgagctggcgcttgtccttaaccttcttcaacgacgaggcgggacggaggctcggacgcctccccagcctctgggctggcgcaagtcgactgcggttcgtcctcagtccacgatgaagtcatagggctgtgggtccgtgtgtctgtgacgtcagaagatgggtcctgggatgtcactgcaggcccgggcggggacctgggctcacggaagggccggggggacccgcagggtagaaaaaggaagttgtcttccacgaacgcttggaatcgcagtggatttgaatcgaaagttgttcggtatcagcattttgcaattttaatgtaatagttgtcaatttctttaacttcttgtccagcaagcgttgcgagtacagctcagtataagacatttgatttagaaaaacttaagtcagggtaggaggttttttggagggtgtaatgtaaaaagccttttaggaagctaaattcgtagtttgatagtttgcaatcagaattactgaaaaaaaagagaaccacttctagtgttgataaatcagtttgctttttttttttttttttaactggacatctatctgcttgttagcattttttgttagaaaatggccaggaggagggagagtggatcttacatgattttttttttctgttgtaaagggagggaggagtttgaattaatccaacatttgtcttaaataataattacctgaggagttaatttatccaggttgtccctatcccaccctatggtaccatgctaccaccccatgctaccatggtttagaagtcagcaacaagctgttttcttgctttcttactgagacccggctataacttaatataaaaacatattccaggaccgcttgtctggataggtaactaaaattttgtctgtagtgcttttaaatatgaaattagagaataaaaaaatgatttgtctgtgaatactgtttttcttccaaagctttcagaagagatctaactggaagagaagctagtcactttgtcatagtgaccctcttcgggtattccagcatatcagtacttttcatttcctcctctgtagaataatgtaaatggaatctagttcaaaaggtagatggcttaaacttgaagcatagttagtctttagcaggaagcttgggtagaagtccttaatccttcctcactgaccttgacttgtaatggtacggttttttttttttcctctctctcaatacttcctgctccccatttgccttttagaggtgattgataagatactgtctctctgggttttacatcaacatgcagatggaagttatgcccattttcaggcaggaaataaaagcaaaaatttacccgttaggtactattggatttgactggaagttcacaaaacaaggctttcctgtacatgttattttgatcctcaccac

SEQ ID NO: 75516 - DNA, 1023 bp, Homo sapiens
aggttctatgttacccttttaaaggaaggtttctagaagctgtcacttcatagcagtttgaattatgtttcattagttagaacttagtgtcatagccacatctgaatgcaaagaaggttgagaaatgcagtctttattatctttttttcccattataaacaatgctgcagtgaataaccttattcagatttatttttatttatttattttgagacagagtctctgttgcccaggctggagtgcagtggcactatctcagctcactgcaacttctgcctccggagttcaagtgattttcctgcctcagccacctgagtagctgggattacaggcacctgccaccatgcccacctagttttttttttgtatttttagtagagacagggggtttcaccatgttggccatgctcgtcttgaactcctgaccttaagtgatcctcctgccttggcctcccaaagtgctatgattttaggcatgagccatcatgcctggcctcagatggtgttttgtgggatacatttttagaaggggaactactggatcaaagagtatttgcagttggacaatacacttgttttctcatatccttgctgacacagtttttgtatttgctaatttcataggtaaaaaaatgacagagggtagctctaatttgcctgataggacatgtaggtagagaaaatacttctatgcttacatactgatgatacctagaaagcatggattacacagttagctaatgtaatgctagttggggtgaagcatatgcagcatgttttcattttatttaggccaattgtagcagaagattgatggttaaaggtagatgagaaacccttctactcacaaacatgtcactgtgaactgacaggaaaacagggtaataatgtattctttaggagtttttaaattaaaaagtaggttagggctgggcatagtggcttatgcctcctcacttcaggaggtgaagtggggaggattgcttgaggccaagaattggagaccagcctggacaacatagc

SEQ ID NO: 75517 - DNA, 1136 bp, Homo sapiens
tggggattataattcaagatgagatttggctggggacacaaagcctaaccatatcacatatactagaaactgtgtgtgtgtgagacagggtcttgctctggcatgcaggctggagtgcagtggcatgatcacaacttactgcagcctcaaccttcctggctcaaagtgatcctcctaactcagcctcacaggcagctaagaccacaggcatgccaccatccctggcaattttattttttattttaatttttttgagagctgaggtctcccttttttgcccagggtggtctggaactcctaggctcaagtgatccttccagttaggcctcccaaagtgttgggattacaggcatgagccacaatgcccagccctgaaaacctgtaatttagtgttgggaataataaagatatgaaaaaaaaatggattttgttaccaccttagggcacattctagagtttattgtgtttatcagtttctcacaacttaagtggaaacggtcttaacagtgctttgacagactgtagccttgcagggggaaacctaatgtgagatagttaaccaaatacacaccttggtgtaaactactgagctacctcccagaagggaagctgctatcttcctgaggtgtgctagattgggtatcacataaatgttttgtctccccttgagtctgttccctgggaatggattgggtatcattatgacataggaacagctgaaaataagggagttacagatgattttgaatatcagacagtagtaacaggtatgtataaaatgatagatgataatattaaattttgattatacagcaataaatttttgttgtagaaaaattggagaatacaacaaatgaaagaaaaaaaccttgttggaaaaatttaatctgaaaaaagaactaaaacattttgaacttttatcactattcttatccttttatattgtgtttttcattgaagtattaaatgtacatagtttagttgatagctgtttaagacttgttttgaaaagtgtcagtctttctcccacttcatccccccacttctccctcttggaggcttgcttttagcttattatttttgcatttacctccatgttcttaacagcattcttgtattctgatttcttgatttct

SEQ ID NO: 75518 - DNA, 1131 bp, Homo sapiens
cctgtagtcccagctacccgggaggctgaggcaggagaatggtgtgaacccgggaggtggagcttgcggtaagtcgagatctgccactgcactccagcctgtgtgacagagcaagactccgtctaaaatatatatataaagttttaaggtgagaaagttgaataattttaatgtatagtcatagtctttgttaaaacttttgttaaatctgggatactgttgagatagcagatggctgttataaaatgggaacatgtcagctgtaaaaagaaaccaatgtggattaaatcataattaaaaatacctctggttcactaaaatatttttcctttgggttaaatattaattttgttatagttttcttttttattcatcttttgagaaaaccaaaaaataaacagtggacacagagaaaatgaccaagggtagctttggaattccttcattcagagactttttagaatgtggactttccaaagtcaaagaatcttaaaaataagagttacttgtaaaagcaaggctgatatgggcggttttttttttttttaattcagtgacttgtcaaaaaatagatgatacttatcaggaatatttggccatcttgtaatataaggaatatcagaaggatattgtccacaaatgccttaaaatggcacgtgctttacacatcccacaccccccacctgcaaagaacagatgccttctattccctggctcccttgcattgttgcccaaagtagttacatatgaccttttactgagacaacttgcaatgtttctttttttttttttggagacagggtctccctctgttgctcaggctggagggatttcagctcactgcaacctctacctcctgggttccagtgatcctcccacctcagcctcctgagtagctgggattacagccaaatgccaccacccccggctaagtttcatattttttgtagagatgggatttcaccatgttggccaggctggtttcaaactgctgacatcaaatgatctgcccgcctcagcctcccaaagtgttgggattacaggcgtgagccactgcatccagccagcttgcagtgtttctgactggtcccagtgcttagctcagtaccaaggcacagtaggttttcatct

SEQ ID NO: 75519 - DNA, 1030 bp, Homo sapiens
actcggcctgggcaacagagtgagaccctggttcaatcaatcagtaatttgtgtatggcacacacataccttgctcccttttttctccatagccttttatatactgtgtaccttattaatctgtctctcagctagaacataaccttttctatggatggagattttgtgctttgttcacttctgtatccccagtctctgaaagagtgcttggtacatagcagatgctcagtatatattgagtgagtgaataaaagatctgtttgataatttagctcccaaactgtgggatttgaataggagaaatgattgcttgaacattcaaattagagacaggaaattttttttagacttgtgaaacagaagaaaattcaccaaggttacagattgggcttctattataataccctgatctctttaggccccactaggtagtttcaatttgagcacaattccagtgttgcatatttggaggagactggctagaaatttctcccttctttgtggtttttattgaatttctctggtaaaaatatattaatggcttttcctatgccactctcatcctctcctgcactgaataatttctgttctggagtagtagtttgtaaatttgagtaaggtatgaattatatccaaaagaagaaatgtattgaggttcttcagtatagatgtaattttctaatttctatgttacaaatatatatgcagctataaagagcaaataaatacataacacctcaatattattttgatattaatttggttagagtttggaaaactaaattgaggcgtgatatatatatatacacacacacacataccaacatggtgtgtgtgtatatatataaaaaaatataaaatatataaaaatatatataaaatatataaaaatatatatataccaacatggtgtgtgtatatatatatatgtgtatatatatatatatatgtatatatatatgtatatatatatgtatatatatatgtgtgtatatatatatatatgtatatatatatatatataccacca

SEQ ID NO: 75520 - DNA, 1102 bp, Homo sapiens
gtgttagtatggacatattgtcaaatgttttcatagggagaacttggtgtacctcattatttagatttttttataacttaaaatgtggtatgttttgaacttttagtttatcagaaaatgttgacttttgatgtaatggctacttctgtagctacggtgatcttcagcaagtttcactttctaaacttttatcttttctgtgcagtggttgcaggttgtgaggtatggagatactgaggggtacgaggcactgtttgtggtgacatgagagccactagcggacagagactggggagaaggattgatcagctggcgcattagccccaagatgcaggtgaatttgggaacagaaagagggccaaatgagatgtttgtgaaaatactttgtcgatttaaaacattccttccagctcaggtgctgttatgtttagggaagatgtgcgtgttttctctttctagtgggctattgttagctacaaggtgaccttgcctcctgctttgagggagaaggaaaaagctggacccacaagacacaaatcccagcagtctgtggttactgctggaatgattactgttctttatttgtactattagttgtctctaagattggtaacaggaaagtgagaataagcttactctcagaaatttttgttgagggagttttgtataatttctgactattaccacattcccctttacttcgaccctcttggttttgctgtttgctgtgctctagttttaccatctaataacccagcactaaaatctgatcttgggtatcagattctcctttgtggtttggtttgttaataattgaagtacctaatggttctgggtgtgaactgtgcatacttgacaatctagaaccagggaagtgagtttcctattgaagtaattaataaaaccttgtggctcttaaaaatatataaaaactgttacacagaaataaccaaaatgtaaacttaacaggatatagtttaattatgtttttataacataaaccttaaagatagaagtatttttaagcttgttggtgtcctgttcctttctagtttgggtgtgtaggagtcttttttatcaggaattttgttagtgctaatgc

SEQ ID NO: 75521 - DNA, 1225 bp, Homo sapiens
caggcattgccctatgggccagggtattggatgtgctgccaccggtctcagaaaggattccctggctgtaagctggggcttcatgacaatcactgggttcctgcctgccacagctttaatcgggcaatccataagaaagcaaaagggactgaagctgaagaggaatactaaagtccatgtgagaggcaacaaaaggaccggtttctaaagctgcaaaacacctagatacaccgttcaaatgagcgtagccccctgagtcatcactctagaagaatctgtacatcatcaggactgcattgctcaggcattttctaaactctaaatttacgagctgtacaaaaaaattggtcttgttgtttatagtggcatctcatgtttgaacccgggtggtatcccacagttggattcagttggctgtgaataactgcctgttttcctaaatcaaacccatcctcaaaggatgaagactcaccaccatccaggacattcagaagagttcactgcagatgctgcaggtagtcctcaaaaatgggttccagaaatgttttgagcactggcaacatatttgaaataagtgaatattgtcctgtgaaaagaatagcaggacttttagatgaaaagtattcttaaaaagaaaagtcaggcaccccaccttagacctcgtatgcttgatcctgtgagattgatgtttgtggctggaggtggatttcatgccctgtggtgtttacagtgtatataatggttgtgttttcatggggctatgaaagtgcacgttaaacctgagcgcctttacctttagatgagtgctttggcccctctgtgaatagcacgattaaaatccagttgtatataatggacagctaacggaacaatataatcaccacaatgcagctaggatagtgttgcggctataattttgtgttttttttttttaattgtctagtcttaaatttgtacatcttgtataaaatatgaatgtttcccaaataaactatgaatgtttcctgtataatatatgaatgtttctgagaagaaactctaaatagttgaaaggctaacctgctcaaaggataccaaataatggtttaactggacaacctgaaaattagcatagaaaacaatcctttgttatattttagtgatccacaagattgagaaaatattatatagttagataataacattcttgtctactttatcctgtctggttacaaaattttttaaa

SEQ ID NO: 75522 - DNA, 1029 bp, Homo sapiens
agaaaaaaacactttatctccaacaattcaaaacaatttaaaaaattcttatgattcaattcacaagaaccttcttcaacattgtatcaaaacaggagaaaaaatctttgcaaaacttgggttccatttaagatgcatgtttttatttaagttttaaaaaattttgtaaccagacaggataaagtagacaagaatgttattatctaactatataatattttctcaatcttgtggatcactaaaatataacaaaggattgttttctatgctaattttcaggttgtccagttaaaccattatttggtatcctttgagcaggttagcctttcaactatttagagtttcttctcagaaacattcatatattatacaggaaacattcatagtttatttgggaaacattcatattttatacaagatgtacaaatttaagactagacaattaaaaaaaaaaaacacaaaattatagccgcaacactatcctagctgcattgtggtgattatattgttccgttagctgtccattatatacaactggattttaatcgtgctattcacagaggggccaaagcactcatctaaaggtaaaggcgctcaggtttaacgtgcactttcatagccccatgaaaacacaaccattatatacactgtaaacaccacagggcatgaaatccacctccagccacaaacatcaatctcacaggatcaagcatacgaggtctaaggtggggtgcctgacttttctttttaagaatacttttcatctaaaagtcctgctattcttttcacaggacaatattcacttatttcaaatatgttgccagtgctcaaaacatttctggaacccatttttgaggactacctgcagcatctgcagtgaactcttctgaatgtcctggatggtggtgagtcttcatcctttgaggatgggtttgatttaggaaaacaggcagttattcacagccaactgaatccaactgtgggataccacccgggttcaaacatgagatgccactataaacaacaaga

SEQ ID NO: 75523 - DNA, 1044 bp, Homo sapiens
tagttctcaaccccacctgcaactggaatcacctgggagctcccacccccagtggttgatttaataggtctagggtgtgccctgagcattgagaattttaaaagctccacagttgattctaatgtgcagccactaccctgcccactactaccccacccactactacccccaaccaggcagctggggcctctgcaccagctcctgcacattagtagggccaatcctttggccttcctgccctgcgcctcttcatgggcaaggagtttgaaggatcaagggggcaggcactgttccagaatctttgttctccttataaaccattacctaggttcccagaacctcaggacctccagcccttccccagctttgtcctccagacagatcccttcgtcctgagaagtggctgaggcgtggctcagtacagagggtgggaggatgctggaggggatgtgctgcaggagggctctctgtgttcctgccatgggccctgcaaatactgggaagggcttgtccctatatctacacccttataataaatccttgaatttactcatttcaagtgtgcagcagtttcctttcaagaccctgcatggagcacagacttagaaatctgaggggcctaaagccaagaccactggccgtggaaaaggaaaagttcacgagaggtcccagcttaggcactagggcagccaagtcatctctgcttaggagagaaaataagggctggtagagaaagggtattgctcaagacaggccacacaccctgtagcagaatcatgctgcgttgtctgtataggggaggattggtgaggaagggcagagtgaaggccaacagttcggtcccagaatagggaagggtgggtgggccaggcctggctccaaccctacccttgaaccagactgcaaacactcaagttatgcaaatagattatccagcctcacagtggagagggaacagatacaattaaatacaaccttgctttccattttactcatgtttggcaactaattgattttttattttttatttaactaattgatttt

SEQ ID NO: 75524 - DNA, 1030 bp, Homo sapiens
gattacaggcctgagccaccgcgcccggccccttatgggttcttctacactgctgggatctctgttttaagtgctcagcttcatgattgattgctgggcttccattttcccatccagttctggagttcgtagagagtgaagatggtagacttgaacagataaataaacttaacgatcttgtaagagttgtctagctacttaaaaccctcagaagtaagagcttagtctcacgagttgtaagagtgggatttggagcttggtggtggagactgacttcagctgagagatgcacaacagtcatggttttcttaagcctcttatgaaaccatgaatgagagatgaagctaaagaatagaatccagagatcacaaactcatctagagtacttccacaaaatttacaaagatgtgggaactttatggataggatatattttgtttgttgttgttaatatcaactagaggcactttacatagggttaagtgatcgaacccttttgtggttttgaacaccaacatactggcttacactgctgaaatattttgggtttcattattttgcactggatccaccctgtaaatactcttaagtatacatttcaaccactgttttttctactctttttgctgctcattaaaatctttcatgtaggtgccagaaccatatgtaaacagctttttaaaaaattgaagctggtattttgtttaaacaaaaagccatagaacttggtcatgttttccattttaaaatgatttactgaaacaaagtaatactaataaaaacccacaggcaccaaacaggctgcttaaaatggtctgttaaagacattttttggttatggaatataagaaaagttttgcacatctgtaagggggaaaaacagtatatcaccattgggtagagtggacgggactcatgtaaggactcaatttggggaagagcattcagtggcatgctgttagaggactagtgtccgagaatctcctcacagtatcatgttgcaggaattccccattgctctgcaacttcc

SEQ ID NO: 75525 - DNA, 1016 bp, Homo sapiens
gggagacaaacatttctatttgccaagtggcctgtgatggtgaccaacatgcttatgataattaagagaacaggggtcgaaggtctttctacccagaccagtgctggtggaaggaggacctgtgcgtgtggccagttctgccaaggaagcagttgatttgggttccctctgggcccgggccaccgggcccacagatatgggtcagtgtgctggtccttgcggtgctgagactgttcctgacactttaagttttagaggttggttgaatcacaagaggtgattcttgattattaggacatgaaagataaaagctctttaataagagtttttctgccattgttttttgtatgagaaccagcaggcaatttaaaatttctaatttggtcctttgattttgtttgggaggggtgagttacacgtattttattcatgctgctctgtcgtagtttgtcagacattcctgtttttctttcccccacacaccaaagaaaatgaaagtctttttctttaggacccacatccataaatggaagaaatcctggctgcaataatgtctagagagtttttaactattttcttgtattctgaggggaattaagcttattcttacctagttgaattcctgccatccacactatgagcattttgaaattgaacttatattttctgggtgaaaataagtcatgaaggtcattcccttatgtaagctcaatgcctgcctgggcacaggggaaaagccacttagttaagtggcctctggtcattcttgtggtgtccactttctttctatgggattgagtaggtggcaggtgttttcaggggaaaccatcctacttgtttccccgaactctttgttgctctgaggacacagctttgctcagaaatgcagcgcagatccttacggctgatgctactctgctctgttctggggaaagcacaatataaagaaagaatttcccagccaggcgcagtggctcacgcctgtaatcccagcactttaggaggccgaggcaggc

SEQ ID NO: 75526 - DNA, 2090 bp, Homo sapiens
gtgggtaaaaagaatggcagttgcaaagtcctggatagaataacgagggcagagaggaagatggggtgcaaatcttgtgggcctcatagggccgttataagcctttgactgccattctgcataaagcagatgacagttgtatagtttgcctttctgtaaaggtgtcaagatcttaccagtctgctgttgatgcttcaagaaataatcttgtacatttttcatttcattagtgtgcagatatttgtgtagaataaatgtcctgacgtggaattgcttggtcaaagggtatgtgcatttgtaatttgtatagatgcagtataattgttctctgaggggaatggtgtattcttagaaagtctttaagtgcaatttactaaggagtaaaagggcacagagtatgtgttatacctaattgtactgtaaatggaaattttaacatagaatttcctcaaaaaatgcaactttataaattgtatgtttgttttacagtgaattttgtggcgaaaatctaagcaagcagaaatttactcgagcagtgaagaaactgaatgcaaatattctttacctttgtttttctcaggtatgaaaaataggttgtgaactaatttttactttgttaaatagttgaaaatattaaccaattctttaattttttttagcatgtaaatttagatcaattacaaccactgcataccctcaggaatctaatgtacctggtcagtccaagctctgaacacctaggcaggtaagaagatatttgttgcttttctctaagtgtttttgtgaatcctgttagaggagttgtatgttggcatagtagagtcgtgttccctaatcccaaactcctcaaaccggacaaaaatagtggagtccaatacagaaagaaacaaaggtaattatatttgaacttttatgggttttttttgtaatcatgtcttagaaaaaattaatatcaatcatttttaatacctgaagcgcagttgaagaacccacatgttcctggagtagtgcctttttgtgcttttcctgaagtccaaaggccatgtctttggatctgcgtctatttcttctccagcccttcctggacatagacccctttataaaaagctgtgaactctctagccctacctagtgtctgccctgtttcctgcacattttcttttgctcctcctcactccttgtccgtcgtaacaattcacaatttccttttttttttgagatggggtttcacccttgtcacccaggctagagtgcagtggtgcaatctcagctcactgcaacctccacctcctgggttcaagcgattcttctgcctcagcctcccaagtagctgggattacaagtgtgcaccaccatgcctggctaatttttgtatttttagtagagacagggtttcatcatgttggccaggctggtctcaaactcctgacctctggtgatccacccgcttcggcttcccaaagtgctgggattacaggcttgagccaccgtgcctggccacacaattttcttatcactgagtcaatctgatcaccatttgttggagataaaaggtattagaggtgtaggggatgaactggtttgaaatcaatgagcttaaaaacagttaaacaaaaaataccaaccagggctggtgtgtgagatctttttattctctcagcccatgaaagcatgtactgtacgagccttagctttcgttccatccatgcacgcctgtgctgggtgtttgcccttttttccttgctcttagcagtctgtccatacatttctgcagagatgtgatatggttatatatttacacttttgaaagagaactcaagaaaagacaaatggcgggaaagttcttttgggtttcccttccgcatcatccatctactgaaacccaaggcattaggggaggcctcgtccactaacacgtgtgcctggcttcccccatgcagcagttaactttcagtgataatctgcttttaaccattgtcttatgcttcctccccctccccacctcagatagttaacatttccaggacatagactcctttataaaaagctgtgaactcgccaggaaactgcacatatacttacaatgttgt

SEQ ID NO: 75527 - DNA, 1027 bp, Homo sapiens
tctacaaaaaaaaattttttaagttaaccaggtgtggtggtaggtaggtacctgtagtcccagctacttaggaggctgaggcaggagtatctctggagtctaggagtcaaggcttcagtgagctatgattacatctgtcactgcgctccatgttggataacagagtgacacccatctctaaaataaaaaataaaaatttaatgtaaaatttctgtgctcataggcagcttttcgatgttctagcatgtcttgcagttatattgcatgcccttaaaaaccctctctcttgaaaatccgtgtgtgtcttcctacttgtagagaccccgcagatgtgtcttcagagagtgacagtgccatgacctccagcactgtgagcaagcttgctgaagcccggaggacaacttacctctcaggacgatgggtctgtgacgatcacaacggagacaccagcattagcattacagggccttggattagcctccctaacaatggggactactctgcctactacagctgggtggaggagaagaaaacaacccaggggcctggtgagaagcagcatatcctttgaaatctatatatagagagagttataggtaaaattgacataacaaaatgaagagctttcaagtgaaccattcaggggcatttagtacattcacagcactgtgctcccatcacctccatgtcatttcaaaacattttgatcaccccagacagaaaccccatggcatgaaagtgtcacatttccccactctcccttcccctcagctcctggcaaccacacattgctttctgtgtctatagatttgcctgttctgggcagcttatataaatggaatcacagaacatatagctttttgtgtcagacttctttcacttagcgtaatgttttcaagattcatccacatgatagtatatattagtgtttcattcgtttttatggttgagtaatattccatcatatggataagacacattttatttattcattcatcacttgatggactgaaaacattttttagat

SEQ ID NO: 75528 - DNA, 1007 bp, Homo sapiens
tggcgtgatctcggctcactgcaaactccgcctccctggttcaagtgattgtcctgccgcagcctcccgagtagctgggattacaggcatgcgccaccacgcccagctaatttttgtatttttttagtagagatggggtttcaccatgttggccaggatggtcttgatctcctaacctcttgatctgccctccttggcctcccaaagtgctgcgattacaggcgtgagccaccgcactggcctaatttctcttttctctgcattgaactagaaaaacatcgttctctttttcgtaatgttccatagttacaaaagctataacataaggtctttttcttcattatgttttctgacatatctgaaaataagcagtgatcccaggtagataatcatattaaccataagagaccaacgtttgtgatatttattacatgcttttttcagagatggaaaataatgtcctgcaagatgaggattgaacagttaaaacaaacaatatgtaaaggaaatgaagaaatggagaaaagtaagtaattcgtgtccttccttccagccctagaaagtgcctatgtggaatttcatgggattaataaactagagggacacagaaaggaaggggatggtggggcagtggcaacttggagaattttactactcgccctcatctttccttgtaaaacatttgtataaggaatttttaaaagttaaatacacaatttcagaggccttaaataaccagattcttttctcaattaaaaaagttaggcgccaggcgtggtagctcacgcctgtaatcccagcactttgggaggctgaggcaggcggatcacaaggtcaggagatcgagaccatcctgactaacatggtgaaactccgtctctactaaatacaaaaacttagctgggtgtggtggcgggtgcctgtagtcccagctacttgggaggctgaggcaggagaatggtgtgaacccaggaggcagagcttgcagtgagctgagattgcgccac

SEQ ID NO: 75529 - DNA, 1030 bp, Homo sapiens
tcccgagtagctgggactacaggcgcccaccaccacgcccggctaagtttttttgtgtttttttagtagagacggggtttcaccgtgttagccaggatggtctcaatctcctgacctcgtgatccgcccaccttggcctcccaaagtgctgggattacaggcgtgagccaccgcgcccagtcatatatttcattatacttaaaatttgtgatagaagtgaattttgcttattctctgaatgttttagtaaacaaaacatgttctgtggaagattttcctgagttttctgtaatgtttctagtttttctatctaagacttcaatattcatttctaaagactctgttaccttttaaaattgaggataggtcatatctgatatatttctgaacccctcagtccctgtggatctgtttttgaatgtctgactctattcgagatgttagagtttcgctcaccataacatccctgtaatctgttctgtgtctcttaccatcagactacttagataagtgtaacaccatgaacatttgagcattgttttaagcttttaattattcactttacggagtcattagagaataatcattctttttaactaactagtagatccttctttttttttttttttttttgaggtggagtcttgctatatcacccaggctggagtgccgtggcacaatcttggctcactgcaacctctgcctcctgggctcaagcgattctcccacctcagtctccctggtagctgggactatagatgcatgtcaccacacctggctaattttttgtatttttggtagagatggggtttcgccatgttgcccaggctggcctcgaactcctgagctcaagtgatgtgcctgcctcagcttcccaaagtctaggattacaggtgtgagtcactgcacccggccatagatcctatttttattgatcctttgttcactttaaggcaggggtccccaacccccaggccacatatacctactgggctgtggcctgttaggaaacaggccatacagcaggagg

SEQ ID NO: 75530 - DNA, 1051 bp, Homo sapiens
ccccgccaccccacccccaggggagacccaggcttcagtgtaaactgaaggcgtgttccctgtcatctgccttttaaactgtatgcttccttaagggatgaagaagaagaatgatattaggcagtacctccaacacagtctttggatctgtactgctggacatattaaaattacaggaacagaactgtatggattatgtatttgtctgacaccagaaatagcactgctacccagtagatacctgataggttgaagtaatctttccactcacaacaggaaagaaattggttaccagttcatgttaggtgggggaatgggactgagaattaatctaaggatacctggggaaatgtatctgctggtttaggagccactgattttcacatgtggattaaaaagagagacaaattgtatgaacatatagatactactttataattatgttttcaggaatgatgccacattaccttcactgacaagttttagaatatatgattatacttttgccaggaaacagaaatgcatgccctaaacaaattgagaaatgggataaaggatgaggaagaaatttaaatattattgcagatttcaaggggaaggcacaaccaacatccaaaaaatatcctttagatacttctgttctcccttcagtatatttttgtttgtcagccactgtggcccgtaaaaatctattgtcttgagaattcaattctgtatactgaactcagcagaacaaaagctctacaggtagacaagagttcatcagccttacgactgtttcactgtgtccttcagagggtctcaattcctgtcccatggagtttgtttatggtatttccaccagaaaatgtggatctgctaagaaaatataacttattttcagctagtatcactggctactcttatgattataccttttagaacttataaaaggtttttgcatttactatctcatttcttccctaccctcaccccatgagttattaatgtattttaagcagaggaaactgagtctcaggggtgttgtggctgacttactcctgggttatac

SEQ ID NO: 75531 - DNA, 1089 bp, Homo sapiens
ctgttaatgaaacctgaaaaaaatacatttacctttacaagaactttgatatgcattatcacattcaagatccatgcaggcacagacggtttggctaatttactgaaaatcagaggttaaacaagggttttaaaactgtgctgtaaggttccagattttattaacaagtggttttctacagttagtgaggggcttttcatgaagttaaggggaaaaagagtctaaaggcaatcacagaatcaaaattttcaaaaattatgaagatagaatatctcacaatcaacctgtggccctcagagttcaaggcctattgacagtcggtaaaaatccttgagagcagagacctgtctttctcctctgtattgccagaaaattttgtgcacataacagtgcccaatgagagctcattaaaaaatatctggctattagaacaatggtcctgggtctcgagattctttcaccttattagatactgggcactattctggaaacaaagaaaaactaacaaactattcttcttaaagcacatagtctggaaaagagaaagatggagagttaggtgaagctgacctaagcagaccactgtgacagtcctgttatccctgaaccctaaaatttcttttttattctaaattttgaatggttatttgctttatatttttctgcttggtcaggaaaagaaatctaccacaacatatctctcttctgaaaatctaatgctcacatttagccaagaatttttgagattgtctttttttttttttttgagatggagtctagctctgttgcccaggctgaagtacagtggcgtgatctcagctcatggcagcctctgcctcccaggttcaagcaattctcgtgcctcagcttcccgagtagctgggtttacaggcctgcaacacaacacccagctaatttttgtttttgtttttttgagacagagtctcgctctctcgccaggctggagtgcaatggtgtgatcttggctcactgcaacctccgcctcccgggttcaggcaagtctcctgcctcagcctcctgagtagctgagaccacaggcatgcgtgccaccacgcccagctaattttt

SEQ ID NO: 75532 - DNA, 1588 bp, Homo sapiens
tagtgctcctcccccgcccccagccgttttggtggctctcccatcccaggccctcagagagcagggatggagggtgactcatggacaccaaaccccttgactcaccaagatatacacctgggctagggcacttggcctgggttaatcacagatgctcttaaattctcttggccaagctggaactgaagttctttcattccaacgccttatcttctcttggccatcgaatgattatcccgtcaatagagtagatagggatcatattgctgtgctttccctaacatttgttagctttcctttcagatatgatctgaatggaagttaaaaattcctttttcttctaaaatattttcattcattctgagattcagcttttatgatatgcttatttttcttttgacatgtttatttttctcttgattatgttttcttttttcttcagttttttcactgtatgctattgaatgcctaaatataccccattttttaaaaatctgagctccctataaagtcctcccattcccccatgtaagacatgttgcctctttaggtatctttcttccttcaatcttggcataatttgcagatttcctaataaagcctgtttctaagagtctcccagtgcttaagttgtcttatcttccagactctcaagtcacgagcctccagcctatctttctctgaatcggcttagtgtacatctgcaagagctctgcccgaactctaaggttgtgtctacattagacttagcattcccttctggccattcagggctcgaaaatgatgtgtgtggttcttcccaagtgtccattcatttctttttcaccagcatcttccttgcagagcagatctaagtctagaataggtgccccttgttattactaccagcttctggaagggttgccagtaaggcgcagtgagaatacatcagacggagtgggcccatccctgttctatcttcctcctgggacagttttatgatctcagtcatcttttcttttcttttctttttttttttttaatctggccaggaagcttgctttgtattcccacaactttctatttctagtctcattcttgcctccccctcatcctctccattcggctgtcagcctcaggttatggattacaactccagagtgtgtattcttgacactgggaacattaaaaacacctcttagaagatttgaatttttaacatgaggcctctctaattgtctgtagctctgtggggaaccatgctacataatcagttataattatcaggccaaatttgccttgtgttaaacccctaaggtcattcagtttcccaggttctgcaaatttgtatgtcaacatttaataatacaagtatctccttttgttaccaggcactttctctggtaatctttctatgacataatcatttccacagttgtcaatgagaatttttccctctttattttatttatttattttttttttttgagatggagttttgctcttttgcccaggctggagtgaagtggcatgatttcagctcactgcaacctccaccccccagggttcaagtgattctcctgcctcagcctcctgagtagctggtatt

SEQ ID NO: 75533 - DNA, 1081 bp, Homo sapiens
tattttgattcacttagagctttctctagatggaaatgttctatatctgcactgtttaatgcaatgatatagccactagtcagatgtggctactgagcacttgaaatacagctaatacaactgagggactgaatttatattaattggacagagcagatctagaattttgtttcaatgtaagataattatttttcccaaatgatcagtcggtactcagatacatttattgaaggatccattgttactacatttcccccaatctgtttttacatattaagttcttcacatgtgtctgagtacattgctggactttctcttatgttgatcccaggaatctccattttaaagtgattattggacagttgtgcaagatgtctgtaataatgttcatttcagcaatagaacagggaaaacctaattaataatagggtttcaatttgaagtcataaagtaaaattgtattagccatatagtacacatactgagctgaaaggatggtcacattgtattaagttggattgcagagggagaagtaagcagctaaatggtgtttgttatccaactttcattgtaaaatatgctcatgttacacatattacacacattcatgagtgtcttttcttatctgaatttattcctaaaatctgatagtgaaagtttggataatgagttcagataataagagatactttttatccaaatatatttggttttgaagttttggatagtgagttgtgagaatttagttaataagaggtgccagtattatctccacattttatccaaacctattctcttttgttgtaacagcaagagtatgagggatacctgtgtttgcgtaggaaaagtgcagaagatcaaatttaggtagttaacaccagtatgggtgagattttaagatttttaaactactttctaatgtttgtacaatgaacatgtatatagactttcaactattagttgtttcaatagaaacttctgtgtccttagaatatcacagctgatatcccaagaaactacaggactatgcaaacttgaacaaatttgaacttatttacattacgggaaatgtaatagatta

SEQ ID NO: 75534 - DNA, 1053 bp, Homo sapiens
ttcagtacattctgaagtcttggtgagcctttaacatacttatttttttcccaaaagattcttcaaaagaaaaaggaagtgtgtcaaagtaaaaagcagagaatctgattagtgtgggttttgaatcttaactttaccacttcctgtgtaatattggaggttatattgctacttgttttccctgagcactaaatgaggataataaacacaagttcatcctatcatgagaataaataggaactgaaacataacaggcattcaaatttaagagttactgatattatttttacctgttaataagtacattttagaatcatcattatttttgttaaccttaatgtagggagaaaagacccagacatttagttttcccatccaatctgtttgagattttcatattcagctcggctttttcaactgggataatgttaactcctagcagaggctaattctcttttggtttctgggtatagaggtttgctgctgtcataatgaggatccgagagcccaggacaacagcccttatatttagctctgggaagatggtctgcacgggagccaaaaggtatgaggaatcatccctccacccctaccagagaaacaatttagtatgtaaaacaaggaagcatagaattaatgtgctaaagcacatagtagaagcaaaatgcctttctttgctgaagactttattcaatgaaatgccacattttgggttaaaaacactcctataaatactgacttgggccaggcatggtggctcacatctgtaatcccagcactttgggaggcctaagcaggaggatcgcttgagcccaggagtttgagaccagcctgggcaacacagtgagactccatctctgttaaaaaaaaaaaaaaaaaaaaaaagagaaatctaaaaagtagctggatgtggtggtgcatgcctctagtcctagctacttgggaagctgaggtgggaggatcacctgagcccatgagtttgaggctgcaatgagctatgatcataccactgcagtccagtctgagttacagagcaagaccctgtctctatta

SEQ ID NO: 75535 - DNA, 1014 bp, Homo sapiens
agtcagggggtaaatctagtgccgtttgctgaagttaaaaggcgtggggagccaggtggtgccctggagggagggccgcgcgagacgagaccaaccttcgggacaggggagagcggggctactgaacgcaggggattccgctgagcctccagcccctgagcgtccaccttcggcccagctgggggacgcggtctcgggaagaaagcccggaatcccgagccggccagccgcgagcagcgagtaccggagcgcgtgggcaggcgcgcggaggcagaggcgggccggcggctgtccctttaaggggccggtctcccggcgccgccggcccagacgccaggacgtgccgggtccgccccgccccgccccgaagccgcccgtttcctgccgagcggcgcgacggcacctgagcgactgcggcggcggcggcggcggcggcggcgcctcggagcgggcggcccgggctgtagtgccggcgccgccgcgtcttcccggtctcctttcccggccgcacagggtgagggagagcaggccgcaccgggacgggcgccggcggcggggagcgcggggggaggcggcgccggccgcggggtcctggggcaggcgggagggccgcgccgggcgggggggcgcggccgcggggcccggacgccgcccgctgggtaggcctcgggcatccggttgccgccgcggggctcttgttggggccgggacgccgcagggggcgggctcggagggacctcctcggcctcgcggggccgctctgggcccgaccccggctctgtcgcggcacccggggcgcggccgagggacaccccccaccctccccaaggacgactctcccgaaggcgaggtcgacccgagcgggccctggggtgaccgaggcacctatttttagccaagcctgagggcccccgggagggaaggcggattaccgcctcctcggccggtggacggaggcagcgcgtctccggcggcgtccccgggccggagctgggccacacttacgccatgctg

SEQ ID NO: 75536 - DNA, 1065 bp, Homo sapiens
taaaagccaagactcttgccttccattttactgcctcattatattgctattcactaatcttaaaataatttacttttgctcaggatatatctgcaatataacacgcatactgtatttgaaggttatcaactacatgatggctaatatttacttttagcaggaggagttcattgtatctaaaccttttgcagaatggaaatctaattaaatgatacttggctaccaatagtaaactttttatcactgtagagtacttaccataaatcatttttcttaaaaaaagattaacttgtctgtttaaaaaaaaataagatagtaatgtgggtttaaagaaaggtaaacatggtatgaagagtgtggcacgtttggaatgccaagtatttagattcagtgtgatcagattacagatagttttttttgttgttttttgttttttttaacctatgaacattatttttacaaataacctataataatagctttcagcttaggcctcacagctacttctgtaatattttaactgtattcaaataatgaaataaagctcttataggctactctggaagcctgtatatcttaaaggtgtattcatttagttgtccagacattgatttatactggaatttttatgaaattatgcattcctgtgttgaaaattacctttccctcaacttactgtttttgtttttttcaaatgtgtctgcttgcttagtatgttttgtggtggaaaaagattttcactgtgttcagatttcagtcttgaattttgatttgttaagtttttgctaatggtttttttgagccaccccagctgataaaattgtgtcagttgaaggacagaaatattgataaaattagtttttttgtgtcatttgttttcattgtttttaatgtgaagaaaaggatagcagaagcaagagcaactgaaacactatagtaaaaaatataattcaaaattgttgtattacttgaaatttaatagtatacttatcaaactgcctcagttttttctcataatgttaacaattcttatgtttatgtatttaagcttttaaaagtttagta

SEQ ID NO: 75537 - DNA, 1507 bp, Homo sapiens
ggtgtaaagatgcaagcagttggtgactggtcttaatctgtaaataaaccacctctttttgcgtgtgtgtgcatttcagaatatgacacttttaatgaatgtccattgagttggtaatagtacctccttattttcacgtgtagtagttatcaacactgtacaataaacaaaaaagttaactactaataaagtaccaaaagtggatatttcgggaaaagaaagtaatgaatatttaaattttttctcttcaattaggatattttcacatgatttagaaatggaaggatgttttctactccttctagttaccacttgtcttatttttcatagtatatatgaattgtagttggcaaataaatcaagaatgtgatttaaagaactaacctgtttagatttgtaggtcaggttagatttgaaatgccacttgaaagagcagcagttttgactttaatttttatgagactgacaggttctttttttttttttgtccccaccttcttccctatttaggttttataggatcacattgacaaaagtaccatggagttttatgagtcagcatattttattgttcttattccttcaatagttattacagtaattttcctcttcttctggcttttcatgaaagaaacattatatgatgaagttcttgcaaaacagaaaagagaacaaaagcttattcctaccaaaacagataaaaagaaagcagaaaagaaaaagaataaaaagaaagaaatccagaatggaaacctccatgaatccgactctgagagtgtacctcgagactttaaattatcagatgctttggcagtagaagatgatcaagttgcacctgttccattgaatgtcgttgaaacttcaagtagtgttagggaaagaaaaaagaaggaaaagaaacaaaagcctgtgcttgaagagcaggtcatcaaagaaagtgacgcatcaaagattcctggcaaaaaagtagaacctgtcccagttactaaacagcccacccctccctctgaagcagctgcctcgaagaagaaaccagggcagaagaagtctaaaaatggaagcggtattgtaatctatttaatctatttaattttattgtatgatttggagcttggaattgagatattctgttaggtacatacacagaatgtttaatattgaatttgaaaccatgattattcatttcattatgtgtttgcttcattaacattaattgctggtagaaattagtattgatcataaaatagcactttaaacttcagggcctgatgcagtggctcatgcctgtaatcctagcacattgggaggctgaagtgggaggaccccttgagcccaggtgtttgagaccagcctgggcaacaaagtgagacctcatctctacaagaaattaaaagaaaaaaaaaaaaccccatacatcttataaatatccaactttggctattttacttaaaaccacttaggacctgtaaatatcagcagttacgaactttctaaatgatatggtaag

SEQ ID NO: 75538 - DNA, 1089 bp, Homo sapiens
ccacacctggctaattttttttatttttttcgtagagatggagttttgtagagatgaggtttcaccactttgcccaggttggtctggaactcctgggttcaagtgatactcctgggttcaagtgatccacctgcctcagcctcccaaagtgctgggattacaggtgtgagcagctgcaccttgctgtttattttttaagatgatagagacttgatcatgcctataggctcagtagggttgaaaatagctgaggaatgggaaaggaggagtaagtacattgaagagctggtgtagtggagtaagaaagctagaaaaagttattggtgagagcgttatatgtcagactttaaatttttagtggtaaaacattctgggaattactcagtgattgcatcttttccgttatgttcattgtttgccacaattattttttttgtttgtgtttaataaagatgaccaggataaaaaggtggaaactctcatggtaccatcaaaaaggcaagaagcattgcccctccaccaagagactaaacaagaaagtggatcagggaagaagaaagcttcatcaaagaaacaaaagacagaaaatggtgagatgtttagatatgtatttttataatgctaattctagagaagtacaccagcacaaggaccctggaatctcacacgctctttagctcccagtttaatgtgtgctaatgacaactgtaatactaatgcaggtctaaaattatctttagccttatgactttatagcgctttgacagatgggcagggtgtacatttgagatgaaaaagtttatataccatttacaaagggcaaagcatttataaatattcttaactcagttttgaaaaaataaatagcatacagaccatagaagaaaaacattcttgaaattttgtgctttttaatatcacttaaaggtaatgcttaaggacattagctagatctggcattagcttacatttccaattaattcctaaacagaactcacatgtgtatatggcaagcatcagattataagagatggagcaatcttatttgttcacagttttccagggaaagcttggctgtgaaatttgtga

SEQ ID NO: 75539 - DNA, 1177 bp, Homo sapiens
caagtgtagatgtgccatggaaattagaggcataactcttcagaaatgagaagctatctgcaaggagcactgtggtttttgcacttagcaagtacaaagaacttgtttaaaaattatcaactacagtaagttggtaaagtaccaacataaataaaaactaatagttttccttgagcactaattaagtggaaataattcttatattaaaacaaaaattaaaggagacttaaggatgcataaaaagtttttagataccattagaggagatatgctatacacttttagatgatttaaatgatttactataaaataagactgttgagctggtacggcttcattagaatgagtgttttgacttgttaaatgacgaaataggaatttaaaaccaatttgagctaccagtaaatgtttcaaaagaactgcatttatcattaaattatgcttgcatgtcatttactctgttttgtaaaaattctaattatgattttgttgaacttaaattgcagtcttcgtagatgaaccccttattcatgcaactacttatattcctttgatggataatgctgactcaagtcctgtggtagataagagagaggttattgatttgcttaaacctgaccaagtagaagggatccagaaatctgggactaaaaaactgaagaccgaaactgacaaaggtaatatatgggatttatagtctttgttgtactataaaaacacatttctgagttctgatggagtcatagatttcattttctcatagaaacaatgcatttcaaaagaatcaaatccttgtggtagaagacttattggtagtcttttagtccagcctcctcagttttgtagatctggaacttgaatttgactttttaaaggtcctacagctattttgctatctgatgattatttcccagctactactgtctcctgtgaggtttcttggctaattcataactgttgtttttttttaatagactgttttttttagagtagttttaggttcacagcaaaattcattggaaagttcagagttcccacatatcccctgtttccacataagtacacaactaccttttaaaacttataatttagctgaagtattaaaagcccgaggctcctttgagtctgatgggtggcagctctttttaagaagaggttgttaatgcctaatacgaga

SEQ ID NO: 75540 - DNA, 1117 bp, Homo sapiens
gcatggatttttaaaatgtcaggatggtttgcatatatttgatcttcatagaatcagatttcctttttacaattatcttagaacttattttctcatgtgtggaatttggcttaatatctctcaggattattttgtttttcacagttggttgtcagtgtgcaaggattattaaagttcattgagattattgtgaatataatagtgcagatattagcacatactagacacctaagtgatttttttttaaagtgagggtatattggcattttagtattttgcagtttgagcaaacttttagctaatgtaattattccgtattatagatgataaaccctttttttcctcttgactggagtatttgttttatttaacctgaagtatatatctgttttctttcggttattgactttctgggccgtgaattcttcatgcttacctttgctgaagttattatttgtgttttttaaatgccaactctttgtttgtttgtttttttcaaattaagaaaatgctgaagtgaagtttaaagattttcttctgtccttgaagactatgatgttttctgaagatgaggctctttgtgttgtagacttgctaaaggagaagtctggtgtaatacaagatgctttaaagaaggtaagcgtgttttttgattatgggcatattcatgaccagtcattagaagttcaccaaacaagactttagccagagcaattaatatctactcccatccttaacatctcagaacatacatctggaatgccttcagaaattactttatatatcgtattagtctgttttcatgccgctgataaagagatacccgagactgggtaatttataaagaaaaagagtttaaatggctcacagttctacgtggctggggaggcctcacaatcatagtggaaggtgaaaggcacgtcttatatggtggcagggaagagggaatgagaatcaagcgaaaggggtttcctcttataaaaccatcagaccttgtaaggcttatttactaccacaagaataatatgggggaaattgcccccatgattcaattatgtcccaccaggtccctcccacaacacatgggaattatgggagctacaattcaggatgagat

SEQ ID NO: 75541 - DNA, 1343 bp, Homo sapiens
agacatcttatccctatttttttcccttaggaaagagaattatttccttctaggccttttttccctgaaagagaacgtgtacctgggaatgatagagaatgaactgttgtgctttaaaatgttctttcgtgtaatcaagttagaatgtaggatttattctaggttcatagtctttaactcataataaactagaaagtgcatttgaattaagagtaaacaacagtggcaaagtgtttatgaagggaattggcgtgaagagcagatgagatgcagaagactgtttttaaaatcttttgaccttgctttttttaagcaagtacttaatgttttatcattcatgattattttactgatgttaaataacatcattgtttatcattgttgcaggcttatgatacttattaaataacaagtttttaaatttctgggatattcttttaggaaatgatgacagagaaagaaagaagcaatgtggttataacaaggatgaaagatcgaattggaacattagaaaaggaacataatgtatttcaaaacaaaatacatgtcagttatcaagagactcaacagatgcagatgaaggtatattttcattctttggaaacaagatgaaatggttgcattcactttattagcaaacttttaagtggctagtatgtacaaggccctttcttgggccatcaacatacagtggctagtgaagttcactctgcgtcctaagtaaaacaacttttctaggtggggatgaggtagggaggccggatgcagataaatatgatgatagagataagtattggcgactttagagcaatggtgatgggaggtaaggaagaaaaggatttgatagggaagactttttagaagtgatatgcagactgtgttaaatcttttaaatcaattaggcattatcaagtaagagagtaaagaaatgggcactgaggataagagttacttggtgtgatttcttagtccatctctggaggtgatagttcagtgggtatattttgggacccaggactgagctttttaatgagtgcactccaggtgttaccagtacagattgtctagagtaactgctctatgagaaatacagtaagagttgtggtatttggtaatgagggctggaatgaagaagggatattgagaagtagatagaggccccatcttaaagggccttgtatacctgaagactggggagccagtgaaggagtttaagcaacgcagcagtcgctggaattatactactattttaaattttcaccttggtagcagtggggaaagtggagcaagggatagttggaacactttgctagaattcaagtcaaagaacaagggcctgaaat

SEQ ID NO: 75542 - DNA, 2058 bp, Homo sapiens
tccgtcttgtatttggtaccagatttttttttggtaaaatattgctttgataatatcgctagtctgctaaaaattttaaaatattctttgctgctttcagagtcccagtgttttcctctgaaatgccactaatagcaaaaaagaagtgaatgatgctgttttcatgttcttaccctatccactgcttttagcatttgtttaactcattccttcatcttctcatcccccagcaatttgagttagtgaagaactgattttcctagcctcaagtgatcttttcttcttaattcctaattcctgttaatttgaaaattaggcagatacttgtagcagcatcttttgttgaaggtgaaaggtatttaagtgattcatcctgttttacttgattacttacagaggtcaggatatagattccatatgataacttctgtgaaaaatagaaatgtataccttaatttcccttaataagcaacagtttcttttgaaagaattattaataagattatttcatacaaaaacatgttcttatgagaatataagagtcagtgtgcctttatctttagattctttaatccaaaatttaaaaattagaagaagaaagttagagtggtggtcgccaggggctgcagggagaggaatgggagttattcgttaaaaggtgtagaaggtgttttacacaatgaagagagttatggagagatgaatggtggtcatgattacacagcattatggatatatttaataccagtgaactgtatacttgaaaatggttagaatggtacgttttatgttatatgtattttataatgtaaaaacttggaaaaaaaattaagaggtcagaatattttagcaagcaggtttttgtgttatctatatgattatggcccaatttgtaacttaatataaagtgtaccaaacatattttcagtttttaaactttggcttactaaagactttaagaatattgctaatgtataattgacataagatcaggacaagcttaattttgtatgaatctattcggtaggaaagaaatcctaaatcatatttagttctgaaacatcatctctaagcatgtttatcttgtatttcaaatatgatagcagctagcatctacttgtattcttgaatgtggtgacagtttgtatttgatttgcattcatcactaacaaaatataattcttttaaatttgtttatatttatttgagaagaatgattcaaacttcattctattgatgttttttatattctcattttaataaagtttattttaaaagttagctttgacagtctttgttttctaagttttatgtgtgtaaaataattttagtttcagcaagttcgtgagcagatggaggcagagatagctcacttgaagcaggaaaatggtatactgagagatgcagtcagcaacactacaaatcaactggaaagcaagtatgtttccaaataccttattttttaattgaatggcagagtattttcttgaatcatcaaaatattaatagcgtttgatagtaattggttagacttttgtgtttttacatttgtttctaaaatgagttacttttaaaaacaattctcttttgctttgtgaagaacttcttcagttatacatatgtaaactatgttatattaatgtcatactattatatacttatacaaatacattaatatatatcatatattacatatttatataaacatgtatgtgtatattgtatataaactatgtaataaatactagtaccaccaatggaatggtctacaagcttatgagtttataagttttaaaccatctgtcccctttcacagtagctcccaaacttcagtgttctgaagaacacctggcattctaattaaaaggtgtattcttgagtcctccccttaaaagattatgattcactgactctgaggtagagcccaggagtctacatattaagacactttcgggccgggtgtggtggttcatgcctgtaatcctggcactttgggaggccgaggcaggcggatcacctgaggtcaggagttcgagaccagcctggccaacgtggtga

SEQ ID NO: 75543 - DNA, 1127 bp, Homo sapiens
cgggagacaggagaatcgcttgaacctgggaggtagaggttgcagtgagcccagattgtgccactgtactccagcctgggtgacagagtcacactccgtctcaaaaaaaaaagacactttccttgtgatagtgattggctctgaggccatactttgagaaatagtaccttagagagactagtaataccggtacacagtaccctgactggctgatttttaatacgttttcagaagaccagtttgaaggtgacactatttatggtcatccatttttcttgatattttacagtgattttagaatttgaataactcattagaattatataggaattatacaactaaactttattgttagtagtcacttgtgttctgtttcagttgggctgtaaatggaactactagctcagctcagcaaaactaacaaagtatgttttgtttatttcttatatatatttgtaataacggaaggctcctaatccagttactgttttcaggcagtctgcagaactaaataaactacgccaggattatgctaggttggtgaatgagctgactgagaaaacaggaaagctacagcaagaggaagtccaaaagaagaatgctgagcaagcagctactcagttgaaggtgatatattctcacctttatttgtcatttcatgaataatataggcgtattagttcgttttcatactggtatgaagaactgcccgagactgggtaaatttttaaggaaagaggtttaattgactcacggttcaacatggctggggaggcctcaggaaacttacaatcatggcagaaggtgaagaagcagcaaagcatcttcttcacgaagcagcaggaaggagaaatgccgagcgagggggaagactcccttataaaaccattagatcttgtgagatctcactattacaagaacagcatgggggaaaccatgcctatgattcagttacctccacgtggtctctcccttgacacgtggagattatggggattacaattcgagatgaggtttgggtggggacacaatgcctaaccatatcagtaggtatttaatttgatgacttaaatgtgtatataggtttgaaaaatatagtttgaagcttaatgggacctgtagtctaa

SEQ ID NO: 75544 - DNA, 1890 bp, Homo sapiens
catagatacggaagtctgttctctgtggatatggataaataaatgacattaaagattatagtcatgattggagtgttgtgttataaaaatacctcaaaataagaatttttagctacttagatttagcaataaagacaccatcctgtccttcggaagcttatcagctaaaggaaggttagtgggaaacaggttattgctaagtggatcagatgtatatagtagtagctatcttgatagaaactcagcacaaatattgagtctgaaataatctccaaactgtaaaccctgtaatgttggaggataggatggctatggctgataaataaatggcttttagactgtgtgtatctgcttgtcttattgaaatgtaggagactagttgcaataagcagttttatgatacaacagtaaaggtagaggatgctttttttccctctttttcaaagtagaaattctgtgtttgtgctaatttatcctttctcccttttaaaataccaaggttcaactacaagaagctgagagaaggtgggaagaagttcagagctacatcaggaagagaacagcggaacatgaggcagcacagcaaggtaaggggaagaagtattcatgtaaactttgtatataattttgggtaaaatttcctctctcttccatctgtgaagaaagtataatttggcattttggttatagctcaataaaaatagcttttatactttcagaatatctttctttctttgacatttgttagggttttaaaataagttacctactagctttgcctgaagcattaaagttgcaggcaaaattatagtacatgataggttaatgggatcctggctgtgtgtgtttcttttctgtagttattctctttggttctttggttaattcttttttttttttcccaagaaaatactcacttcttattttgaagagaaaaacagagcattaccatcccaggtagtttacttaaaactgcccatttaatacatgctaacgtttactcatttactcttaatttgatggatccatctgggagataatggagtacgtgttatgtgtattgtttatttctctactactccctttctcccatgaaacgcaagtatagcctgctacaggagcatgcaagaatggaagcaggagagattcaaagaaggttttctagaggagagaatgcctacacgaaagatgagtatgagtaactaggcaaagaaagagacctctgtaaaatgtaatgttttattacagatttacagagtaaatttgtggccaaagaaaatgaagtacagagtctgcatagtaagcttacagataccttggtatcaaaacaacagttggagcaaagactaatgcagttaatggaatcagagcagaaaagggtgaacaaagaagagtctctacaaatgcaggttcaggtattttttcttctttttttttttttaaaaaaatacaggtggtcacttattagatctgtgtgtctagaagagagactaaagtctaccttatcctaattctgaaatgatgatgaataattataactttgtcttttgagcacttgtcacaatatggtgtgtttgaaggtgtgctcacccacagtcttaggctctttgtgttagattaggaatagcacaaacatatctttaacttctgtcttataagctaactcagattgtctaatcattgtttaaaataatgccttttggaatctaagaatgccttaaaaaaaaaaaagaaaaagataaacaaatgtacctataatacattgtgttcatatacatggggttatttattagcatgctttttctctttttggttgctatttatgaaaggatattttggagcagaatgaggctttgaaagctcaaattcagcagttccattcccagatag

SEQ ID NO: 75545 - DNA, 1020 bp, Homo sapiens
caggtaatgatgctttcttattgcttatgattaataacttgcagccatttaaacactcacctgaatgtctgttgagtgccaattactggattaatagctgggagactagtcaatgaatcaacaaatgatgatcctgagtgctaaacacttgctaattatgtacggtgctgagggaaaacactaagaaagaaatccataccaactaattggatgaggggaaggttagagagcttttattatacaaaaatgtccccaatcctgtcacaaaacaaggagagagaattggccaaatcctatctagaatagtggcttatgtattacagatgttcattaaatatcagctagctctggaaaatcctaatatatcagcagggggaacagtatggtaaccatagatcacagattatatttgcaaaatgatcaattgaaaatttgtacctcagtttagtgactcagccttccaaagttttcaagtgatagtgtaagacctgttattctttgatgtgacatacatgtctttataaataatataaagaaaatcaaataaaaacaagtattgtgaattttgagcttcagtttttcaacttgaaaattctgagagttatttgtagcaaaaagtattggcttagaagtctgacatttctgtataaaaagtggtttttaacattaaaattttgtttttaaggttcggagaagttcagactcccaaagctttgaccatataaatatatttttcccagttgctttatctgtagaaattatagtctaaagtaattgaggaagaattaatgcaggaaagggtgctggtgtggatgtgtatgtatatgtgaattaccaactcagattgaattgtgatctttagttatcagctgagaagtagctctaaaaaatttatcaggagttaaatacatagagaatgctgtaagaatcttttaaatagtaaacatgaacatgggtattactaaactatattagtcatggaatggataattttattattaaaagttgttactaaggaga

SEQ ID NO: 75546 - DNA, 2895 bp, Homo sapiens
aaacattatatattctgcttttatttatgtttttattataacaagagttggggagactttcatttgagtgttagcaattatgtggaagaggtaattgtttagaaagtagtggaagtaaattagtttttgtgtcttataagtagttgtagttcttctgtgtccagctctgtggtagtatacccaaaacaaagttatatgctttttttgtgccgtataattttgcatggacactgatcacttgagttcggaagatctgaaatctggttttgacatagctagctttaacaaattaacctcttttatctcgagttttaaaacagggttatgtattttaaggagttatagtaatgtgtgtgacagttgttagtaaactgaaaggggctatagaaatggaaggtatatgagaactactgaagtaaggatgatgctttttaaggctttaaatccttttgatttgtgacttctgaatgtttattgaatgtacaaatgtctttccttctaaaggattgcagaaaaggataagcagataaaacagactgaagattctttagcaagtgaacgtgatcgtttaacaagtaaagaagaggaacttaaggtatagtaatttgtataaatggctgcaatattttacagaactgaaatttaaattactttgatgcacataatcagtaagtgtatatgaaaaatggaaaatagtctagaattcatttgaaataactgtttttctaaactacaaaattctctagctctctacgaggaaaaattcaaagggcttctctcatgtgatataatttacaataatttgataggaatatgctaaataacaggaattggtggtttctcttgattatttgggaaattttgtaagttgagacatttgcttaactcttttgtagaaaagatgctttacaaactttaaaatcagttgtattaagtattttaaatgctatttttccttgttctaggatatacagaatatgaatttcttattaaaagctgaagtgcagaaattacaggccctggcaaatgagcaggtagatctttattgcttttgagcattgatctcagaatttcaatttgcgtattcttattttcattgatattgtgagccccaatttgattgtgtaagtaaaaaatataatggtttatcatctttggctgcatgatttgatgttactgtttttatgttgaaataaatgtttgatccagtgaattaatcacttcaagatatcacaggaggcagttaaaattatcttactatgctggtttgtttgagtcttttatttgagccatttaattcaaaaaggatatacctttttgttagtgtatatgaagaatggaaaatagtctagaataaaagaagtaaaaaatatcgaacagcaaaacatgttacagaaatatacagtattgctgtaacttcaaatatatggaaatacagctttttaatatgtaaaaattagtgaaaaaaatagttttgagcacttcctgtgaagtgatatcattttcttctcattccacacacaggctgctgctgcacatgaattggagaagatgcaacaaaggtgactaaagtattgtacatctagtcgttcatacatttatgtttaattataattgttgcagaaaatattgctgcttataactgatagttgtgcccataattcttgtagattttctgaatgtatgaagtattttaattttttttttcaccctcatagtgtttatgttaaagatgataaaataagattgctggaagagcaactacaacatgaaatttcaaacaaaatggaagaatttaaggtgtgtgattaagcttgtacactcaggtttcttagaacaaccttgtatacttttcagttgagtgattccagaaatactacgttttgtatgaagtcactctgaaacagtgtttctgtagtttattaggggacttatgcaaaccatgaattttatcatagactttccccctagattatctgttcttttagtggagcttggagatttatttttggcccccaatcttttctcagctgatagtttctatttgggactgtcttatttgtctccactgttgctgtagttctagtttctggtcatggccaaccaagtgctagggtgcatctctgtgtccagtgaaatttgaattatgtcagtgtataattcacctgtcactttgaggactgaaagctgagataaaggtttgattgttcaaaaacccattcaaatgattgctttattaccttttttcttaataaaacagtaaattgagactctttcttccagattctaaatgaccaaaacaaagcattaaaatcagaagttcagaagctacagactcttgtttctgaacaggtaaggcttttcctaaattacaaagtagaaatacttgttatataacaagatctggttcttcttatttaggtaccaaattactaattgagaaattttgcttaagcttagatatggctgttattgcctttctattcatcctgtatctaaattcaggaaattttttctccctgaggtgaagctaatgccaatctgctcaaaagcacattccagaaaaataaaaatgtgtaataggatgcataaaaataatttaagccattttgatacatttgactttcagaataaatgtcctgccttagacttggagcctcagctttttcttttagggagcatggtgtctttaaaggttgaaacttattactagcacttaaaagcagtgtgatgttgatcaaatagcttaacctttgtgacacctctcattccaagcctttcacatggagattatattatatttacaccataaagttgttagatttgaaaggagaagcttatgtatggtgcctagtctagtgctttgtttatgacaggtatctaaaccttaattct

SEQ ID NO: 75547 - DNA, 1063 bp, Homo sapiens
agtagagaaagatttgctaagacctaattatgaagggctttgtatgctgtgtcaggaccatgaacctgatgcagcatgtgggtaagccactaaagagtgttgcaaggataaatgagcatttagcctaacattttagaaagaatactctggtaggtaggagtaactaaaggtacaatacagtaaatggttaaggtgcaggtaacttagacttaatagtgttatgtctttttgtgagatggcattcattgaaaatatagatggacaaaagccatcttcatgaatgatttaaaggcttaatgcatgatttgtttttcatagtataaacctgatttaatgtacttttgacaactcctatttcccttctcatgtttggattattttttcccattgggaagttttttcctgtgcctcctacaaaacaattcttatgaactagaagcagagagaagaattagggtattatgatatttgagatgagtaagctgagggccaaaacttaggcattaaagagaagggtttaatttcataaatatgtacagagtggaattttaggacttggatagggcagtggaaaaattaatatcatttgtaaaaaatgattgtaataagattgggaaaaacaaaaaaatgggaaaaaagtaagaaactagcaagattgggaaagaggtgcacagaagagaatgttctaggagaaagaccctaaatctttttggtcaggctgcttggctgtctgaagataagggaagataagggaatactgagggagaaatcccactttggacataagataaattttaacattggggacttgtgtgtgtaccagaggatgccaggagaagtttcaaaggggactcatcttacatgtcatgttctaatgctttataaatagaatgtattcctgttgcttttgcaatttacaatcagttttaaaacattttatatcttgatctggttggtagttacataatatctatctaccaaaattcactgagctgtgaacaggatttatgcacttgtctacgtaaatgttacaccttagtatagaaaaaaaatcaattaaaag

SEQ ID NO: 75548 - DNA, 6567 bp, Homo sapiens
ggctgaggcaggagaatcacttgaacctgggaggcagaggttgcagtgagccgaaatcatgccattgcactccagcctgggcgacaagagtgaaactctgcctcaaaaaaaaaaaaaaaaaaaaaaaaaaagagccaggcatggtggctgatgctggtaatccccagcactttgggaggccaaggcgggtggatcatgaggtcaggagatcgagaccatcctggctaacatggtgaaaccccatctctactaaaaatacaaaaaattagccaggcgtggtggcgggcgcctgtagtcccagctactcgggagggtgaggcaggagaatggcatgaacccgggaggcggagcttgcagtgagctgagattgcaccactgcactccagcctgggcgacagagcgagtctctgtctcaaaaaaaaataataattataataataatatcattaactttgaaaaatagttaatacatgtgttacaaatttataatttcagcattcaagaaaaagatgagaagttaaagactgtggaagaattacttgaaactggacttattcaggtggcaactaaagaagaggagctgaatgtaaagcattttgtagttttgttttccttgtgattattcagtgacataaaaggatttctctgtaatttgtgtaaggtttttcccatagatcttaaacttaatagtacctctcacatttataaatttatataatgcttttttaattaaagtttttttagaagttaaaaatgcataacattgactgccttaatgaggtagatactattgttatagtttgtcagtttccccacttgcaccaaaattataaccaaatgataactagcagacttaattcatgaaatagtactggaggccagagaagagattgccattctattttatggttgtcattagctttacctaacttgattgggaaaaggttgcgggaagaagtaagttaaaagatgtatttgaatgtagggagaggagtagcttaactaacaagttgtatactgtatatttttgaggttgtccagacatgagtggaaatatatgtggatgtaattgaattaaaaatttgtttggatagctatagaagttacagaattatagacattacagaattatagacatggaaaaaagtgagagttttgggccttccagagtagaaaagaagcagctaaagaaatgagaaactaatgtattttgaagctagctatatttttcagagagtaaaatcatgttttgcttatgtgtctttgaaaaaggcaataagaacagaaaattcatctctgacaaaagaagttcaagacttaaaagctaagcaaaatgatcaggtaatgtaaatttttacaactgttctttgtctctgtgttttttgtttgtttgtttgttgtttttaaattaaaagaaacggggtcttgctcttttgcccaggctggagtgcagtggtacaatcataactcaccgtaacctcgaactcctgggctcaaccgataactcctccctcagtcttctaagtagctaagactgtaggctcatgccacaatgctcggcttttattttatttttttgtagagatagggtctcgacatgttgtccagactggtcacaaactcctggcctcaagtggtgctcccaccttagcttcctaaagtgttggaattataggcatgaggcactgtgcccagcccattctcttttaaacagtgggcaaactgttgcataaaaacaagtctgttgtttctcttcctccaggttggaatatgtcaattatagttttaatttatgaatgataatcagtaatagaggctgcaatttaatactgattgccaggtactgtgacaaatactccagatagggtgccattgcctcttactagagtgataaaaaggttctaagtatacaaatataaagtaagactctagtaaaagaggccgcctgaaattaggcagtttcttagttgtgttttctctatggttggaattattgattaaataattttaacatttatctaatgattttttcttttggcatatttataagtgaccttaaagctacctatgttcaaaatgctatttgttgtcattattatgacattaaaaaagtctcgaaagaatgcctgggcttttcccatttggattttgattgtattggaaaatctaaggataatgtgcatttctatttctgacccatttctattttgaacaaattactaagtaggatactttcctatttccaggtttcttttgcctctctagttgaagaacttaagaaagtgtaagtgataacattattataaactggtttttcttctttggtccattttttttttgtgtgtgcttagaaatctagttttattgtgcagttgggacagctgatgtatgtttaactttcactctataatttttcttaatggaataagagaacttagctgtgctttcccaaattcagtataattaaaaaaaaaaaaacaaaaaaaaactatttccagaggatgggagtcagtatagttgaatggaacttgattctcctctgtattcctcagggtacaaatcttatatttctgatgtacttctgaagcacttaactgacttcttgtgtgcataggcttcagctgtctgttaggaggagctttatgttcaccctggccattctacaaagacatgttgctattttatttaaaatgggaaagggttgatttggagagccatttcattatttggtgctatttttatatcttggtgggtcttggtgatttctaatcaaattatactgcatttctttattgaaggatccatgagaaagatggaaagatcaagtctgtagaagagcttctggaggcagaacttctcaaagttgctaacaaggagaaaactgttcaggtattgggagacagagaactgtgttttatgtttttgtttatcaactttagttaatatcatttaatttcgtgtgtttttgtctgtgcattgcattttatgtcaatttctgtgtttccattgtccaatcttgtctgttttgtcattgtcaaggatttgaaacaggaaataaaggctctaaaagaagaaataggaaatgtccagcttgaaaaggctcaacaggtaaaaatcccagagccatagcatgacagatttattagttgtgttatttatgagctatttgattttttttcttgttactcagaaaaaacttagtatgctgtaggtatattgggttatgtgcttttaattttattttttgcctgatttgagaaagtattcttgatattttaatctgtatatcttaaaaattttaactgttaatggttattttctagaacattttttgtgttaatgtttcattttagtttgccaattacaaatgaaacacgaaacagtttggcaatttttttaatccccctgcccccttctaaaagaaaactgcatggaccaaaatgttatttgaatatacattgctctatctctgccttagaacaaagtacaagtttcattgggatttcagacatagatgtgattactggaaattgatgagttttgctgattttaatctgataaggctttcttgaaaaaatagtgagatttcattgaagagatgattcattcatctcatagattcattcagcaatatttattgtcaaagcagtacttgtcaaagcactgtactcgtgattggtggatcactagctagtgattggagataatgtgttgaatgaaacaggtaggatgaaaagatcatacttttctaatatagattgagagttcaggaaagtcttctcctgaggaactgacatctaagccaagaatctgaagggcctgtgagaagagagtggaggataaaaggtattatcagactgtgtatgattaagaaaaaattaaaaaaggacatcatagagtactgttgagtagttggccttgaaaactgggatggagaagagctctgatacagtagggaggtgtgtggagagttaatattctaattttcagtactgtagaagtatgactggtctgagtgcagtggtgtttacaactgattgatcacaaccagttacagatttctttattccttctccatcccactgcttcacttgactagcctaaagaaaaaaagcatcacattagttagacttattattcataactattttccttgtccctcccccttattatttttagtttattaattttcctgttattggagtcaagaggaggtaaactcaaaacacatctcattttgtcatgaaaaattcagctagtttctttgtaatttgaagtgtacacattataaagacttataaagcttaataagttaaattgaaaggattattaattgatttttctgtcctttgtatttcagttatctatcacttccaaagttcaggagcttcagaacttgtaagtaccatttatctcatttccttttactatttctttttcatgagttaaatagaagtataatgaaaattatagcttcttgatttcaagtggtgttttagaaaatacgaaaatactgattatctcaaaactcctaagggccctaagtttcttatttggctttaacctattaagtttttttgtgggaaggaggtaggaagtcttttcatgatttataatctgaatataacctcaaattgagatgttgctctttgcctattttaatagccatgtgaaattggtatcttccacatccagatcaattgtagtaagttttccaaatttgtttgtattgacttaaacaaggtgatacagggtagaggtacagctaaactaacttactcatgtctggatattcagtgatagaatggttttccttaatcatcctatgcttcctgatttgattgtctccaaaatcttaaatgcctttttttttttttttttttttttgagatggaatctcgctctgtcgcccaggctggagtgcagtggcatgatctcggctcactgcaacctccacctcccgggttcaagtgattgtcttgcctcagcctcccgagtagctgggactacaggcgcgtaccaccacgcccggctaatttttttgtatttttagtagagacggggtttcaccgtgttagccaggatggtcttgatctcctgaccttgtgatccgcccgccttggcctcccaaagtgttgggattacaggcgtgagccactgcgcctggccttgtatgcctttatacttgataagttttagtttagttcaatcagctggtctgtgagtactacccaaaatatacttttttcagtgtctaagatttttgctttttatggtcatgtaacattttcatttagagttctgattaatttattatcagattaaaaggaaaagaggaacagatgaataccatgaaggctgttttggaagagaaagagaaagacctagccaatacagggaagtggttacaggtgagaaattaaaaacaataaaaaatagcctttttatacttgactatcaatttaatttacacctattctttttaaggatcttcaagaagaaaatgaatctttaaaagcacatgttcaggaagtagcacaacataacttgaaagaggtatagtataaacaaattaccaacatgttacataaggaatgataaatctttgtttaaggcattagaaagtaaagatgttaatatgttctgagtttctttgccagaaaaattatgttgtaccatagttttgttgttgtttaaataagttagcttttatttctggcaagtcatacttaactgcttaatctgtcaacctgagcctacaagcatttccttatctctaccttttcaaatagactcttagttcatccttaactatctgtttaaagtattagtctttaatcttttaataagtatgaaaaattgtttaataaaactcattctgtccttgctttataaatgacccaatcttaaatttactgcatataattatgtttttgtttttattggtgggtgattccatatatatgttttagcacctacaacataacatttaatgctaacagcattaaaaatatgattctgtttctcaggcctcttctgcatcacagtttgaagaacttgagattgtgtaagtatgctttaagaccacattttgaagagaaacaaacgtctcattattttccagggtgtgcttgaatataatgatgagtttcctgtacatcattaactttattgttaagtggaaattataattccagacgcaaataggctaagtctctgttgggtaaaataaaggttatttaaatgctttcagatacctggagactttatcctttccaaatccatcaaacccattttttcaattattctttctgcaaatataggctggttttaagttattttttaaaacaaaatatgcaattattatagagattaaacttatttcaaatgaaaattagtatttgaattagatgttagtaacatctctgaattaaccaaaagataatcttagccataatcttgataatgaattttaaacctttctgtaattttaatttatttatagggaaaatggaacttgtcatattatcctgtgctgaataggaaaactgaatctagtcagcataa

SEQ ID NO: 75549 - DNA, 2005 bp, Homo sapiens
tggtgttatgctagcggtctattgcttaggatgaccagggcaattgagattcacttgggctagatagagtaagatttacgtcagcattgggtaagggaaaaacagattaaattatccatagcatctcttcagtacaaaggttagacatattttgtaatttccagggtcaacaaattatgactaagattcttgggggcaaaactccttgcttttgaagtggtaatttttgcaacaatttgataaaatatagttttgttcttagtttttgttttagagtttcttcctagataaagccacatttgcttaagaaatgttaagtatgactgagtagaatgatcctagaaatatctttttaaacaaacttctaagttggtataatatgggggaaaaaaagctggtatgtattgtttctgccatcttttttcttaggggtgatattggagtctggttttccttttttatgtactttagttaatgcagatctttgtaaaaaattctaggttgaaagaaaaggaaaatgaattgaagaggttagaagccatgctaaaagagagggagagtgatctttctagcaaaacacagctgttacaggtgaatatggtgacttaaaattaattattttgtaaattattgtctttgcatgctttaaaataatttttaactgctgccaaaaaatagagtacagaatgagtctccctcccacccagatactaggtgtcattattggcatgttttttgagtaagtacccatgcataaaatgtgtgtatgtatgtatacttgtttattaaatactctgttgaactatactaacttgtatattttgctttcttcacaattaacagtgttttcaagatctttccatataaagcacatttctgccttaacttttaatagttttatgatattggatggttatatcatttattttatttttatttttgagacagagtcttgctgtgttgctcaggctggagtacagtggcgtgatctcggctcgctgcaacctcctcctcctgggttcaagccattctccttgccttagcctctagagtagctgggactacaggcatgcaccactatgcccagctaatttttgtattttttagtagagatggggtttcagcatgttggccagactggtctcgaactcctgacctcaggtgatcctcccacctcggcctcccaaagtgctgagattataggtgtgagccaccgcagccagcatatatcatttatataaccaattccagttgatggatacctagattatttagggctgttttttctgcacaaacagtgcagcagtgaatatccttgcacatgttttgaatacttttactagtgttatctgtatcctagaagtgaaattctggatcaaggcttatgtagcttttttgtttgttaaaagagatagttaaatagaaaatcaatatcttaccttcatgcagttagtattcaacttacttacagaagattgatttgaagtcatagcaaatgtgtagatgcctacattgtcttggattaatcttgctcacattacatgcttcaaggtttgagtctaccacattccttctccctctcatgtaggttcattttaaattttgttagacaatgctagatagacctgcaaaagtgttttcactaattgacactctcaccaactaagggccatttcaccttcttcctttccaacattgacaaggataaaaatttttgatattatacttgaaagatggtaagattatttttaatttgcatttgactgcgagagaagttaagcatttttcgtatgttcaagccatttttatatgaattgtcctttaatttttcccacactttttccactgagttgacgttttttttttttttactaatttgtaagatcctttttatgtaataagggaaattaaataaccttttgttattatatgaggtgatttattttccccattttttcttctgacttcatttgtgtttttcccctttttgggaaatttgaaactt

SEQ ID NO: 75550 - DNA, 1030 bp, Homo sapiens
atattatacttttgttgtgggttagccatttaaagttataactgattcattgccctctggaaaaaaaaatatatttaagggactgcttctacatcagttttaactcctctaaaaatagctactgtgtactgacccaggtaaaactataaatagctacaacagttcatatcttcataatatgtttcttaggggatgagatttctctttagcacaagcctgagcataccatattaggcataaaaacttatattagaaatcatttctgaaattcataggatgggctttgtatggtcaacagtaggtagactctttaatgtacttttcaaggtgctatctcttgatatttttattttgtaatagcaaatgttgataggtagggatctaagttgtattactgtttacctaaaatcttgctacatgtattcatgttctggtttagaatttcagaaagagagaaagaaataagtggtctctggaatgagttagattctttgaaggatgcagttgaacaccagaggaagaaaaacaatgtaagtagatctttatcagaatgaagcttttctttttattactttaacactgaaatatggttcaggaattttttttaaatctacttttactttagatttcttaatctttgtaagaaagtactattttctgtgtgtagttttttcggggggcggggcattattggagaacagttttttttaaataagtgaaaagatgaattcttattcttataaatatttaaatgttgaagctataattattatacctttagttattttaaaaagctaaaaatgcaattgactttttgttgaacttttatttggaaaaacatgtttttcagcttggtattttaaaatcaaagatatttcctcttagattgggctggcctttttgtaaactaaaagtaatgccagtattcaaacccagtatactcagtaatggggtcttttgaaagccttctggaacctcctcctgccctttttttttttttttttttaagacagggtctcgctctgttgcc

SEQ ID NO: 75551 - DNA, 4905 bp, Homo sapiens
acctcatggggttgttgtaacggtgagaatttgtgaactgccaagtacagtggttggcatatattaagtaataaatggtgattattggctttttatttttcgttgttggtttttatctgtttagatttctcattctgaaaaaaaagactgaaatatagcagattatatttgtgaatgaaatgctgttaaaatccagatctctcaatttttaataacctctttcgcctccaagagaatctattttatagccttccagccttcccctttgctttgatcaactagctcatacaattcatgtaaggttgttttgtggcatgaatgtttggccatgccaagaaagacataggacacagtgggttactatgggattcctaggtagatttgaaacatgttaattgtattaaaccatagagaaaaaacgttacactgcagtggaaagtcctatgagtgttattgggcctcgtttaaacatcacatgaaaagctttttataatacttctatatttgctctgtctttaatcttctaatgttcaatgtacctgaaatcatgtatgtattcttggtttgtgtctttacttttgaatgctttcttctttgtcacatgtgcatagtaattattttaaaagctggcctatttgatatatatactaaaacatggaaagtgggcgtctttattttctcattcaaacttctaaacattgctttttatttttttgctaatatgcatattttcccattgaaataattttgcagtaaccagcatttaaatgcagtgcaaaatactgatgaagtaaaaaagcaaaaatctttcaataatggataaactgaaatcattctttctaaaaatgattaggaccttcgggagaaaaactgggaagcaatggaagcattggcatcaactgaaaaaatgctgcaggacaaagtgaacaagacttccaaggttgtaatgctaactcctagaaacaatccactgaacagagaaaatctgcagcttgtcttaaaatcagactaaagcatttacttttactgcaatttaaatataaaatctccttatccatatttatcatctctatcatctctgcttttttcatctactccttgaagctttaattttgggcatgctgatttgttgtgattacctgattgtttgggctttgttgagcacaactttaagctgaagagtctcagaagaccgatgttaacctcttgtcagacaatatgcgccttttgggttggttaagataactttcatgaaaactttgaaccaaagaaatctaggtgaattaacaaacacatttgaatatgtaggatgtgccataaactacgtgttttggagggcacaccaagatgtctcagataaggtagagaaatgatcaaagtcttaaatacaggaaaggcatcaactttgggtgtgttgcttggaatggttccttagaggtggtggactgaaacttcatgtattactggctagcaatgacacatggcatgtttagatgaaatattactatcaagggataattctcttgaccagagtatgtaaagtactcctgaaatatatagccccctctgtcttcagaacaatggaggacattctccttgagctcaagttgtaccattgggtgtgaagatttctaatgaattgtaatagagaagttgtttttaaagattgagaaaattgaatctgccagtccagttaagtattttgaaaattcctgtcaagtgtaaatgtgaaacaggggtattgaattttgcagacaggtaaaagaaagaacctacatgattaattttagcactatgaaaatattttgtgtgccatggtactctattgaatctttaatataagtcttagtgacacctgaaggaatgtttaagcataaaatagttctgtaaattttttttttttttagcaagtatacgtttgtagttacatttcctgtagcttagtggatttgtatttaactatatccctatttatctagccataattttcagtaaaggttaaattcgagatagctgagaggtatattgggaccagagagtaggaaaatctaggtcagataggacatttcattattatttcactgggagtagttgcaattgtacagtcatttctgtcagcgatgagggttttagtgtggtttctggttgtttatattactttgtttttgatggttaagagccacctttttggttttatttttttagtgggactgggtatgtgggtgctaatcacaccattcctacaagaagttacatgctacttgccataggcatttttgcattttatgattctaaaagaaagaatttttgtgcataatgccttcttgcatagctaaagatctacagagaatagaattgaaagtcttctatatttcaatggaatttagacagtccttagatagcatacgtgtaaagggatgttgattgacccagtgccataaattatgttgtgatgaaaaggaactatgtgaaacacttttagtattttaactagaaataagttacggtcagcttacctaaaatgtaaagaggatgatatatgctgtctttacaggattatttttaaaggctaaatactcttgaggagctactgaaagaaactcttatacatttcacttaaagatggtatgcaaattatagttcagttttcaatattagatctttcccagatgttaaagtggaatggaaattgctgtctataaccaaactactgtgtcagatgaaaactacttagctaaaattgttaataccaaataaaagtaacttcccatgtttgtggctcttggttatgttagatactttgttcttttagttagtctttttttttccttggaaagttttcaaaaagctgttcctcagtgtctcttttcctaaccggttttctttaaagattagtactttggtcaaatgataagaattacctcttaatgtccttgaaatagcattaattattttccttattttatgcagttaggtgtattcctgaaaattagtggacttcattgaattattgaaaatatcctattaaaacacctattgtaaaaatactgctgctgatctttaacagctttttgtgtgtatggaaaatggcaaaatctgtagctgttgtgtaaattttcatgtgattagattttctaaaattgaagtgtgtagaccttgaatcagtgatagatttcaaatttcacatataaatgttgggggaaagatatggttgagatgtttctagcttgcttgccttcttgtcacctgttgaactttgtgactgttgtttttagatgattttcttggcttggtttagatgtgcatttttataggggtcttttttttcaagtcttgtggaggtagttgaaatgttacatttttgtttttggtgcgtgataagtcattaccctaattttgacaaaccatggttttgagtttataattgatatccattagacttggatttaatatcagcacatttagacttagacatttgtaatatttgtaaatttatagcagagtccatatacaagtgtcagaactagtttttatgatgtgtggcattagtgaagtaatatgccatcagttgctccttgttctttctttttcccatttatgtcatccatcagattttgatggtcctccttgtttagcataaatacttcacatgaccttgaagttggaaataagagagttaccattttaatgccatgatgttatatagtccatcagtgatgcattttttaatagagatataccagccaataaagctcagttgtgttcctccaatgtgtattttctactataggtagtttataaagttttagctataagaaatgctttttgtgtgtctgattttgaattgttcctggacaggcaaatcacttgatttctaaatgccagggaaaatgtccatattgtcagatattgctaaggcattatttgatatttaggatgctttagagattttgcagattttttcttatgggagcattttaatatcttaaagtgggaaattttaatatttgttagtattaaaaattttttttaaactttttcttcccgtagaattataaaacactatagtttttttcttttctttttttaaaaacattctgtgatcttgtaagtttgatttggctcatcttctgctttaggaaaggcagcaacaggtggaagctgttgagttggaggctaaagaagttctcaaaaaattatttccaaaggtgtctgtcccttctaatttggtaagactaatttattatttttttaacatgatgacattattcaagaaaggtgtgaataagcaacatcatttgcactccacttggtttcagtagagtgctgatttcttgatctttcctattgttaagctggtgcttttcagtaaagattaataacttggttcaaaactcatttctatttacctgatactattgtttctataaaattttatatatgagacattagaggattaaaaacatcatatttgggaaagaaatgttttttaatgctaataaaaccaatatggtaacattcttaatggctttatttaaaacttaattttaagtgattgcttcttagttttagcaacacttccttaatgtacttgatactatgaactaggctctttacattttaaaactcaagatttttggtcatctattaccttcttcaagcagaaatcttacagataatatagaacaacttggtttacttgaggtagtacatgttctcctttgttcagagaattaataattatttgagggcagagaaagtcagtgaatgtgcatgtgagtttcctaaaatagagtgtagggtctttttttttttttcttatttaatggaaaactgttcaacagtagagagacgagcataatgaggcctgatgtacccaacatctctccatagcacttatcagta

SEQ ID NO: 75552 - DNA, 1245 bp, Homo sapiens
ggtttgctgaagcatccccaaatacgtcattagaggtatttagaaactggattggtttttatccttggctactgaaattgggggggatttattattattgttttcttgtatctcaagtggcatgaataaaatcctctttcccatgtgtgtagcataggcattgtgaccatacttcacatgtgggtctgctttgatcttaccacctgactaaagactttagtaccaagactatttattataacattgtttaataaaaatgaccaaaagggttattgaatgaacttcatcgctacttagaaaggttgaaatgtagtgtttccttataaaacactttgaaaccatttatcataatacagtattaagtactaaaacaaacttgaagcataaaactttctggtagaattatggagtttttctttatttcgttctttgcaggttctagagcacaagttgaaagaagctgatgaaatgcacacattgttacagctagagtgtgaaaaatacaaatccgtccttgcagaaacagtaggaaatgatttttaatctacattttgattttactttaaatcattaccttcttccttcatggcctaaatagttttatcttggcattagaacatgaatttttcaaaacaactatgcttttgtctgtaggaaggaattttacagaagctacagagaagtgttgagcaagaagaaaataaatggaaagttaaggtcgatgaatcacacaagactattaaacaggtatttacaaaagaaaagcttagagcagtggttctcgatgtgtggggcttgaaccagcagcatcagcatcaccatgcacattcttgggccccaacccagctaccaaatccaaaacatgtatgtggggtggcagcagtctgtgttttcatgagccctccagaatagtctaatgcccacccaagtttgaaaatcactggttttaaagtatgactaaagggtaatcatatagaatgtagaatgctagttacagaactattgtgtgataaggtaaagaatactgggttcaaaatcagttttaaagtatttaacccataatatagaattcaagaaaaagtcattcttctattcctgggacctgaatgttattttgcaaccttaatttttctcccttttacttcagcgtgataaagagtaccattactcacttattttttggggccaatgtgcagaatttacagttgctgatggtactctaatgcacttgcagaataaatacag

SEQ ID NO: 75553 - DNA, 1050 bp, Homo sapiens
aagttcaatgtgactcatttttaaggtcttttaaaattcatctcttttaaatgagatgcatttcaaaaccttggaagtgtcttttaattgatcagaattctacaggatagaaactgctatatccttggtggttttacttggccatgtaattgtttcacatttcagatgcagtcatcatttacatcttcagaacaagagctagagcgattaagaagcgaaaataaggatattgaaaatgtatgttatttgattgttttacttgtaacctatggatttgtttttagcattaacggttgtctgaagatctatagtttaagattactttatagttatgctcttaatatcttgggtagtgtttgagttgatatagttttatattcataagtgtcataattttgtcttgtggggaaatattatgaaaggaaattttaagtgtgttaacttttcctttgttgcattgctagctgagaagagaacgagaacatttggaaatggaactagaaaaggcagagatggaacgatctacctatgttacagaagtcagagaggtacttacaacagaatcttttcaaacttgcttctcaattcagattaagtttataacagtgatatttcagtataagttgtttgtggcagagcttccgagtagcatacaaaacatgggctatcataaggagatcaatcttaaactctaaacttcattgcagctgaaagatctgttgactgaattgcagaaaaaacttgatgattcatattctgaagcagtaagacagaatgaagagctaaatttggtaagaagcttgtcctccactgggtatcaagtaggcactgaaaacactttattgacatgtggagaaaccatccaggcttttttttctttgctaacatctttagcttggcctttttgtaagtctaagataatcttcatattccgatgattcctaagattatctttcttttcttgactcctaaaatgatccttcttttcttagctcctaacaatggcatgtttggcttccaactctttttcaaaattttccatgttttata

SEQ ID NO: 75554 - DNA, 1183 bp, Homo sapiens
cggcattatatattcgcattggagttacagaactttctgttttgacagattgggttattcataggtatatcgtaaagcatttcttgatggtataatacaggccagtgtggtcttgtactaccccttagtgaagccttaaacgatggtcagtattttgggagttttaatttgactggatttgtagtcttctattcagtgtttttaaaaatattgtataattgactctttaattgaactgtatagattaagaaagcctttaaaaactaacgggtaaagtatctatttggcttttaatttgaaataatttcagtgactgttataaatagtgatatctttaaaaggtactttactggaatttgatggttttgtttttgcatttgcagttttctactctaaactgtagttcatttctgtggcttttcttatgtttagctttacagatgggaacctctactgcttagcctttctatacatctggtgcagcatattggctaatccactgtacataataactgttagcagtcccattcattcttcagtcctagaggtatcagcataatcaaagaatgatgcaaattaagttaattgtggtgttcctttatttttacagttgaaggcacagttaaatgaaacactcacaaaacttagaactgaacaaaatgaaagacagaaggtagctggtgatttgcataaggtaggcactgttcgtcctagagatgtagtatcatgagcctgtgttgtgtgttcaatcttaagcaaacttatgctgctaattctggatttgttgttttgcatcataatattaaccttttataaatttaagctgcttgttattagttagtattttggaatgaaacgttttggcttgtttttccaggattcttaattcacctcattatttcctcacatttctataattaattgctttataaagtacagagtaaaatttagttggagttattaaaatttggctgcatccatatattttttaaaattgggatttggctgtgtattcatttacaaagtatgtttctcttggtcttttggataaaacaaagatataaatttctattttttttagatgtttttccttcatttatttcttcatacaaatatatttttcctaatctcaatgcaaatgaatgatttttaggactgcatttctttgcattggtttgacagg

SEQ ID NO: 75555 - DNA, 1047 bp, Homo sapiens
cacacctggctaattttgtatttttagtagagatggggtttctccatgttggtcaggctggtctcgaactcccgacctcaggtgatccgcccgccttggcctcccaaagtgctaggattacaggcgtgagccaccgcgcccagcaacatggccctttaaaaagtaaaaaatattcttagcttgtattctgtacaaaaacaggctttgggccagatttgactaacctgtaatctagactaatactaacctaaatatcaactatggttatttctgtttttaaatttctttgtatagtttctgcattacttaagcttttaaaaacagtgaacatatgttcttataatctggtggggggtgaagctattttcattttggagggaaaaacctgtgtcgtcttttgagaggagcttttatcttctacaaaatgaataaaattattcattttttatgtatttatcaactgtattacttagtagctaccatattgttttccttataggctcaacagtcactggagcttatccagtcaaaaatagtaaaagctgctggagacactactgttattgaaaatagtgatgtttccccagaaacggtatgtattttcttcatccccagatctctgagctagttaccttgtgacctgtgtaaagaacaaaaatgtataaggtccatctccgaaagtcatctttcttgaaaatatcctgtccctaaaatgtagtgttttcattgatgtttgatctcatttttgcttattgaggtatgttaattttaagggttgtgttgagaggtatggagcgggggtccccaattcctggactgtggacaggtaccagtcaatggctttttaggaaccaggccacacagcaggagatgagtggtgggtgaatgaccattgccgcctgagctctgcctcctgtcagatcagtggcagcattagattctcataggagtgcaaaccctattgtgaactgcatgctccttatgagaatctaatgcctgatgatctgaggtggaacagtttcatcctgaaaccatccccgcactcac

SEQ ID NO: 75556 - DNA, 1058 bp, Homo sapiens
attttcatgtcattgttcagattttttaatgtttgtgtttaaatcagcaatataacattttctgttgtttggttttacatttcttttccttgtgtatggagtttatcatcacttccatcttctttttaggagtcttctgagaaggagacaatgtctgtaagtctaaatcagactgtaacacagttacagcagttgcttcaggcggtaaaccaacagctcacaaaggagaaagagcactaccaggtgttaggtaaggacaactgaaatattgctgtctatgggtaattgatgttatgtgtctgtgtaatgtgtatttacataaataaactcacttcactagaggaaatattccttctttatctctcagaacttccagatgacagccttaagctttcttggagctttagttctattttgtgcatatcttgaaggtcttgtagcttggaggggttatctgtgcctcctttgacctttgtatcaaacagactctcttgtaacttggctgcctgggtttttgtgtgttgccttaatacctgcaacggcttcgttaatttattctgttcttagtttagagtaagtatctgtgaccttttctcccccctcccttccttcctcctttcctccctcccaaaataaaatgaccataacattttaactgaggtaaggttgctaaactggaagtaaggtcatcacagtgtcttaaaattgaaagctggtttttattcaagtttgcttttgttaggtaatctaagaaattcgttcattagctcctgaagtgagatttttacttgaggatagctaaacccataattaaccaagtcatgttatgagcttttattgtctatattaccttggaaggctcagatttggtagcattttaaaatgacttgtattccagccggtgaatgcagtttttgtttttctggttgtagggtttttttttttttttctgttgctacctggattttacctgttttatgaataacttaagtcacactgcctagagtgtaattagagtattcagatatgcactgaatacttcagatattcttcttttg

SEQ ID NO: 75557 - DNA, 1104 bp, Homo sapiens
ttcttcaacatatcaacaaaagtaattaagcctcagctcaaatcttttatccttggtaagctgacttctccagtttcccaatgtaaaaattctgccacatttcctcgcttttccaaattaggaaataaccttgcttcctagggaaacttccatcgcttcttcccaggacttcagccttattctttccactggctccctctgttcagtcttgaaaacatgctcagatggcttattttaaccttgtacttccttcaggttaccacccttatttttttacttttttactatttagtattcttaagaaaatactctctatctacttatttattgttattgattactttatacactctagaatggcttttcttcctgctatttcaatgaaatcatttttgcaaaaatcattaatgatccctaattgctagatccaatataggcccttcttttgcatgtgatcagatactgaaagtacttaatgaaatatgtcaaaaatgctgacattagacctttgtcttataagggaagggtttcatttctagagagcttaaacaattaaaagattgcctattaccccttgcctttcgacctaagcgatattctctctttagcatctcatagatgttctttaatattttccttttcttcctaaatacatagtctgctcattttaagtcttgtgaactatttttggcttgtccattgccacatttgttttaattgtattacacttgagacatatgaatcattgataataacactttttctttttgatttgcagaattatagtaatttattaaaatatgtctgtataccctcacaacgcagttggcaggcagctcccctcctaactgatagcacaacattcttttgtcagctgataaacataagtccaagtttggcaagtgggtggttgacagtattatatcatgaatgataggctggattgttatgaaaatagaggcccaccaggcactctcgaacttcttcattccttaggctctacctggcattgacattgataattcttccttgtgtacttatgttttggttcccgtagctcttctttatacccgttaaatgtttgtgttaccctcaggtttttat

SEQ ID NO: 75558 - DNA, 1303 bp, Homo sapiens
aacttcatatgacctaaaaaaaaaaaaaaaaatctatttctgctcttttaaattatttattcactggggtaaggttgtattcaaccccttttcagtgctactcactcactttagctttacattctcttgagtaggactaataaaaatggattaccagtgttgttgttttaaatgttttctaacagaatttggctcacatttaaaagtatctacctaaaagcttgtttcctttgaatcctgagatttttctcagtttgattaccattagtgtgaattgctttgagtctatttgaaagggccatgctagatcaaatggaatatgtacttttggtgtttgacaaatgtcttctgattgccttctgttgctttgttttaaagtgaaattcattctttctgatcttttacagagtgaagtaattgggaaactgttcatttgaggataaaaaaggcattgtattatattttgccaaattaaagccttatttatgttttcaccctttctactttgtcagaaacactgaacagagttttgtcttttctaatccttgttagactactgatttaaagaaggaaaaaaaaaagccaactctgtagacaccttcagagtttagttttataataaaaactgtttgaataattagacctttacattcctgaagataaacatgtaatcttttatcttattttgctcaataaaattgttcagaagatcaaagtggtaaagacaatgtaaaatttaacattttaatactgatgttgtacactgttttacttaacattttgggaagtaactgcctctgacttcaactcaagaaaacacttttttgttgctaatgtaatcggtttttgtaatggcgtcagcaaataaaaggatgcttattattcaaacttgacttgttctaatttttattgagctttaacagatttcattagtagtacagatcattgtaatttagaatacagctattaattggcaaccattcaacaagataggtttatgtagcctctgtaacctttctaactgatgctctgggtcctcttcagtttggtccaatgtaaagtgccccaggagtgctggggtttcagaaaggacagagcaagcatttaggatttcagactaaacacccacacttcaggtagaggagctctatttttaccattactatttttttttgaagtaataataattaactgttagttttctttttcaggcacggttacacagtttacatgtgttatcttttttgttgttgttgttgttgttactgtttttttgatacagagtctcactctgttgtccacg

SEQ ID NO: 75559 - DNA, 1049 bp, Homo sapiens
taggattctttttcctttgctctgaatgtttccactttctgatattgtatttaaatatccaattaaagcattattttccgtactgccaattggtatctcccattggcattttgatagggggattcccatctatgaatcatccaagtagagatggaaagtaaggtggttggatactaagttctggagctcaaaggagagatcataggtaaaaatataaagttggggtcataagcattggatgatattgaagccatgagaatggatgaggtctctcaaggagataatgttgaggagtgagaggagaatgttgttatgactcaactcacaatgacacttcaattctacctggttgatattctgctcatcacctgattacagttatttgtttatgtcttcacttgtacagtactgtatcttacagcacaaaatttcttagcttctttcaaagatttgatttttaactgttgttagtggtttcttttttggtaattacaactcatcgaagatgtcattcagaaaatcttttctttttgtccctggtagtcagggaaatgatgcctctccaagagcgactgtccatctatctcacccttgcctcctctcctaccaccacctccttcctcacctagttgagatgtcccgaagagagttgtatgaaagtcaccaatacctcaggattaggagaagcatctaggctccagtaggcaaatatttctcaggaccatggtcagcatagcacacttgtcctgatttccactctgccctctaagcctttttcttctccttttaaaacagggtcttgctatgttgcccaggctggagtgcagtggctattcacaggtgtgatcctaagtgcactgtagctctgagctcctggactcaagtgattatcctgccttagccccttcagtagctgggactactgtgcctggtttctccttaggttttagtcattgctatgtctgtgagtctccatcttcagctcctggtctccgtgattgtttctgtcttcctagggtcaataaacagtgtttgtgtagatgaactat

SEQ ID NO: 75560 - DNA, 1398 bp, Homo sapiens
gtagaaattgataagctctacaaaaggaggtagatacctgcctcatttcctttggatgattcagtgttttgttaggtaagacaaagaggggtatagtagcttgtagagtttatggtcttttttttttttttaaaagcaggtcccactttctgtatgctttttgttgttgctgtaacctcagcactttgccttgactactccaccctttggtggcaataagaaaccttcaaatataccctaacacttttccttttctcatcctccactctaatttgggcccaaagacatcaaacattagtatcttttatagactaaaaggtctttgaactttaaaaaaatttataaaacaaaatctttactgtagctcagcatgtggggtgatctgaagagctcagatctgtttgtgtggatggagtgtctaattctgtgggctattaagggttacggtgttactggctttgagttgctatattttcctttactaactttagccttgtttggaatatgtggctgtctgtgttgctgtgtggtttctggtctggctttctcagatttatttatttctctctttaacacaccaagactgaaagcttcattaggtcttttcatttctggttgtgtttcatcctgtgatcaatatttggggatgctgtgtataaatgaaagtaaaacaggcttgattcaggttcagtaattttaccaaacattttatcgaaaagataaaatacttatgcacaaaggaccaaaacaaaacaaaatagccgttgctatatttgaggaagaccaatattgtcacattggagcactggttttatatctgctgtgcagggcttgcagtgtggccttcctgaaagtaggtatatggggttgtaggttggcttttgaatggagacaacagcaacttggtagacctcattggtatgggagaaaaataactgtgaaaaggaatttataatgtcttttgatttaattaaacgtttctcctggggtgtgcagaaatctattttataaaaagaaaagtaaaggttagaataattcagttattagttcttactgagcttattgtcaccttcatcttctggaaaataaaataataagagcagaaagtgcttcatatttcttagctttgtctaaatcacctgttctcaaccactgtctcaagtacctcatatgtgatgatcagtcttgagggtatgtggccagtaatttatgacaagtaataaagtgtggatctttcaaatgattcagatatgtcatgttaataatgtcatttttcacccttttgcattctgatgtgttttctcaagtgggagagaaaggggtggagttacatcaggcaagccaggaatgtatgcattcagcaaatatttattggctgtctactcttccaggcatgag

SEQ ID NO: 75561 - DNA, 1060 bp, Homo sapiens
ctcttgcttgattatttccaccagggtgaaggtgagaggcatgtgtattgctgggagattgggaaagatttcctggggcagttggcctttagcagagccttgagaggtgacctgggttttttatagagcagtggtagtaaaagcatggcgattttggaaccttgaggggtatggctggaggctgaagtacttggggagggaggtgaagttggaaagtcaggttggggtattgttggggtattgaaatatttgggctagggttatagtaggtaatctcagagtggtccctgccttcatggagcttacagtccatcaagaaggaagccctttaagcaaacctggcaaggtgctgccaaggagaagtacagggtttcgtgtacagtaggggacaaaatttgtttttgggggagggcaggtttttgtggggagggagggaattctatgtcagcagaggtagaaagggtgagttagctaagggttagcaaggggaaagcagagtacctgaaggcacatcgagaggttgaggggctgagaggctgagggatatccagtgcctttggaattgaaggggtgagagggcctttgtgatgagagagacttgaaaggaaggacctgggcccagtaaaggctgtggcctctgggagggggaagccctgctaataacatttcaaggcattattgcagactctaggtagcaggcagtgtcagccttctgagtaggttagtgaactaatccttaggacccagtcttgcttgaaatctccaaataggcttgttttcccttttgtaattcatttccctcctacctttgtctctcttcccctgccaaagaacagttgctcacaatgggcgtagcccccttctgtgcgatggcaagggtgaggtgagataacgtgatccatttaattatttgggcactcagtggtttgattttgaaacttgtgctggaaccagtgaatgttttggggttaaactccactggcagagcagttagtgatccaagaactctttcctgttacccattcagacaactgtgcctctggagccttgctttccctgg

SEQ ID NO: 75562 - DNA, 1056 bp, Homo sapiens
taacgtcgctgttatgttgatttttcctttcttgtcttttaatcttcctgttagtattgattaagggaaaagtccatatagctcctatctcctcactaacagtacttggtataacttgttccagcagtggcacttggtttagctaatccaaaaagcatagtccaacagcagtccaggaaaagtgccttttatttgcttattgtattagcttagaccaggtgccagctctaaggctttgatgaaactcagttgatttagacccttctgagagctggcatagctttacactgtatagtttgaaccttcctgtgagagcagttaagcctttttggttacataggtggtgaggtacatatgacccagagtttctgaaaaacattctgagcaaacaggcatcttgagatatcagttggtaaaataccaaaggacaaatacagcatcttcataagcagtattagatgttatatgggaaaaaccagagacctggaagcactgcagggaagtaattcaatcagcaggttctgctaatgtaataagcgacacaagggtgaaacctgagtagtttacatgtaccagaaatgcccttcagttgaattattgtcttatcatggttgcctgcctgtgcactactgttatgaatattaaaagacagcacagctcactttttccccagatggaaaaggcccaaatcttcatcaccttagtaatttgtttcctcctcttcccactccttaccgcctttagtcaaagctcatgctttgggtttattacttagaaatcttgtccgggataataaagcatacagacttggtgttgtataaaaactaccacactccagcctgggcgacacagtgaaaccctgtctcaaaaaaatgaaataaaactgctctttaatcgtgccgagttcaggagagagttgcttctctctttgcggtagtgaggagggctgggcggaggggatttccccctcactgaattttccttgctcctgtgcaatttactaattataaattagtaaattgaactgcaagtctcttgcccagtgtgagaggctta

SEQ ID NO: 75563 - DNA, 1054 bp, Homo sapiens
aatgtatcagctacacatggtgactattattaaattgaaaacagcctttatttttctgatagactatttttcaaaatctggaactgttgtttcttctggaccaaaagtaacttggtgaaaaaaagaccaagactaacagtgtaatatgctgtatgttttgcttgctaagaaaacttgagtggttaacaaccttggctttatgtagtaaagacctctgttaactggaatgcttcagaagaggcatgcttttggactgtggaagttttaggttaactgatgattaagcagaaatctttgtagaggattttttttaaaattagagtttgtgattctgctttttctaacacatcatatggagtctgcttgcatctttctttgatggatgaggcttacctcgttgatctttctgaacattagtgattgttgaataacactgtaaatttaaaagatgtagaaaactgggacccaacagaattctctgaaaatcccatttatacatgttattcttatagataaaattaaaacttaaaaatcaagtgttaaaggatgtttagctctctgtaaggacagattgtagggaaggcatttctgttatccagggttccactggttcacttagattctgcgtatttgagtttttgagtattttcaagggggtgtggtggaatgttgaggtccacagtgtctctggtcacacccggaggttctggatttagatagcatggcaacaaaataaatatgtttacttggtgcatctgcggtgcttataatttagaagcatcactgctgtcagattatatttttaaccttttaaactggcatttccttgtaatgcattgggctgttgaaaatgagattaaatcagggtttcaactgaggagaattgggaccagaaagcaaagctggagatgtcatatgtgatatatcattcttcagagctgtttagttagagggctgccttttgtttaaataagaataaaaataataattggctacctcagcccactgaccttggaaattgttacatcctctgatgtaatttattagtgtaact

SEQ ID NO: 75564 - DNA, 1366 bp, Homo sapiens
ccaaaacacaagcaaattccttctaccccattgtacttattcatttaaaatgaattacaaccatatctatggtcactttaaatgaaagccatttgaatatattcttgttaggtgcaaattaatctaatttcttcaaaagtagtcaaagcaacagtagatacaacaataatgtctccttaagttctattttgccttcacagtgaggtctaaaaagaaaaggacattaaatttaagcaaacctttgaaaacaactcctgttttgaaaacaagtttttgaaagtttctaagtcaagactacctacattaaagagttatatgcagatgccatacaatcctcagtaggatcatatgcctctttaagaggatgtttgtcaacttctccttatggaataacggcagggaagaagaatattgaagacttaaaagtacttttagtttttaactttatcccaaggacttaatagtgttttcaatttgaaattttggtttaaccacaagatggaaaaattaatgatgcaagaactggtgcccacaggatctaatgggcaagttggggggtgacttggtattatgggagctttgctgttcatcctgaggtacaggagggaaggccaagagaatgggaaagatgcatgaagctggcaggtttgctggcctgggcatggggttgctgacatagcagctgaacattgatttctatcctttttcccctcgtactctattgtttagttgtcctgtctgctgaggaaagcattagttcaggagtataaaaatagtcgttttgtctggtttggtgagaacccaaaggctatggcaaggcttggaccatcagggagggatggctgttcatagtactgaacagtttcctgggaagtctgggattccgttgcatagatgaaactaaaacttgtttcattcaacttaagacaaagtttccatttgattcataatgaaaatgcttaacattttccaggcattattctgtttactgtgtgtatgggtccgggaaaattaaatgtaggaagagacgacatcagaccagaatgttgtatgtgcgcccctgtgccctcagggcttttgtcaggacggacgttaggactggcaaggcaagattggctggcacgagaatggccagttgggcaactaaacatcttttcgtctttggtctgttaggttttttctgaggtggaatttgcctcacagtttttaggagataacttatttcatagaccaggtgttagcccattctcatgtggctatgaagaaatacctgagactgtgtaatttataaagaaaagaggtttaattgactcacagttcggcatggctggggaggcctcaggatacttacaatcatggcagaagg

SEQ ID NO: 75565 - DNA, 1047 bp, Homo sapiens
ggacggtctgtcccttctccttcatttaaatatttattcagttttttatatcaaaatggagtttgggatatttattttgtcctatgattgtaattcaaagaagtaaattgttatttacttttttgctcagactgtttcagctttggccattgttgagtttcagcatgttggctcctgtgtccttttgacatgccccattgggcacttccttgatttttagcagcatatgatgttttaggctcaccttgtattttccctgtctcagcctgcaatcaaccactttttcacagagcctcatttccttttattggaagatgatatttagaagtcaggatctgggtgctaattgaactcattgctactggattatcattgcttccagactatcttggtggagagctaggaaaaacatgcatgtatactagcatatgcttgtatatacatctatatttatttctatatacatgtatttgtgtgtgtgcatgtgtatactcatactgtactaccgctgattccagtctaacaccctaagaatcattctagccttctcttttcccttacttgtaacttctttcgtagacagtgagaaacttggttctcattactacagcatatttactaccttgttcaatcctattgtatcattgaggattcaaccagagaaacagaactagcaagagatatattaaaaagatttcttgcaaggaattggcttatgtgattatggggctggctaggtgagtccaaaatccatagagcagtctgccaggaaagacagactagaactcttgggcatgagccaaagctgatgtccacaggtgggattcttcagggaagccagagttctgctcctaagccttttcatctgattcagttaggtccccacaggctatctaggagaatctcctttatgtaaatataactgattatggactttaataacatctacaagataccttcatggcagcatgcagattagtgttcgaataactagggacaatagcctggctgaattgacacataaaactggccatcacacctaatata

SEQ ID NO: 75566 - DNA, 1003 bp, Homo sapiens
gacattgagaaagaagatttaaaaatagtcttctttacatattgtggacccctaagaataggtccatgaatctcccttggcgatgcattggttcagtggagagagaggtgcaaacatactttcaccatatgatgtgctcattactgtactggaagttcgtataagatacagtctgatggtaggagaaggtgtgaacattaggttgaaacttgaaggatgagaaggattttgccaggttgacatgtaaaggagagcatttccagcaggactaacagaatgtacacagtcatagggtcttggaggaatgggtggttctgtactattggaatatagtacaaacttgtgaagttgaaagtaacattctagcacagtcttcattacggaattattaggtttgcatgatgagagatcaattttacttgtgttataacattataagataaaggtcttctttttttttttcttctttactgaggtgttctttatatgccatacctcacctacttcagtacagttcagtggtttagtaaattgatacattactttatatgttcatcaccacagtccagttcagaatactttcatcaccatacattgttccctcctgccagtctgtggttaattcctgtgcccgtctcagctctaggcaaccactgatctgtgctttgtctctataattttgccttttctagaaatttcataacgtaggatcacacaggatttagtcttttgagtctggtttcttccacttaacataatgttttcattagtcatccatgttgtagcatgtatcagtacttctttttatgaccaagtgatattccattgtatatcaatggccatgccacattttgtttatgtattgatcagttaatggacagttggattgtcttcaagttttggctattatgaatgatgctgttatgaacatttgcttgcaactctttgcatggatgtatatttttctttggtaggtacttagtagtggaattgctaggtcttg

SEQ ID NO: 75567 - DNA, 1488 bp, Homo sapiens
atctagtaacaatgaaaagagatgtgaccctgttaagatttatgtaaaaatgtatgcgcatgtgtgtgttggctctaggataaagtgcaaatgttccatggtgtaaaaggaccttcacagtacaggccctgcctgcatcagttccctctgtgttctcatgtacagcctgcagcctattcttggggcttctcaggtggcccatgtgctcttgcttccaggcctttgcagatcttgctctggctgtctgggacaccctgtcctccccagcccttgtctgctccgaacatatacattcagcctttcaagactcagtgtaggtgcctcagctgcctgaaaccttcccacacaccttttccctcctctcctcctttcttctgtgttctctgagcacttttgcaaaccttcctattgtcctttgtccctagggactgtagcagtgtgtttgcttctgctcccctgctgaactgtgttctcctggtagcagggacttttcttacatgtttgtgatcctggtatctagtcctgtgcttggcaagagtgaacactccacaaggattttcagatgaagagggaagaggagtcagggaaaatgggggatgggagcagcagatacttgtgagaagtgagaggcagcccatgaatatcggaggaggaagtgtgtgggtaactgtgtctttcaggaaggttgagacccaaacccattcactgattgaaagagcttcaggagagaggtcacctccttagcttacttgtttcagtaatccaagctctcatgctaagaaaatgtagaatgacattttacccaaatcctttcaactagggtttaaatctttttggctttagtatgtatggatccttctgtgaaggcagataaaacattctaaccagggttttaataaaattgaaacgagttgtgaagttagatgctaaaatgggtgaacttactacataagctttaaacctcatatccatggttattgaaaagtgagggctttgcaaacagtgtgcttttccctgtttaactttcttcttatgcatcgttctgctttatgtattctggtaagatattccgcacactgcagctcgttctctgtccttttttatttctacaacttgccaagtttaatcacatgtggaattatgccttacaaaataagaatgcctgcctcaaggagcatgggagtctaggaagaaaatgctatgagaaaagaaatgtaagaatatatcttatcaccaagtatttctccatttggctcatggttcagtttccttggagattggagcccaccttttactttttttttttcttttttaaaactacatcacagtgtgaaatcttttttgttgctctggtagattaatttttacctgaccttcaggagttgtgttgcctcagttcatttccagattatctcactttgcagcatctctgaaaaatatcttaaaatctctaaaatattgtgtatgttatatttttattcttgatct

SEQ ID NO: 75568 - DNA, 1929 bp, Homo sapiens
ttttttctgtgtagatagttgttaacttggtgtccttgtgaggtgggacaatgggtggagcctttaattctgccatattgctccgcctcctcctatatgcagcatttcttaagcaaagagaaataaacgttgttgcgtttctgggctttatagtccattgggtcaggggaagtccatgcatatatgataggttaaataataagagggttgggactataatttcataaaaccaatgttaggcgcttattggcatatgggcatttccttaaacgcggttggaatagtgcatttatacagtgagttagggtgagctacctcaagactggtgccagattgcagggttttctcagagactgtgtgccctgcctttgagtctgtctgtctctagtgtcacgtcctgttcatctgcagtgtacagtctactttgatcatagtagttgcttgtgatttgttggtgcaagtgacagagcagttgctttggaaggaaggcggagtcttcagcctgtaatgaagagctgaccacctctggaatgtgatcctgtgatgctgatgcaacctccacttctggagcccacatcgcttccattccatgtggatgtcgctgtaagagttcaggctagttaagataaaccgtgacgtctccaaaatgtgactgggagcacctagcatcccccttcttgctctggtttcccttagaaaattcttattgacaaatacatttttaggtggcagacatctttttaagactccatctttgcactgtatgccaaaaaatgtcttgaatttaaaaactgtcagtgttgtctactggaaagagtatgaaatttggagtcagacagaactgatgtagctttaggttctgcctgacatttcctaactgtgtaagttcgtgtgtgatcagccattctgagccttttatctgtccactaggagtaataatgtctccttcacagggtttcttggcacatagtaagtgtacagcaaatgttattaattcccattaatatgtgaattaatatatgaactctaaactataaaacagaaaaaccctttattacttggttaagtttcttacacagcattttcattattctttgcagctcccaaatacccttactgtaaagaccaactgtttgctctgcatatatgaagagttaaattttcatcacacatttattaaataactgtttttaagtctccagaataaaaaagaaagttaagcctgaaaggctcttatgggctcgaattgaaacacccctgttgcagcagctgaaacaggtgtggcagcagcactcggacattttatttctacaaacttactggctgaaaagcgtgccagcccagggaacgttctgaccttctttcatgggacagtaactttttgcctttgtaagcagaattttgtctttatgactgggctctattctactatacaaaagatggttgctatggtttgaatgtgcccctcaaagttcatgtgttggaaacttaatccccaatgcaacagtgttgagaggcgggacctataagaggtgattaggtcatgacggctccacccttgtaaatgattaatggtgttatatcaggaatgggttcctgataaaaggatgagttcaatttcttgctctctctggtacacatgctctcttacccttccaccatgggatgaaacatctagggaggccaagcaggcctctccagatgcaggctctctgaccttggacgtcccagtctttagaactgtaagaaagaaatctctgttctttataaattactgagtctcaggtattctgttatagcagcacaaaacatactaagataatggtcctctcatcagccagccagcttgtaggttttcattgcctaccgtgtgtccctgttacactgtgccaggtgccagagatacagaaggcctcacttttttagaac

SEQ ID NO: 75569 - DNA, 1049 bp, Homo sapiens
gccactcttggataccgtagcttggaactctgaacacacattcaagtgcatctaccatacagggtcattctcaatcacattattgctgtcaagtgcacctgccatacacacagagctgggtagaagtgaagggcatacatagcaagccttgccagatcttgtactaattgtgtgtaggctacagtagtgaaaatgttcctctaagttgtttacaatcctggctgtaattggttcacatatgcttcctttaatatagagtgttcatcttgatttaagtgacatggaaatatattaaaacaaaacgggtttgtaatggttgttgactcatggatactttatagtagtcatcacaaacacgtttaagaaaatagtgtacatgattctgatctgcctgagaaaaactagaggaataagacttgaaataaattatctttttattctggagacatttttatatagctgacattcctttgtgctggaaatggaaacattaaaaagacaatgggaataacttacagtgataatttgaaaccattgtcagactgtgacgctgacttgactggtgaaacaaacacacaaagcccctttcttccaacttctgtttcccagtgggcttcacaagttcttgcttcccctgtccggccactcccttctgggtgtagctggaaaagtggagaaggcccagggatctgtgggacaggaacaagccaccaggcctgctgtctcctaaccttggtgttctgggggagccttggagctgtcatacatacctctgtaaattttaaatgttccttgttttagttttttattttttttcttgaaaagaacttccgccaaggtggaagcagagaatagttgtgttaatgtagcaatatgggtcatcagtaagaacatacaagggccgattaatccagagttagaaaatacaactgaaaattgaaatgctaactgtgatcctgcatgtcttttaagcactggtattagctaaatacaggaaacctgcttaaggacattatatgttttccagatgacttctaagttatttgaca

SEQ ID NO: 75570 - DNA, 1439 bp, Homo sapiens
gtgagctgttctttttccttcttatttttggtttagtttttcacttctgttactcacaaagcaaacattaggctctcttatttaaatacattttctttcaaaccacctaagtaaaatgttgagctttttgctgctgtatttaagccaggcagtgttactttcactgatttaagatctgaagcagcatacctacttatcatcatttcattatacagatttgtgtaagagtgtttaaagtaggttttaagatacagtatgtttaaaattaaaatttgaggtatgatttgcagtgtccactgaatacttcaagaaagtagaagagttgcttcattatatcacagttttgttagtttcagcaattaatctagtttgacattagcatttttgtttttctgtaatctttttttttctagcatatgtagtttcatcttttcaaggaccaacaactaattttgtgtgtatgtattgatacttaacataaattgctgctttgctgtgtggtctgggtagaattattcattgttttctagcaaaaagggacatttgtctcttttttcctgcatgtattatgtggttgggagaataatttctgtccccattctcccaagatgctcatacattaatcactggaatctgtgaatatattaccttacatggcaaaagggattttgcaggtggaattaaggtcatgagacttaaaatagggagattatcctggattatctgggtgggcccattgtaatcacaagcatccttaatagtgaaaggggaatggagaagactcatgagatgtgagggaagaaggagcaggagagatttggagcatgagagggactccacctgctgcttctggatctgaagaagaggggactatgagccaaggagtgcaggtggcttctagaagctgagaacagccctggcagctgtccagcaaggaaacaagggcttcagtcctgtaatcacatggaactcaatcctgccaggtccctgaatgtccctgaaaacagattattccctagaacctccatagatgctgccctgtcagccccttgattttggccttgtaagactcaggcagagaaatcagccaagcctgctgaacttctggcaaacagatctgtgacataatacattagtgttgtttttagctgctaagttttgtggtaatttgttataaccacaagagaaaacttatacatactattttatggaaaatcaaatgcaaaatacctcacattactgagcagctcttaatctcgtggtgggggaaatgaaaggttggggaagagatgaaagaattgagaggcagggaatgaggttttttgtttcttttaaaattcttttggatggagcattagagcaggaaagcttgactctagcactcagtaacttaattatctgtgtaattatctgcattactgatatacagtaattacaat

SEQ ID NO: 75571 - DNA, 1031 bp, Homo sapiens
ttcatatgaatagttatatttaaaaaaaatctcttcaagtcattctgtagtacttgattgaaatcatgaacatgacataccacttcatcagcagtttttcccagcattaaattattttattattttactctagtgtcacaaatctaagaatgtcatttctaaaaatttctaaaatagcattgataattaagtcttacaagttaggtagactgaatgttaaatttggttctcttaaaatgcagaagaatgagaattctgataagcagatcttacccagcattttttattttaagaagattttctttaaagtacacaaaacatacatgtagagtttgatgaattttcataaagtgaacacatccatttctacagtacccaagtcaagtaacaggacattatcaataccctcaaagacccccttgctcccagttactctcccacccccaagcagtaacagataacccccatcctgaccaaacaccacagattagttttggtactttgtacagttggatctatagtatagactttttgttgctgactactttcatgtatcattatatttgtgagcgaaataacctctgttggatatcataattgttcattgctatataatattccattgtgtgaatattcattctgttagccaatatgctttaacattttgataacactaagacctgttaagtttttgcaaattattaaaggtattttaacttagtttaggatgtaaagtcaaaaaatatggaagtcaataaaagctaccagtggtcacatttataacttgcagcaatttgaattgtagttatttgttgcataagtaaaaatgtgtcctcacttagaaaattggttagtctgctaaaacagtaatgattttacagaattgaatatttggaggatgaactctatggtaaactctggattttattctgaaaggtgagtgacagtccccgatgccaccccttttgtgaaatctgtggtgttctctagtgtgccctttccctaccttgcattggacttggtcctgacaa

SEQ ID NO: 75572 - DNA, 1068 bp, Homo sapiens
atggaaatggaaactgtcagggtaatgatatcttttctcctccaacatgtgtggatgaagttacagtttttatcatcatgaattacttttatttctgttttgcctcttactttttgggcccaggcagaagctttgcacagtggaggcagaaggagatccagaagggaattagctgattggatacccagagaggagtacactttaaaagcagagtccaagttagcaggcgagaggagtgactagcccacagggcagcttagggcagttcctggagacagaaagagggagagggacaaaggccagattgctgagaataagtagaaaaagagcaaagcctgaagcagcatgtggactgttgtcattcagcagtttgacagtttcattgtaaagagaagaatggtggtggtggtgttttaggatggaggaagcaaaaatgtgtttgggggtgaggttaataagccagtggtagggaggcaggcattgaagtagcaagagaggggctcagagtgagcaatattggtgaggggtaggaagatgccagtaaaaaacttaagattatttatttagttggatttctcctgaaggatatatcagttttctgaatgacaaatatgtgccttgcacagtggttttattttggtttttggttttgggtttttttgagacagggtctcactctgtcacccaggctggagtgcagtggcgtgatctcggctcgctgcaacctccgcctcccaggttcaggtgattctcccacctcagcctctcaagtagctggaactacaggcatgcgacactatgcccaactaatttttgtattttttggtagggacggggtttcaccgtgttggccaggatggtctcgaactccagacctcaatggatccgcccaccttggcctcccaaagtgctgggattacaggtgtgagccactgcgcctggccacagtggttgtttttaaagactcatttacaagatttgtcctaatgtcactacagtataattcccatcttggaggggtgagcatctgcagctgtgaggcacagagggaaggttgatgggggaggg

SEQ ID NO: 75573 - DNA, 1523 bp, Homo sapiens
gggcccagcaacctctagagtttggaagctggatgttcagcctttttgggtggaatactgtataggtgtttttcatttgtaagatatacatacaatgaggggcatagggtagcattttgaagtttgatgagtggggaaaggctgattggaagggtagatagataggctaagacagctcatagcctccgggattccacagcctcgggagaaatgaccaaggagataaacagtgcagtgcagcattgccagcgttgacagaggagcattgcggaccagcaggtgactgcataggcttcatactctcctgaatagccttttaaattttaatttagatattatgggcatcttagcaaatttcacttaatagtcacacatgttggtcagtaagtaataactgctttttttgcttagctctaagatgttggcatatgtcactcatgaatcacacaattgagcttctcttatctatgtgacagtctcacttctaatagagataacatcagaatagatttctatcagccttatttgagactcagcaattgaaacttctctttcctatcttcagaagtgtatttgctctctaggaaataattctgtagtgataggttttaatgtgtcttggaggctacacccttttcatgggcaccaaggggtttggacatttaaggatagacaaccctatactgttgctgtagcgaaacataacacacaggaaagcccgccgggggagcatgctgctgaatgcattgtgagggaatagactttgatgttcttttcacatgatttggggtttcctcaataggtaggtagaaggaaataatacttgtcttttagatttaggacttacttatagctttttcaaaacatcattagttcatgaaccaagactaaaagacatgattagaaacaaaataacttaaatcaattgttggaaattcatatttggtgttcaactgtaatactattttaatttaactctacattttggtagcaaaacacatgagttaaggagcattttaatttcaaaattaactgagtcttgagaatcagaatgagtcttgaagtatagcccagttttgcaaatcagatttttaattgaactcactattgtttaattatgcttgtcaggtcttgtcactgtcaccagcggtgtggaatttaggtacctaatgctgtgagctttagtcagtagcttaaaacagtgtcactgcaaagtaatgacactacagtgggttatagaaattatgcagttttattttgtagtcacatttcacgttgttatgtggtggaatatatatcacatttaagctaataatatgattttatttttatctgggaaatacatgccagtactactcaggaatttgcttaatctggcttatattttgcagagatgtcatctctaagctttcaaggtagcatttaatgttgctttattttttagtcagcattatagaaaagtaaatacaaaaaacttcatgcagttgtttatgtatttgctttttgtgtacccatgaaatcat

SEQ ID NO: 75574 - DNA, 1082 bp, Homo sapiens
ctgctgttgtaagaggaggactcctctggcagtgaggggaggactgcgtccggcttggccaggggtccaccagaggtcccccgtctgccactttctgagtgacagccaagcctgggtcattcttttcaccccactcactgcatcaggaaactgtgtagtttttgaggtttgcattaaacaaacatttgataccctttcattctgctccacattaaaagctagacatacatttcattataggaaaagcaaaaacatgtaatagaaaaaggcagtttatttcttattttctaacctttgggattttaaaattttgacagtcatctctctgttctctcctctcttggcccaacgtgctgtcacttctccgtggtaggattgcctttcccttctgcctgctccatacagtgttatactcaccagctcgcagatctgttagcaaatactgtttagtcaggctcttgctcagccagctaatacagagctactatttatgaagggtcattcaccagggaagcactctgctaactacttttcacataggacctcctgtaattcctccaaccacctcattaagttgggtattctaactattcctattttatatatgaaaaaattgaggcataatgaggacacctgctcaacatcatgtagctaatacgtgataaagctggggtttgagccctgttttgctggactccatagccagtggtctaccaaagaagagactgattttgtcccttccttggccagattaggtagttgtgatctatcattgttttctggcacatctcccttcaaataatgtaaaccttttctaaaaagtagctagcagcttttgcacctagagaattttttttgtctgttctgatgttcaattaagcagactagtctagtgttcaacatataagccaagaattgcactttcttcttatttatgccttatggcactagagcaaagaagtagttccaggtggatcttctgataataaaaatgattagtgttgagaccaacattgttacttctttacttgttgccaatttttacacatttgagaactctgtagttgactgtgtagtcagtt

SEQ ID NO: 75575 - DNA, 1060 bp, Homo sapiens
gaatcctacaaggacttccagaaaatataaacagctgcacagtttgaattatatacttcctacatttcttcagttttcagaagcacgtgattctgtcctttcagcagtgctgtgaaggagaggaggcacatagccctcgtttataagccaggtgaccgttaggcctcatgacattctgtgccatggacagctgtaacagactggagacaaagccgtgcctccacctgcaaaactggccatgctttctagaaagccgaagttgcatttcatagactgcaccagaggctgtaatacccacttctaaaaagaacaaacactttgtgaggcactgaatttaggccattgggaaggagaggaagggcctacctaaggaggatctgtgcccaggaagtgttgctcagtccctgagacattaataggagggagttcaggtaaggcagccagtggtcacttggagaaaggaggataagtgggttcgaggcatcagcttgccctggacctgcagtgttggcagcaggttccaaggatttgcctgccagctgttgaggctaaaaatctaggaataggcacatggttttccaaccccctgtactccacctaacacagtgctcaggaataattgtttcattttataaaacaaactgcagaagacttgtatttgccagatcccaaattggaaatgagtgtcttctctaaaactcctttgtctgactgccaaggtaactagacttatcacgatgagagactaggccaaaacacacacccataggggcccagcatactgttttaagagttctccctttttgtgtagatgctcaaagggaaattgtacttacggaaaccttcagctgtctgaaaccatcggtgaatgggtgattctatagagaagagttttataaatagttgataatttaaatgttcagattttattttaaccttcttttgcatggttatggcctcccttgagacgaattgcttggttccttttgtgtgaaagagggataacaaccctcaactgggagaatactgatgagcttagcatacgtatcctgataacatg

SEQ ID NO: 75576 - DNA, 2073 bp, Homo sapiens
ggctgctattcttttttagctttggactttttttttttttaatagtttttccacctccttttcttagttttgaaaaaaagtgtactgataaaaaactttaccaacttcctgctgtattatgctagaagctttatctgtgtcacctcatttaatcttcatggcaagatgtctttttcattggtctgcatatgtgtggcttaattaaatcatttcgtagctgtgattcgttttttccaaattccagaagttgttttgctggatgtagatcagaagtgggaacaacttagttcccttaatttgcctaaggcagattttccttaagtcgctattaaaagtgctcgcattgttaggtgaaccaagtgttgaatggtactttacaaaggtaagaacattaacatctaccacttagttgaagctcaccacgtgcctgtgccagacactgtctgaaacccttcatgtatttccattaaaacagctctatttgacttagaggaactgatatcatgccttaaaatgaaaaaagtgtttcatcaaaggcaatatgaaaataatttgttttgatggaaaaactgtctttttagtgcacagtgaaagcttaagaggatagggagcagagccagctctagtttgtacatattagaaaaggatgccctctctgggcagacactgcacaggcttggtgaatggatggtcctcttgtgcctctgattctctgacgctaggctgtgtggcgcagggagctgagtgcagggtagatttcagcttcttgtgcgctgttgtgcattgcacagcctggcctaactacatggcagctgaagtgtgtgtttgcatgttgtaggtggggtagagtgggcgaaggtgttgatggagaaagggcaaaggatgaacgaaggagaagggaacacgtacaggacaaaatgataccttggcaaatggtgaacaatcgaggacattatttgagaattgggaaggagaggaaggggtaaatggctgcagccgacccctgttcaaggcctgtaaggcagtttggtcctcccagtgacccctgatgctcgtgcctccgtccacctctacagcctgtggccaaaacccaaaggaataaagagggccctggaaaacccaagcaaattgcactattctcaccaccactgccgctgccaagggagtctttctttccttaaccgtaactccctctctggtcttaatttctaacttcagagcttaataatgcttcttcttaaggggcagaggaattcttaggctcccagtgctctctgggagaaggacttagagacactgggggatggtgtgaaatactttagagctttgacattctcccccttgactcatatgggggttccctgtcactgagtagtattcagcccataggtggtgagacccagcccttggtctctgaagaccatcctggtctctactcgcatgttgtcctgttcccctatggcttgcagatgtgcagaaaaaggccacaattgtggattgggtgcagtcataataataggaaagcaaaatatgaaagcagatgtagagagaggaaaatctaattgtaaaagagcctgtttataagttgcatacatgtcttgattatttttcttcttttcatactagaaaatatttgatcatttattattattaactccattgagggccaaatgcagatttcaatactgtgtttagtaactctctgaagttgcagaagggcaaaataagtcacagtaggtttttcgttcatttttctaatttaggcatcattcactctaatttcataagatttgaatgcagtttgctaaaattccagaaggagattaatttaccagttcgtgtcatataatacttgttttcccgtaccatccagcacccattttggcaaatagaaatatacaaggatggtggagatcgatgtactttagagtgtatttctgagagcaaatgacttcatagtctacaaaatagtggggcagtataaattcatcttatgtgaaaatatggatgaacatggcttttaaaaggagaaaagaaaggagaccgatgaatgtgtatatatacttttaaaag

SEQ ID NO: 75577 - DNA, 1048 bp, Homo sapiens
aagtcaggtcccgcccaccctgcctaaggaactgcagagaggtggcaaatcagcaaaaaggacaccaggctcttcttggccacttgtaggaagatccctttacaattttgactaaggagattttttttttcacagttgagttagtttgtgaaaataaagaactctgtagctcaccaaggtggagaaacgcaattcagaaaagtaatttctccaaggtcacttctttttttatgtcttgccatcactttaaaggactagccccactcccccatgtgtatacacaaggaaattgcagaccaattagttgtcttggcctgactctaatgccttttgcaagtagctttccagaagtaaaagtcccagtgatgtattcccatagaaatatttttcagttgtttatgtcgtttactacaaaaaaaaagattcagagtggatggagtacaactctgagtatttttctagtccggaattttttattaataatcggtgctgccgggtcatgcatgctgcaactctcaacatttcccttatttggttcagcttttagcaaaaagggctacagttcaccctgcagagtattaaggtttctggatttttttctcccaactgtggcccaaaagaattaaaatctgttaatataaatagagaacatatttatcattcctcgatagttaattatagactttggtacctttgtgcctcagggaagccacgtgatataactggttatagaatttcagggttagggtttaaagaaaggagaaagccattggaaaaatgatgggctccattaaggagactaatgaatctggatgcagaaatatgtcagaaactggcataaacatgattgtagtagaatttattttccagtaccaatagggaaattattttaagttattacatttactgtattgggaaacttgaggagaactctttagttcataaagcttcaatgtcttttttttttttttcatggaaaaactcaaacctctgttatttgggagctcagtattgtgtggacacttacgagagttttctgcttaattga

SEQ ID NO: 75578 - DNA, 1085 bp, Homo sapiens
tctgccagtataatactgaatttaagttcttggggatattagtttaagtaatgtactaactacttctgaaggctgaatttctaatgtatctcagaaactggatatgggaaaaatagagttttatctagacgtgcatttatttccaaaactggtgaggcacagcagttgagttctcactggagtgacccatgcgagacctaaatatccatttctgtctgttacatatttttatgtgccttaggttttacaaaaatcccttgctccatatttacccaactatagaatataattagagtttgacactcacctcccctttgagaaaaggaactgagaaaattcagttctatgaaagttgaaatattttgtagatatttgtttaataaatattgttagagaaatttttctaaatggaatagacggtttttaatcctaactggaattcagtacttttcagctacaaatctgacatgatgtgattgtgattggattagtttcctattgctgctgtaacattaccaccagtttcatggcctaagaccacacacatgtattatcttacagttccagtggtcaaaagcccaaaatgggtctcactgggctgttgtcaaggcatcaatagggctgtgttccttctggaggctctaggagataacctgttttcttgccttttacatcttctagaagctttctgcattccttggcttgtggcgccttcctctgtcttcccagccagcaatggccagtcgagtctctctcatatcatatcactgacaatgattgacctgtcatcctctttcacttataaacaccattgtgattacatcgtgcccacccccagacaatccaggataatctccccatgtcaagatcacagccgagcatggtggctcacacctataatcccagcactttgggagaccgaggcgggtggatcacctgaggtcaggagttagagactagcctggagcctggccaacatggtgaaaccccgtctctactaaaaatacaaaaagttagccaggtgtggtggcaggcacctgtaatcccagctactcaggaggctgaggcaggagaatcgcttgaac

SEQ ID NO: 75579 - DNA, 1033 bp, Homo sapiens
atgggttgttgttttaaccctcccagctacccttaaaagtaggtgcaattattattttccttttataaatgggaaaactaaggctaagctatgcccaaagtcacacaaagtagagaaatcaggaaaagaaaagtatattgacttcagaatatgcccccttaacctctacttttcgtcaaaacatttcatgaaattcttttctaaatccaccatcacatatgtagtgatgtttaaaatttatttaaaatcatgattattgccttgcctttattaatactgtattttattttttcctaaaagaataaagttgtgtattcaccttgagttaccaaactttaggtgctttaattttgtttggtttgatgttaaatagtggttgcttctaatatttttatgttcatttttgggaatgataaactgttttccaagtatatgccaatatggaaaatttgctttatcgtatatttgataattgtgtttacatgttgaatgcactattcttgaatgtttatgaattatattttcatcaataaacagaacacatctcaaaaccagtataaagcatgtattcttcttcctgataagtcttacattttactccatagattcatcacattgtgtcgtcttgccaaaattattttttgtaccacttgacacacacagttcatttatgggcagggtgcttgtggtgcttttcggggagggggtaggaatctggccttcactaaattagtttgtacgtgagtttatttcaaagatactgtctttaacagatgtgatgtgtgacagtctagtctaattaatattgagaagtatgatataaagggagctggtttttgtaaaggttaagcatctgctgacaactctgggcttgccattagtttgtattgcagacaacaaagccgtggttctcagacaggaacgtacttcagaattacctgggaaacttgagcccccagtgcaagtgggtcttagtagattatggaatttggaggtgtgggcaaggaatcttcatttttaaaaagcaggttaa

SEQ ID NO: 75580 - DNA, 1036 bp, Homo sapiens
acagttttaataagtttattatttaataaactttattatggtgcatgatcccttcaggcaagaccttacgactgtcagcatggtggtaatccgatagcagtgtggtctttcaactttctaaccaatacgatatttcagaacctgctttttttcaatagccttttaaatgaccctaatgtactgtgaacccagagaacaaactgcttaagaactgacaatgaaatatgtcaccctttctctgggtgacgcaccatgtgatagacgctgccaaatccactaaagaaaatatttatttgtattgcctcaagaggattacaatagaaaaccactattcaaacatttagtcattggtgcctaatctttatagctgcttgagaaaagggctacttttcaattaaggcctgtgggactcttcctttcctagatgaaaaccttctaactgttgctaatttttccgtaggttgcccatcctcctggctatcctttgttcacgctggtggctaaactggcaattacactgtttccttttggttcaattgcctaccgcgtcaatcttctctgtggcttatttggagcagtagctgcatcattactttttttcaccgttttcaggtaaagtagttgattagttaaaattaattttgagcagttggagatgtagatttcttatggctcaagtacatacattaaaaaaatcttttgttgcttggtttccctaacacatgtgatttcactttcttaatttataatactttcatatgcatttgacccctcaaatgattacacagttggttttgtttcctacagtggagtgaaggtgtcaccagttcattatcacagttctctgattaggcagaactaatgaggtttgtcattttgtgaagatgcagatgggccagtttaattcaacaatatgaggttcatcttttggtaaatggtaaatatcatttaattattcacagtattgctgacgagcagctgcctatcaggtccagggctaatacctaattatattgtattctaaatatgaacatgt

SEQ ID NO: 75581 - DNA, 1049 bp, Homo sapiens
gctgctaaaaattaatttgattaaattttagaaggcgaagacttgattctgagcactgtgtctgctattcttagagcttcagctaagattccattcaataaagaatagaaaattaaaataccataccttagagaatgcggaatctcttgcttaagggacatttggattttccagctcaaagagtattttagattattgccatagagaataatgtgaagctcttcctaatttcagaagtaactatgcataagtaacaaatagttaccaagtttttgtagttgaagaagaatggaaagtactggagcgttaatttccattcaggagaatatctgtcttgatccgtggttaattgatcatatatttctctcatacttgtattaaaattgcattgacttagactgcttaagcatattaagagcttggttcatttgcattttcttataagtagagggacatattaggctcaaatagcagcgcttcattttgaagggaaaaaaagcagggcaaaaactcttttttaagactgtagagtcttttctgacagctagtcagagttagaattagttcaaggaaatgttaataatgcactgcctggcctaatccctttgatatcaccaggtatcctcctgttcatgggttaattgctttaaaagctaaggcaatattctgagcggtgggccgcttcaccttttcacagctgttaccattgagtgacaactaaatcccatgtgtaagatgaggaagagctcaatctccaattgggagaaaatttatgtaaaccacaatcccttcagaatgtgcggaagtcatagactttcttgatttactctgcttttcccagaaagctctattgttcactttcctaagtcccatcaaccctttgtagcagaatatcacagcggcagcagatagcttgaaatatataaatgctatcatagctctgattaatagcagtgcttatgagtcaagtctgataacagtgcagctctccactcaatttcagatactgctaatggaatctgtcttctccaattgtaatatgagaaggc

SEQ ID NO: 75582 - DNA, 1010 bp, Homo sapiens
ttctaggctgactgatttagaacttatccctcaagcagcggagagtccttaagtttttgggctgggtagtcataaaggatatgttttaggaaacttgatgtgatgttatattgcagaatagattgaaaaacagaagacaaattagggaactcttaaaataattaagtgtaaggcagtaaaaatacaaataggaatgagtagacaggaaagtaatttggaaggaagaaataataatgtgttgaatcaggatcgctggaagaacgggaagctgaaagaaatgggaaactgctgattttttaagagaaagaaaacaaataaattgcaaacagaaaatcaaagtaaaaacaggtttactgatattgagatttttatttaatcatttaaaaataatgattgactaaagccatagaactaccctgtaactttttatacaaaaggatacagttgaaaatcaatggtttggagctatagaatatgataattgttggacgcagtaatgcttgctgaattttctaacactattagaaataggcatttcataatagctttcattttcatagttttagattaataaggaaatagaaagttgttttggtttgatatgcactagtaaattcatccacactaccagtctcaaaacaaatctctgaaccgagatccagattcctgattgttttaaatggtatgggttttgttggcatttgtgggtgagaaatttgtttctgagtgtagcatctgattcttctggtgttattgaaattcacattcccatcttcttctttagaaaaaaaattagttttaacttcaccgttgtctaaagaaaaaaaacccttgcaaagtaagaaatgcactgtataagatattgaaatcatcagatattgtgatcaagacattctttgccatatgctgagagatgaaaatagaaggtacctaggtccaaacattctacctgaagtgagaatgcatttttctgaataaatattttttcatttcattaatttttacaatca

SEQ ID NO: 75583 - DNA, 1055 bp, Homo sapiens
tatttatgaaatgtaagtcatcattatgtaagttagggtgcatttgaatgcaagaaacagaatacctgacttaaatgactgagtttttagcctcacatgagacgcagtctggagataggtgatgttaggattgataatatgagcagttcagggacgtcagtttctgaggcagtttttctgccattctcttgacttttccctcccagtcacaggatgcatgcccagttccaaacatcacaacctaaaacaaagcacagtgcttcttctggggtatctccctctctctatttattggaaataacatgtgccccagaagccccccagcagacctccactcaggccccactgaccaatactgagtcatatactcacacctaaactgcttattagcaaaggagaatgactagactgagaacattgcagcctgagctacctgatcaaaatgaagattgcattagtgaaaaagaagaaggtattcactgttgagtgggcaatcaacagtgtctgatacagttattctcacatagcaaggttattttgagaaccaaatgaggaacagtaaagtccatagcacacagtgggtatgtaattaatattaatatcctccagaaccagaactattgggtaataaagcctaattcagtaagtattttttgagtatttacagtttagacttagattaaaattaatttgtcatttgctgggtaatgtcttacataagacaagtaaaacataagcacaatttctcaaatgatgatatccgaacataacaaagctttggtggtgttaatgggagtctcttctttaaaaagagggaatgaatacatatcaaagtatagagttaagtatgtgttaagtatagaattaagtaaaatgattttttctaatataagtaaattatttaaatcaaaagaatgtgtaaacttgtaaggatatgtaattaatatagggctactaataaattcagataatttgaaatgccaaaagagtttttaactttgaggcctagattattacatgattgagcttctccagggcagggattatatcttatt

SEQ ID NO: 75584 - DNA, 1060 bp, Homo sapiens
tgctgcgtcttcaggcaagagatgcagatcctgaagtgctgttatcggaaaccatcagacatttccgtctgtactctcagaaagcaccgaatgacccacagcaagctgatattttaggtgctctaaagcacctaagaaaagaactgcaaagtctgagaaataggaaaaatgtctgagacagcaaaatatgaaaaacctgctcatcgttcagcttccaaaattctgaagtctggaagtttttccttcaagaaaagaaactgcataaaaaatttaaaactaagtcatctcccagatataagtatcatggtccagcagtactgtttaatggggtattcagtgactaaggtctgctatttatgcaaaattctgtttatcccgtgttaccaaattaccatttcagtgagaagcttttgaaaagtcttctgacttccagtctttcaccagatgactgcactggattagattctagaagagaatgaaccattttcatataactaaatattggtcatgaactgtgtaagggccatgcttattgggatcagttttaaagttaaattcttttgatattaataccagaccaaagacattttctgtttcctggaaaaaaaaaatgaatcatgttaggctttaggtgagagtacattttttacaaagtagctatagttgttacatagtcttacacttcaagctaaacaccaaatgggtgatattttgaaaaaagtttgtgttttactgtcttagatcgttcttggaaatcactaaaaaaaaaaaaagttaatttgatgtttgcttatttcagttgcagaaactggcgagtaaaaaagattttgcatttacttaattaattttatatttatgttttatttctatttggactcagagatctagacccaataattagtaggctcctgctgccaaaatgcaaaggggaaaaaaaggcagggattgggggggatggggaagtggcccaataaattcatttctgttacaagcatcttttatacatattactaaagagaacatagtaagaaatgcaaataatagttctttattttattat

SEQ ID NO: 75585 - DNA, 1084 bp, Homo sapiens
aatataaaggtcaagacacaaaggcacaattatggggctatactcctatcccagtgatccaacctcacagagtaactgcagagttgcaagtcttctggtacatagttgccattagatgaggataagtataataaaagatacatagaaataagccaaatctaaggtttaaccatttcaaaactttagcgtataagaagtatagggtgaagtacaatagatggaaatggcataaaattttttaatcattaagttcataaacgttgcaaactaataaatggagattatgtcctgtttttaaaataacaaaccataatcatcttctatttagaagtgttatctgaaagggtattttttgaaatgtaaccttttaaagaaggtacttgatatttctctcagctaaatgaaatattcccttagatagttgaactgttgaagatatctttaataccagtgatggttgttcacatataaaagtgtgtgtgattaaaactgaaaggggaacactgcttggaaaatcacacccagttttctcatccttggattatggacctaagtgaatcacccattaccctggatccttgagtatcagctaagacacaggaattcagggccgggagtggtggctcatgcctgtaatgccagcactttgggaggctgaggcgggtggaccgcttgagtccgagagtttgagaccatcctgggcaacatggtgaaacctggtctctacaaaagaaatacaaaaattagcagggcaaggtggcatgcacctgtggttccagctacttgagaggctgaggcaggagggtcccttgagcctgggaggtggaggttgaggtgagctgtgattgcaccactgcactccagccttggtgacagagtgtctcaaaaaaaaaaaaaaaaaaattattataaaaactcaagagcttttaaaaattactcttgcaaaagctacagaaactttaaagaggattgtttataaatggaaaatgattcatttatcaaaaaactagggttccttagtctgacaggtgaaagttttcaaaacagttcgttcttaaaagcataaaaaactgagttcaattat

SEQ ID NO: 75586 - DNA, 1074 bp, Homo sapiens
tgtaggatactttaaaaagaaaggtggcaagatcatacctctgtattctgaggcttctttaagccactctcgacctgccactgccttctgccaggaacaaatcacacatggaggaaaatattcctgaccctaatccagaaatcaaacagctgagaagtgaagagggcaaatgtggggataattgaatcctgcatccctgaatgagaacccagtatcatgccatggttatgagcccagggtcctgaaatccaagacacgtatgtggaaactcaggttctgctgttggccggccagtccctcaacctcttaaagattccatttttgccctcgctaaaacagcgtctgcttcatcaagttgctctgaaagttaactgagacattccatgtaaagcactcaactttacaaatgataaaaccttgataaaagttagctacccctaccattttctgaattcctattggagttacagccaaaaccaaaaaaaagttagctcttgatcaaattgtgctgaccattatctactaattattttgtgtgtatacaattcatcttccccaaaaacatatacattcctgaagggtaaaattcacatcttgttcttttgtatttcctacaggtgaccatttataaatgcttactcattcctgtatttgaacataagaacacaaaattcttcataaacaattttgaaggtgacagggacaagtagttagttataattctcaaataaagaaattaggccaggcccagtggctcactcctgtaaccccagcactttgggaggccaaggcgggtggatcacctgaggtcaggagttcaagaccagcttggccaacatggtgaaactccatctctactaaaaatacaaaaattagctgggcgtggtggcggatacctgtaatcccagctacttgggaggctgaggcaggagaatcacttgaacccaggaggtggaggttgcagtgagctgaaatcgcgccactgcactccagcctgggcaacagagcgagactgtctcaaaaaaagaaatagaggcaacgatgatgttaatcaagttagccagcagatttgct

SEQ ID NO: 75587 - DNA, 2212 bp, Homo sapiens
atatgatttgggggattatcttaaatgttattctgggcaagaaataagacagtgtcaagtgtttttagacagagcctccccaactttcttacaagtccaggagtttatatgagagtaccacataataggtcttcagtggcaggggaaattgtgtgtttagctgatctgcccatgtaggatagatttataatacgggagccattcttgtccttaaggaactatcaaaaccgagttaaagaattttctttcccttccaaggtatggtttaagaatcgaagagctaagtgccgccaacaacagcaacaacagcagaatggaggtcaaaacaaagtgagacctgccaaaaagaagacatctccagctcgggaagtgagttcagagagtggaacaagtggccaattcactcccccctctagcacctcagtcccgaccattgccagcagcagtgctcctgtgtctatctggagcccagcttccatctccccactgtcagatcccttgtccacctcctcttcctgcatgcagaggtcctatcccatgacctatactcaggcttcaggttatagtcaaggatatgctggctcaacttcctactttgggggcatggactgtggatcatatttgacccctatgcatcaccagcttcccggaccaggggccacactcagtcccatgggtaccaatgcagtcaccagccatctcaatcagtccccagcttctctttccacccagggatatggagcttcaagcttgggttttaactcaaccactgattgcttggattataaggaccaaactgcctcctggaagcttaacttcaatgctgactgcttggattataaagatcagacatcctcgtggaaattccaggttttgtgaagacctgtagaacctctttttgtgggtgatttttaaatatactgggctggacattccagttttagccaggcattggttaaaagagttagatgggatgatgctcagactcatctgatcaaagttccgagaggcatagaaggaaaaacgaagggccttagaggggcctacaaaccagcaacatgaaatggacaaaccaatctgcttaagatcctgtcatagttttagatcattggttatcctgatttgcaaagtgatcaaaagcattctagccatgtgcaaccaaacaccaccaaaaataaaatcaaacaaaactaagttgtgaaggaagggagggaaggtcatagccttcttaagcagaggtgttccattgttttagccaatccttggttgaatcttaggaatgaacagtgtctcaagctcattcacgtttcatgaccaactggtagttggcactgaaaaaacttttcagggctgtgtgaattgtgtgactgattgtcctagatgcactactttatttaaaaaataatgttcataaggagtcaatatgtagtttaagagacaatcagtgtgtgtcttataaatggtacatctgtggtttttaatctgtgctagacttcaaaactgtgatctcctgttattgtatgcaaccttgaactccacctctgcaggggttcttctgtgattaaataggttataattataagcaaaattcagagcaactgagtactgatctaaaaagattacctttggctggaggtgagctgcactgaaactttacgacaaaatgtctctggacaaagagagtcagagaagagaagcaaaaggacactaattcatctgtaatttactgttggtaagcctagcagtaaagagacattggtcaattgctctgaccctgatgaattattaaactgagatcattgtcgtttatgcttgcagatgttaaatggaaaagttatatatgcataaaccttttcttcctggatttggcagatatgtataattatattaaaatggttctagcacaacattgggtccagtttaattttacaccgctatttatgaataagaagcctacattcagcctttcctccccaaaacacgtttttcttaggacagagagtaaattagcaaacttatttttactttttttttttgctaatctatgcataaaatagatatgaatgacagtggtaggtagactttttgtgactttcatcaggattgctctgaaattgagtttggagagcctaacaacaagatcttgttttccttgcttttccctccctacttcaaacctgaacgatttcttaggcactttattagaatgttt

SEQ ID NO: 75588 - DNA, 1304 bp, Homo sapiens
aaaacaagatcttgttgttaggctctccaaactcaatttcagagcaatcctgatgaaagtcacaaaaagtctacctaccactgtcattcatatctattttatgcatagattagcaaaaaaaaaaagtaaaaataagtttgctaatttactctctgtcctaagaaaaacgtgttttggggaggaaaggctgaatgtaggcttcttattcataaatagcggtgtaaaattaaactggacccaatgttgtgctagaaccattttaatataattatacatatctgccaaatccaggaagaaaaggtttatgcatatataacttttccatttaacatctgcaagcataaacgacaatgatctcagtttaataattcatcagggtcagagcaattgaccaatgtctctttactgctaggcttaccaacagtaaattacagatgaattagtgtccttttgcttctcttctctgactctctttgtccagagacattttgtcgtaaagtttcagtgcagctcacctccagccaaaggtaatctttttagatcagtactcagttgctctgaattttgcttataattataacctatttaatcacagaagaacccctgcagaggtggagttcaaggttgcatacaataacaggagatcacagttttgaagtctagcacagattaaaaaccacagatgtaccatttataagacacacactgattgtctcttaaactacatattgactccttatgaacattattttttaaataaagtagtgcatctaggacaatcagtcacacaattcacacagccctgaaaagttttttcagtgccaactaccagttggtcatgaaacgtgaatgagcttgagacactgttcattcctaagattcaaccaaggattggctaaaacaatggaacacctctgcttaagaaggctatgaccttccctcccttccttcacaacttagttttgtttgattttatttttggtggtgtttggttgcacatggctagaatgcttttgatcactttgcaaatcaggataaccaatgatctaaaactatgacaggatcttaagcagattggtttgtccatttcatgttgctggtttgtaggcccctctaaggcccttcgtttttccttctatgcctctcggaactttgatcagatgagtctgagcatcatcccatctaactcttttaaccaatgcctggctaaaactggaatgtccagcccagtatatttaaaaatcacccacaaaaagaggttctacaggtcttcacaaaacctggaatttccacgaggatgtctg

SEQ ID NO: 75589 - DNA, 1057 bp, Homo sapiens
gaaggaaggcttgaaattctccttcactcactaaggggccaggaaactattctccttctgcccttttttgcctgcccgtcaccacttaatcccgtaagcaagggtcttcaaggcccgggttgctggtggagagagacccatccttgagcaggtttcaagagtagtcacgtggtgttgtaacccttcccttcctctgtatagaaatcctctcctattctcatggacttgtacgtgtgaaagcagcttagctcttggacagtccaagtatttttacagatgaaaaaatagagtaaatgacttgctcaaggtcataactaagtttggtggcagagtcagggtatagacgcagctggtgcttttaccaaataaatcaacacaaaaagaatgtattttccttgacttcttagggattgaagagaattttctagttctgagccatttaacagataaaatatctacataatgtctctagtgacacccctcttgttttagttcccctaaacttgaccttaaactggagagggaaggtcaactccagcttgccttgtgagtgagccctgtacagaattctctgcaaagtgtttagcacataaaccacatacacacctgggcctctccttcggctagaatatgtttatgaaagcgacagacatcagtgtcagctgcaaattgggaaaggggctttttcaaagtaggttagaggaagttttagcacttgcaaggcttgaaccaaagtcctcactaggagaaaacaaatggctccaaatggttggtggtcttgagcttggccttggtggcctcacttttaccacagttacggcacccatacagagagctcattcaaaagttcagctaaggatttgtcctccagaaaatgccagtagttcctcttctaagccccctcgtacaccaatcatagctccttcattgcagaacatgaacagggctggtaaagagaattgtcaagattgcagcagggggttgaagtggtaagtcagtaaacacagcacaggagactgagtctatgtgctgagtggcactactctaacaacacaga

SEQ ID NO: 75590 - DNA, 1049 bp, Homo sapiens
cttgaagacttttttggaatatgcttaaatatttgatgggtgtctattaaaagttaaatacttgtttgtttagctttcgttccttagacacatataatcaagattctccaaaaccctaataaatctgttacttacctcgaaatctaattacccagactactaattaggtgaaaatgattaccggaaatgacttcaaatgtggaataatagtggttgagcggtttttccaagtttgtggtttagtgagttggtattttagatgttaaacgcactgacattttaggttcgcagcagttgaaagtggtaaaaagctaagataattaaaatctctgccatggaaaggcaacagtctggggagaggtagatttcttgaattgtttctttgtttctcaccaatgggctttgttatcagcattatttatttagccaaagagttctttgtctctgcaaatggccccaatcaagttttgtttgagacaattagctagtgccagccaatgagtcctatgcaaatgtagggataggaatgcaatgtgtgcatttgaaggcacgggtttttgttcttggggaaggcagattgtaattgctttcttcgggtactttttttttttttttaagtttagggtgggggtggggaagacaggtttatctggtctccttccatcccctctagttccagagcagctgggggtgggggtggggatgggggtggggggagtgtctgcaagtcctttaaaagcctctgcctcgcctagtccgtgctctttttaagttagtgctggaacgtggaagagctgctgcctccgaagcagtaaaccagcccctctgtttgtttgtttgctttgcccttagttccactgctccaaacccacccaccaaggactctgaacctgtccaccccgggcgcatcaagatcttccagctgggtacccccgatttgggccgactttgcacctccaaacaaccttagcatgatgtcttatcttaagcaaccgccttacgcagtcaatgggctgagtctgaccacttcgggtatggacttgctgcac

SEQ ID NO: 75591 - DNA, 1039 bp, Homo sapiens
tagccattttgcaatggtaagggcaaaggagcccctggaaggatctcggccctggtgctttctgtgtgttactggctttttatgttggaatgtgctactttattgtatgatgtgtcaggcatttctaattgggtgagagctctacatgtaagaacatttccatatttctcaagggtacatctgatatgattttacgattctctatagcactgtagttcagaattttgcaaggtagtacgattaaacaaaaaatctccaatctccagtttagaggctgtttaaacacatatacaactgtattttaaagctgtcgcatatgtgtttaaacagcctctaagctggagatttttgtttattttcgcagcctccaaagaacagcattttgaaaagaaaagacaatacaaaaacataaagtctgtattgtaggggcaactaaattagttgtactgaggataatacaaactcctccaagaaagacatttataaaattatattaagttagatcttagggtagaaaagcatgacttttgtgctctgaatttaaatcagaaagaagttgcagttactaagtttcatttatggacttttgtgccttgctgtcttaagcaacgtaaatatgaaaacccggagtcctttaaagtcagtgagacctttatcttgtatccgccattttgaagcaatctctcatggtgtcaaagtttcaaagtagagatccttgcatataagtgccacattttaggaaaataaaggccagacttgcaaactgccagtctatattaacatctactttgaatctctttgctggggtggaggcggggagctcagctgaagaaagtaaataacttttctttttcttcctttcttttcccccttgagctctttttcttataggattgtaggaaacttgaaaggtagggagaaattctactagtttcacaactttgggtgtttgtgtatctactttcttcaaaactaaaatgtgcaaaaggcagttagagttaacaggaaactctgctgcagctgccgaggacccaaatgt

SEQ ID NO: 75592 - DNA, 1084 bp, Homo sapiens
aaggaaatttcggagtaaaggaagcaggggaaaagagggtaagagaagaactccctgtccatcattttaattatacaattagttcacatgctccggcccataatgtatattttaagcaaagcccagtgtctttaaagaacattctggtaatgtcggaggcctggatttgttgcctgctcgtccccccgtgcagcagcggcctgttttcctccccctgttgtgtgtttttattattttccctctggcttagatgtgtcaatcattctctccctgccattggttggagagtttgcgtcaaaaagttgccagagaggcgctttctcagcaaatctccctgagagcgggaccggcctcagctccaacacagcctccactgtgattaaaaataaaaattgctagagcagccctcactcgccacatctactttgtatgtattgcagaggggcccacgcgtgtttagaactctagccgccttcctcattttcgttctttaaaaaaaattttttttggttgtgtttgacttttcatggaagggtgaagactgcaaggtttctaactcaatactcttgatttcttttaggatagctggctatttggaatttaaaggatatttgactttttctaacctcccatgaggctgtaaggtaagtgtccgtctgtcttgtctatatccatatctacgtgtccccgtgtctgtcggccatcaccccagtacctccaatagaccgaccgatgcccctctgcgaacgtggagttctgtaggcggatgtattttttctcttacaaattttgaggtgtaataacgatcgttgcaaaaagaaaaatgtgatctagagatgagagcggtagtgggagagaggcagagagcgtgctcctgggggtcgtcgcttctgcaaaacgtcgtcgaaacgctgcgaatgtaatctggggtgttttggaaggttttgtttgtggttttgtttttatgtcaacgccgttctgggcttctcccgcgatctttgcgttttggcccccagatttggttggggtcgtttggatggatcccagggacctttttagagtccgagacaaaaagatgcagatg

SEQ ID NO: 75593 - DNA, 1033 bp, Homo sapiens
atttaactctgtattcttttagttcatctctaaaagatagagactatatgtgcatgtatgccatcattacattcttatcttatttcaaagagaatgcaaaaaaagtattcaaataattataaatacaatttatttttttaaaaccccctttctgggctagtagtagttactgttatttatttttgtccattttagcttcaactacttgccagtcctagaaattaatgggtttaatttcccctcgaatttaggacttttctagtaacaacttacactcaaatgtagtctttcttataaagattctccccctctctattttatttgctttccattcataacacagacattaccatgaaagttttcattggttatcgatggagttattgaatgtggtaatcaaacaacagattaaaactgagtctccatgaggtgaccagtgcatgaaggtttctttttttctgaagaaatctcacaggaagaattaaatgctacctcttacaaatcagtcctactgatctagtgtgtgtctggacacaccagagtctttgagacacatcctcaccaatagtactttaccttctgggtatgaattgtgggtcatggtgcctgtgcatagcctgtggtctgtagagaagccatattgattaatacttttcatgcaaattattcagaaggttgagggttttttttttaatccccaaacctctaaaaactcattctttatttttcaaatttggtctttttaatttccttcacagctaagaggatatgagagcccctttgttctggagctgctgattctggtattcaaggtgtttgtttgttccaaggactgcacttacgattttaaagtgccataaattcttcgtactaagctcctatggtctttataccaccttaccagtttagattatgtgatctgaagaatgaaaaaaaagtttttatgagactaggtagctattcgtattataaatatgaatttattaaatttaactggcaaaaagatctattatgagtaaagaaggtgaaaata

SEQ ID NO: 75594 - DNA, 1041 bp, Homo sapiens
gaatagcatgcatgaaggcttcatggacagcaaagaaggaaggagaactcgttaaattaacacatgaaatagcaagtcagagaatcaaaaggccaatacattgattaattcctatgatgatgtagagtatctattcagcagtcaattaaccgtttaacatattcttgatataaaggaagttaaaaaaatctccaaactcatataaagctataatccataattggagttttaatgcctctcttaatataaggttgaatacagagttttaatctattctcaaagaataaaatgctttacattttaatgaaggtgtggttttgataataacaaacctgagaaaaagtagcttttaattcgcaacactttaaaatcaaggaaactacctttgaacctttttttctaaatgaaatttttagcagacacatgtttttttagcaatgaataaaatggatgagaattcttttttgttctataagaagcagcaataccctattaattttgacagacaacttggcattagccattttaaaatccaacgtgggatgaagttatgcattactagtctctctacatttttgtcaagagatgaacattttgccagatttttaataatatgccaagagctttgtcagtcagtttatttagctctgcatggttatgccagtttttgtccaccaccccactgggtgtaacactgcccgccacagctcacataactcctcccctgcaattagacaaagtcaacacagcaatcactcccaaccgcccttgaggtacctgcactatcaacagtgcagattccgaggcttgaacaagctttgctttgtcactgcctccctaccccaattaggacttttttcagcccaggcaatttagcaccaacaccatgggtggaccagataactcttttaaaaaagcccgtttaagtcattcttctgcccttccccctccagcccaacccaatcaattctttctcctccctcttttcactacttcctccactgccgtcccctccctgcacctccccccagcccccgagaa

SEQ ID NO: 75595 - DNA, 1081 bp, Homo sapiens
gctgccctcagcagtaggctcagaaatgtcaattttaattaaaacatttattttcaaatacatttcatggttcatatgtagtgatatgtgcctacttcatgcaaatattcaaactgctgggctgaggaaattgaagaaaggcattttgataaagagcagtatgttcaaaacaaagagatgcaaagaaaagaaaatccacatcatgcttccatttttccttagtccacctgccacattgtttctcatggacttgcccactgatatgtaaaggccagggaactccactgtagaaatctggatgttagtgggtcatcgtgggcattggtaggacatcccttcactcttatgtgagtcctgctttgtgtacaattcctgtttacttcagtagaagaaccacccctcccccagtgtttccagatcagaagaaaacaaccaaaatagccaactcccaattcaaaattcttccaaactctgtctttccctgagtactattttaggtttgagtcattaaagctgcagagaggtgtccaaattttacgattaccttctgagctcacctctcctcttgctctctgccctgcagagctcacgcacctgccaaacttctgttgacttcccagggaaaccggtcatgacttcaacatggccaaaaatcactgaaacaaaaatgtggccagcttaaataagtggtaatttaggctaagaatttctgaaaattttgctcaaatttctgtaaggatttttatgaatacattttgatttaccagaatttagcattggaatattattaataatacaatctgtacatgtgctatgctaaaaaaaaatcattgtcattaggttaaaatcaaagacaaccagcaatatttatcaatgtgatgtgtcttttatcttgtagtctgaggagtgtgtttctgattaaggtatattctaaaatttgagcaaattattacatataaatacagttgcatcgattgctgctctcaatatgcttttaacctcttcggaggagccattaacatcacagtcagaaacacatagtcaagtccagagaatgtatgcaggtatcgtaattggctgt

SEQ ID NO: 75596 - DNA, 1074 bp, Homo sapiens
acctgactctctgtatgacctatctctctagccttatcccttgtctgtctccacctaaccctcctcgatttcctctgcaatgattcaaactccactttccctaattttcaaacactttatgtttgcacaagctacactttcaatctggatgctcttctcccacttcccaattctggaaaacctctatttatcccttactactcacctccaaagtaatttctctgacgctttccctgaaacttctaggcagaattgcctccttcctccttcctgttcctaacctaccattgtacttctaagcccaaactgagctctctagcctaccattgtactcctgtgtttaccaccgtgtgcttctaagataatattcaccacatttttttctgcatgtttgttttcctgcattagactgtgagcttttagggcagaagtcattcatctttgtttccccagggactagcattgcaaacggtccttagctctgtaacttggtatttgagggatgaatgattatatataatatactatggaaacattgatgatgcagtcactcactgtgctgttcgcgctgaatgaaacatttgaagcatcgtgttaacatagtaaataggcataggtgacatatgagagaggctgaagcagacctctttgactgtggtattcaggcttccttgctggctttctttgctgggggtttctttttgaggacatctattttttttttttttttttttcctgagacggagtttcgctcttgttgtccaggctggagtgcaatggtgcgatcctggctcaccgcaatctccacctcctaggttcaagcgattctcctcctcagcctccccagtagctgggattacaggcatgtgccaccatgcgcagctaattttttgtatttttagtagagacggggttctccatgttggtcaggctggtcttgaactcctgacctcaggtgatctgcccgccttggctttccaaagtgctgggattacaggcgtgagccaccgcgcctggcctgatgacagtctatctataggcggcatcagcaagagatcagagtcaggggaagga

SEQ ID NO: 75597 - DNA, 1029 bp, Homo sapiens
ttgcttactcagctactaattgctgagtgattatttaggctttatttgggctgttttcttcttcacagccagcaaaagttgcagtgaaaaccacatggtacaatttatgggaattcatgagttgtaattcattcacaattttacttctagatgaaaggcaatgagtatccctttaagtgagaaatttgacaaaaactggatttttaaggaagcatcacctcccccaaagggtaggcttcctttctgagatctcctagctgccaaggttgctaaggcaaacctttgcatatacaaatttgggtcaatgtgttgacaggatgtcagatttgtgtagctaagggagcttcagcatgaatattgagctgtatgccactccattgatgcccaaatgaacctgtaggtgcctatttgtgcctgaggctattggggtggaaaatagaagcccttcttgtgaaaacctaaccaaggtccacaacccagccttgaccagcagcaattggttttcagcaacaactgaaaagtaaattcaaagagatctgaatgatggagcactggtttcttttcatcatacagcctgtaatttcatgttgcaattatttttcctcataggcttacctgtgcgtatattagaagtcttcccggtgccaggaatcaacaaagagttgagtaacgaagaactaatttaatcagctaatttggagaaactaagtcttacaactattatttagttcatcaaaacaaataaatctcaatgagaacaatgaaatatgtgataattcttttttttaccagaaaagtactgcttgaaattatattttagggctatgaaaattttacttgagattgaacacagtaaacttcagatgacttttatattatttaagaaatagaagtgtgaattaaatagtattcaccataagcacttgttttaacttcttaatgttctgttacgtaacattttgttatctgggatttcactaattagtgtttctacatatgtatactacaatgataattgatgttataatt

SEQ ID NO: 75598 - DNA, 1020 bp, Homo sapiens
agttttacttgatatttgtttttaattattattttataagaattggcaatctattagaaaaccattagctagattatttgaataatatccatatcctccaatcatgtaagataatataatttattttctttgctccagtagacacctggggtatttgaaaccttgagcagatcattttttcacacttccctcgtcttatacaacaaaattatcttctgtaaaatttataaaatgaaaccaataataataatgtctaaaaaagaaatgtaaactatgaaaattttattttactgaagtttaaatttataattgttcaggtaaaggaaaaataaagaattctaaataaatagagattatagtacaaaaaatggaaataatgaattaatagtctgagtatattaatgcatttttttgagaaaagggaaaaatattgtgtctacatatcagtctgttgcagtaataaataatattataatttctgcttttcaccttgagctataatttctgcaaatttgtcagtgactttgtcaaaattgatctttacacatttatattcaatagataatatagtcagacttatcctttccctttgttgattaaagaacacttttggccgggtacagtggctcacgcctgtaatcctagcactttgggaggctgagtcaggaggatcacttgagcctagaagtttaagaccagcctgggcaacacagaaagtccctgtctcaaaaaaattaaaaaaaaaattaaaatcttaagaatatttttaattaactttagttttgaaatgtttcttttatatgaagcaaaatataaccataggaaaagttttaaacaattttggcagaaattcataaaaatcccattttacaataaatcccatgtctttgttccttcagaatcaattctaatggctcttaaatatttctgcagtagaaaaaaattaactataaataaaaattccaacactcaggatgacaggactgaagtaccttgaactctatttctttgtctttataa

SEQ ID NO: 75599 - DNA, 1051 bp, Homo sapiens
gtcctctgatgcatcttggaggccacagagaagtaggagtagttctccctaaagcagacctaaatcatggtcatgacttttacacttgttttcatgatattggtgaaggaaaaaataactttttttctcgtactaaatgaatccgcctattgagacccatttgaagagaaagagtgaaaaacatgagagagaagagagagaagaaaaaaagagtaaaaggtatttgatggagggaaagaagaatgagagggggtagaggaagaagaaatggaaagagcaaaagggcagagaaagaaagaaaaagtgtgtgtgtgtttgtgtgtgtgctgcacgcacgcatgtgcagagtgggtctgaaagagggacagaggaagaggaaaaagagaaagataataggaatcatcaactagattctctagcagctctcacttgcttaaaattagtggaaacaaatgatggtcttctccctagagttctctcaagttattttcccttgaacacaagataaaatgtcaacattctacttggaaatttagtacttaagactgtatatactgttacttgggctccacttattcataaagatttcagcattttagaataaaaataattttatttaaaagtgctgcctctattagaccataaaacttttcctctgagcagaacaaacaccaaagcaaagctcgtttttattgtcagagtatgatgccatttccataagagatggaagaagtccatactgcgttcttttctcctactaacatgagtgagcgacactacccacctgaataggcaggcttcacagactgaggctgaccaagactgtagattcaacatttagtagatgtcttgccagcatctatttcctgcttccctcttcccagcagtccctagtttccttttggggatcaacataattttgtggaagctaaccttactgcctcccatttacgggtgcaatagatgacctaggccaagccaattatctcatcccatcctcctgactacagcaatagaatcaagggtagaagtgtgaagtgagcagaccagt

SEQ ID NO: 75600 - DNA, 1097 bp, Homo sapiens
tattgatcattttgaaatttgttgctatatttctaaaatgcaggtggcttacctaacatgataaacactggatgttactgtatttgtttgtttatttgcatatttatgtctatcttagtgatgaaaaagtcctagaagatcttcaaaaagacaatatatttcagcagagaggcaaacattacacatttttaatcaccaaaagcagatctagccacagaactgggtcttgaagctgcttcccacagccctctgcagctagggatggcctccaggaggaccagccttaggaaggtgaagggtgcctcaggagcacccctgcccaattcaacaacaagaaaaaaaatgagagctgatgaataaaatggaaaataactttcccagacaagagagaaaacacttggcattcctgaggaacagctgcttgctggtagaagtttatgataataaactaaactgggtgagcatttcccgagaagaaatatttaattatcctgctcaccattatgaggaacttctgccactcttcaggttattatacagtaaataaccatttttctaaaggacagagctgttttaattatatgacaatgaatgcataattattatgtttgttaggaatgaatcacaacagacttgatattgctgctctggttagtgcatcttaattactttttcatttattttgcatataaaagcgatttgctaattgtctttgctgtaaatatgcaaaatataattagtcattcataattctttatgtgttatctaactgtacatttgtttctaaggaacatatattaaagtgtgaatatttaatgggcttttttgtgtgaattcttttttttttagacaaagttttgagtaaatattaggcacattagaattttaactctattcttagagaaacttgtgctgtgaaaaaatggagaccaaaaaatatggagttatgaagtgaatgccagactgtgtggaatttaaacatattttcatgtgaagacacagatggtgatgggaaatatcctttactaagcctttaaattaaccttttagctactcacccaagctacccagataaatctttaagcattaccaatttt

SEQ ID NO: 75601 - DNA, 1064 bp, Homo sapiens
aatatacacccacacccatgcgcccctctgcaacatcttcctcacctcacttgagcttccatactccatactgggcttcccctctctctggaggagaccatcctcatctcacatagctcttgaagttttggctttaggaccaaattgagggaataagaatggtcattgcagaaatcctgtaaaaattttaaaatattaaatttaaaaattacaattttatcacgcagaaacaactatatttttggtggaagttttttttttttttttttaatgtagtgagcaaattagtaaagctgaattgaggagggggtaaagtgttatgcccaagacacagaacttacattttgaaagaattaaatttgaaatgcataccgtatgtttttctattatacaatctccttgctactgtaattgctatttaataagagtgcatcagagaaactgtatgaatggaaacctgaccattaagcactgaataccaataggatatttttactaataaagttcaaaggaaaaatgatcatacaattgttgtttttgtaggccattaaaaatatatatgctaagaaggatagacttcatgtgagaaaggagtctctgggctggatctattataatagatgttacaataaacttaatgtgaaataggagtcaaatggaggcacaaagaagttaaataacttcaccaaaattatatatctaaaaagtaatagaattcaaacttacatccttaggcttctatagcctatgttttaaccactttgctctgttacctctaagaagatttcataaaagaggtcacatttcagctgagctttaaaaaggcaagtagcatttcatcagtggtggaggagaaggggaattctaggcagaagtaacttatacttgcagggtgtggaggcatgagtcactggtatatcactgaatggaaaaactgctgtgtgagtagagctcaatgtgtggggtccatcaaaaagggcaagttaaaacgaatatttggattggggttagcttatttagagcctttaggccgggcgtggtcgctcatgcctataatccgagca

SEQ ID NO: 75602 - DNA, 1126 bp, Homo sapiens
aagtcttgcatgagaaaaatttcaaaggaaattaataacaaaaccaaaacagttttgaagaacatgtgcacagtggacacaggaattgaacaaagtttaccatgattaacattatgttttcttagttatatatcacattgaattcctttatcaactctaataagaatctactgattagtgttctacattctgctttttaaagaaaaatttttgaaacaatcagacttaacagaagggttgtaaatactgtacaaataaaatttttcccttttgagaataagtcgctgtcatgatgctgcaccaccctccaatacttttgtatttccaagaagaaagaatgcttcagtataactacaatacatgaaaattgggaagttaacattgacatattactactatctaatcctcagacaccaatcattttactagctgtcctaattccttttaaggatctcagttcaaaatcatgtattgctttaggttgtagtggctctagtctcattcattctgacacagttccacagtctttccttgacttttttgactctggacatttttatagattatagggtagttactttgtaaaacacccctacatttggatttctgtttccacgtaattagattctgtttgtgctttttggcagacataccacggatgcaactctgtgttattgttgcatcctatcacatagtacacaatttcaatttgccccatttctgatgatgttcatttttatcactttcttaaggtactatttaccaggcttctccactttaaaactattacttttccctttgtaaatattttggaggtagatatatattaatagatacagacatatataggtcccccttatttatttatttgcagacagagtctcgctctgttgcccaagctggagtgcggtggcgtgatctcagctcactgcaacctctacctcctgggttcaagcgattctcccacctcagcctcccaagtagctaggactacaggcacatgccaccatgcctggccaatttttctatttgtagtagaaatggggttttgccgtgttggtcaggctggtgtcaaactcctagccttaagtgatctgcccacctcaacctcccaaagtcctgggat

SEQ ID NO: 75603 - DNA, 2144 bp, Homo sapiens
taaaactggaaattgttttgtttcaatgttactttttttcttctctcaattcagattccaatggtattacatctttttgatactctgcatgctctttgcaatcttctggtagttgccccagataatttaaagcaagtctgctcaggagaacaacttgctaatctggacaagaatatacttcactccttcgtacaacttcgtgctgattatagatctgcccgccttgctcgacacttcagctgagattgaatttacaaaggaattcagtgtcagttcctttacagaggaatgtcttatacttcagcagccctcggttgatagaaagcacaggagataccttatgacacagccaacattttgtgaaacaatgactggaacaaaacagcagccatacttacctttgaggttttatttaaagtttggataccactagctatattttgcttttttcccctcacattgaattttaattccattcttgaatgtagaaatttcagattctctaaaactacatgtcactgtttttatcctagaaaatgttgctgtcagaaggcaaaggaaatgttaccagtgttttcggttcttgtacttttaacatattccatttagaaattttgccattctgttttccattaataataggtgaaatacaggaaaactacatttgttattcctcagtttttaatgaccttttcagcatcaattgttaatcagattattttaggttttcgtaaataatttttttgcctctttcaaaaggttaacaattaagcatactttctgcagttggttgattggatttttttctgaggtacagcattaatactagtccaaaaaatgtcataaactgaactaaaatgatgaactattttatgtagacattaggagtggatcggaatacttctgctttctgggtaaaacttaaaagtttactatttcttatttggtaaatagattttaagccaattctagtaagaaattaataaaactaccttattttgtatttcacttaaggtggaggaccttaactaaaggaccatatttattcattattttaatattataagggaagtaaaaaaaagtgaggtatagtctaaatggtgcatataggaaatactgacagtgtttagcaacatgcagccctttgagatttctgtcgtaatgctaaacttgaataagatggaatggctgaacatgtggttagtcttttattttaagaagaattgagaattgatagatttggagatgagctttgcaaaggctgtttgcttttcatgtctataggtctgtcattgtcctttttcaaagcatttctgaagttattcctacttggatatagttaatggaattggcttaatttgatgacataataaatcacttataaaattttaaatatcaagtgaaaatttagaaaggccattactattctataaaccttataaacttgctctgggagaatgcattctaaattatatatagtgtttcagctcccattgtggtgttcatagtcttctaggaacagataaacttaagtattcaattcactcttggcattttttctttaatataggctttttagcctatttttggaaaactgcttttcttctgagaaccttattctgaatgtcatcaactttaccaaaccttctaagtccagagctaacttagtactgtttaagttactattgactgaattttcttcattttctgtttagtccagtgttaccaaggtaagctggggaatgaagtataccaacttctttcagagcattttaggacattatggcagctttagaaggctgtcttgtttctagccaagggagagccagcgcaggttttggatactagagaaagtcatttgcttgtactattgccattttagaaagctctgatgtgaattcaaattttacctctgttacttaaagccaacaattttaaggcagtagttttactggccatttaagctctttgtacagtgtcaatttgtaaaaaagaaaaaacgaaaaaaaatctcaaataaaacatgagataacattttaagacttccaaatcagagaagtgcttcaaattattttgtttggattaatttttaaaatgtaaagcatatacttgttgcttagttattttgtttattattttcatgt

SEQ ID NO: 75604 - DNA, 1092 bp, Homo sapiens
tgtatatggttttgcctttgaaaatccttagttgttaaggaattaaattaatgacagacttctgagatctttgaatcttgaagtattgcacaaagaatttttgccctctgttttgagcagacagataataaaaccaagagctctttcatattaagacctagagctgactttttctaatatctaaagtttaccaatagtaaaagagtttcatggtgataggaaattaaataactgatttaatttagcataaataatataattaaacataaacatagagtaagttagatgggttaaagaatgttgtattctcaattctctaggacattaaattgtatgattggacagatgaagcatattttggctgcagaacagaagaaaacagattttaagccagaagatgaaaacaatgttttgattcaatatactaatgtgagtaaaatcattcagtttgttaatactttgttaacattttcattggtgtatcctactgtgccctagatttttttcttttatacttaaagattaatgagaaactgtatttcctctttagctaagctggtatacattcctgtgtaatgagtgtagaaaaacttttataggcctgtgtaaaagtctgtgcttacgtaagaaaacaagtggagaagattaaaaattccatggatgggaagaatgtggatacagttttgatggaacttggagtacgttttcatcgacttatctatgagcatcttcaacaatattcctacagttgtatgggtggcatgttggccatttgtgatgtagccgaatataggaagtgtgccaaagacttcaaggtatgtgtacacaaaaacatcaaacttgcaaataggcccaggagcataagtcagattattaaaaatcactatttacttataattagtgaaaggtttataacttttgttgatattgtatgagatagattatcacattctacctgaaacagtgttgttccaattattatttttttttattttaaattttaaatttttatttattttttttccaaagagtttcatgatgttgcccaggctggtctcttactcctgggctcaagtgatctgctgcctcagc

SEQ ID NO: 75605 - DNA, 1111 bp, Homo sapiens
gaaagtgtaatcagttcttccattgtttgaaaaagtttgagaacgattggtgttaattcttcttcttcttttttttttttgagacggagtctccctctgttgcccaggctggagtccagtggcacgatcttggctcactgcaacctccacctccctggttcaagcagctcccctgcctcaccctcccaaatagctggaattacaggcacacaccaccacaccctgctaatttttttgtatttttagtagagacatggttttactgtgttagccagactggtcttgaactcctgacctcaggcagtccacccgcctcagcctccaaaagtgctgggcttacaggtatgagtcactgcgcccagccgattcttctcttcatgttgggtagaattcactagtaaggccatctggtcctgggatttttctgacttcagcaggacctctgtctcttaatctcttcatcttatgccaatctattatccttttcctagctttatttctttagttattgtgcttatatcacttggtccatcttttgaattactttcttgaaataccctaaagtacatttccttcaatcacaactgtcttacagaccctaacctctgatagatgcagtctcttttattcccataactggttgactcctcactgttggagaatatcacataacatgtacgttattggtaccactgcaaatctatgctctcatttctcagttggatctttagtaccgcttatccatccttctgattgtccttgtactgtgagactcagtgttgctcctacctgtttttcccaaccttggccattcttcataagttccctatctccaccggcagcattctgtacacattcagcaccccaatccaaaaatccgaaataaaaatgcttcaaaatttgaaacttgaaattttttgagtgctgacattaccctacaagtggaaaattttacacctgacctcatgtgacagggcacagtcaaaatacagatgcacagcacacggtttatttgagtatccacaagggaaaaaagacccacccaaccctcttcagctgtgataaatattttctgtgcatgtccaaatccccccctacaacaagcatgcct

SEQ ID NO: 75606 - DNA, 1112 bp, Homo sapiens
tactcttaaataacgtggatgccttgtatgcctcagtgtagctgaatgactttatttttaggtaaataccatgatttagaatgccagctgattcaggagtttaccagtgctcaaagaagaggtgaaatctccagaatgagagaagtagcagcagttttacttcattttaaggtaaatagtaggaattaaaaatgaatagtgttcaaggctatggaaattacgtaagttctatatattatagtctctgatttcccccattcattatgtaactatcacagtgataattttcactgttttgagtaatttgtacatttgatactctgtaaatggtattgaatgttatatatttaatatttaaggttttatattcaataatattaatattgaattaaaattaattgatcaattaaatattgatgaatttttatactttgataaagaaaatcatattgtctgcctttttgcttccacatattataatataggtgaaaagaaagaaaacgtgaccgtaaatatctgtaggatataggaaccagagagtagatggaacatgactagtaagagacttaaatccaggggacctcaggaggtaatacaaaagaattttgtattacggaattgtttacctagaatttgaactcgggagagaatccctgtgtaggagtatatttctgcaaagaaagtgcttaaagaaatggttcttccttcaatctgtttctttgatttgtatcagattagggaaggggaagctatttgttggacttttcattttggtaaaatctgaatgagtattgagaatggctcttgagacagtagtgcactttatattgctttccttactggtttttatgtatgatttattaataggcaaaaatctcattatggtgagcttaatgacaaatcagtttgttttaaacacattttattaaaatacatttagtttaaaaagtaaatttccaaactaccagctgaatacaactgtccagattcttgcaaggaaaaccaaatgctagagaaggccaggcgcaatggctcactcctgtaatcctagtattttgggaggccgaggcgggtggatcagtttagctcaggagttcgagatcagcttaggc

SEQ ID NO: 75607 - DNA, 1027 bp, Homo sapiens
atggtggcatgcgcctgtaatcccagctactcgggaggctgagacaggagaatcacttgaacccaggaggcggaggttgcagtgagcagatatcgcgccattgcactccagccttaagagatatctgtgctttacacacaagagatatctaggccacaagatatctgtggccttaagagatatctgggccacaagagtgaaactctgtctcaaaaaaaaaaaaaaagacagaaagaaaagaaatatacacatttctatattatatttcatcatggggctttacattaaactttatattttcttttagaacaagtgttataaattcatatgatcagtaatgacaggcatttaacttacagtaggatatatgtggcagtatgctctaaattatttttataaatctcgtttatccttttcgggttcataaacttagaattctgagatttacacctggctttcagcaagcaatgatttaaatttctttggaataaacttgaactacaggtttcattgggaagggattgtggcatcaaaaaaatcacagaatttcagtaccagaaagctaaatgtttatgttattattgactcattattggtaacaccccaaatgtattcttgttgctcataaagttttatttgttgtggatttttaaaggaaatttttttagggaagggactgtgggcacatgcagggagatattactaatttcagatatataattattttttgatatgcctaaaagttttttaaattattgcttttatttattttttcatagataaaggaagcagcagacatcattcagaagttgcacctaattgcccaagagttaccttttgataggcaagttcatttctcaagagctaatttgaatatgtggtataatttataaaataaaatagtatcttttcctgtatgattttctttgcccattaattaaacggaaatttattgagcacttgctggttcatttacttgctagtttattcactttgtacaagatgcagtgtaaaatagtttattgaa

SEQ ID NO: 75608 - DNA, 1033 bp, Homo sapiens
tttttttttttttttgaggcagagttttactctgttacctaggctggactgcagtggtgcaatctcagctcactgcaacctctgcctcctgagttcaagcgattctcctgcctcagcctcccagctagctggggttgcagggcccaccaccaaacccagctaatatttgtatttttagtagagattgggttttaccatgttgtccaggctggtcttgaactcctgacctcaagtgatctgcctccctcggcctcctactgacatattttttattcttttcagtttagtagcaagagagctctttagatgtctggtccttttcatacttagctaattgttttcagaatcatcatttggggctaaatggtgttgagtgtttttttaaaacaggatgaggagtaaacagctttttttgtttgcttttttgttgattaatgtactcacgataaatattattttaatagttaatggtataaaagtttgcagtttggttaacagattttcagatcatgtcacactaatgagcatgaattttgtagatcatctcgtatataacttctgttatctttagttagtagcaataagagtagtagtttagattataaactgagcacactgattgtattttatgcttatgcacatttttcctaggttgccttccaacatttccaagaactagatgagcacattagctatgtagcaactaaagtctgtcaccttggagaccagttagagggggtaaacacacccagacaacgggcagtggaggctcagaaattgatgaaatactttaatgagtttctagatggagaattgaaatctgatgtttttacaaattctgaaaaggtaagtgctgtcagaggataaaaccaaatcacagcattaataacagtgccctaattatgagctgcaataattgctttccagagttagacttcaaatcactgagtagctgacttattaaaagtttttattgttctgaaatgtaaactaatacagtttcttgtagattgctgatgaagtgttaatattg

SEQ ID NO: 75609 - DNA, 2172 bp, Homo sapiens
tttgcattcatatatgcttttcccttagattttaaaaatggaattactgttagggtatacgagcatttgtaacacactgatgttacctaatacttacccgctggcctccaaaaagattgtacctgttgacatttctaacaatactgagagtataaatttcagtttatcctttcttgccttgctcattataattaaaaaaaaaaaaaactttgtgagatttttaaaaaaggataatttgatcttatttgattactagtaaggctgtacattaaaaataatttttttgaccattttatttcttctacaaattacttgtttgtttactttgctcatttttctgttgagttgttccagttggtcattaatactgttctagtattttaatatcctaattttcattaagtaatttgttttgtttattgaagattttttaattgaaaaaatctgtacattttaataatatagatgtatttaaacaattagtaatttcattttaagtttttacctagtagaagctgttttaattttataagtaatattaagtacttgtatatgaaactttgttaaagcgtatttttttgtaaactaggagccttttgtggcagatgaatatattgaacgtcttgtatggagaaccccaggaggaggctctagaggtggacctgaagcttttgatcctaaaaggtgaaataaaaaaatttttttccccacagatctaatctggtacacattagtgttagaatagagatgactgttgagattgctttcagcattcctctacaaggattttagttaacatttggccaataaaagacaatacaacagagcattaaaagtttgagattttttctttgacgttcttttaaagaagcaatttaactggtatgcaggaagtaattttattgagtataagaatttgacatttcttctaatgagtcataaactagaaatgattatacttctaaaataaaaacattaaatacattgttttaaatatatttgtaaattgggggaacaaagtcactgaactctggaatgtatattattatttttatatagtacatttgccttcttgactattttaagtaggctataaagtgtatttctattctaggggtttattggggattctgggtgaggttttcattcacctctgagatgatccacgaaaaagtcaatagttaaagcctggctatattttcaaatgtcatgtttgctttaaagccatgtggcctggacaaaactatgaggaagttatgaaattacagaaagactttatcttttgatgaagaaatttctaacaagatgctatagaaaaaattaacatgatcatttcaagctcaaggaactcttcttattaagactatgattataagttaactggtcagttcctaaggattaataataggtagattgatacatattcaaactttcctctgttagattattagaagaatttgtaaatcatattcaggaactccagataatggatgaaaggattcagaggaaagtagagaaactagagcaacaatgtcagaaagaagccaaggaatttgccaagaaggtacaagagctgcagaaaagcaatcaggtaaacgttttgttaagaaatgggtattttatataggctataatatctttattttcttccagttttaagctcttaaaaaagtctagtcagatgatagtaactgtcaagatttctttctactgctttagtcccatggggtaaaatgttaatgaattgttatcaagtactcttggcattggctttccacagagtgttggtttaggatcacagtactcttcttaggatagagtggtatccagtttagtgtggtccttgattctcctctaacaatgcgaactttgaagaatgacacttcagtagacccctagttttaggaactctttattagcttggatatttaggtagtcatttgctttctctttaatcgtaaaacaaagtaatatgaaagcagctattgtctgaattaggttttcccttgagaaaacctggtctgggaagtttcacaaaagtcatgagggtatgctccaatgagaattctagtgtaactgtaggaaaaactgccttgatctgttttggagtaaaaccaaatcactagattggtcctggggctcagcaggccaaacttcttagtcactcttagg

SEQ ID NO: 75610 - DNA, 1050 bp, Homo sapiens
agcgtcgacctcctaggcaaaagcgatcctcccacctcagcctcctgagtagctgggactacaggcatgtgccaccatgcttggctaattttttattttttgtagggacggggtctcattgtattgcccaggctagtctccaactccaggacacaagtggtcctcccacctagggcctcccaaggtgctgggattataggcatgagccactgggtccagcctgggggaagttttaagaaggctttttatacctcatgcaagagggctgaccttactttttttgggtaagggtcagggagacagacaattttaatgttagtgtgaagaatggccttctatgggggaagaaattgttagctgggaaaatagggatcgtgggcaacctgacatagttcttgtcatttggtaagtgttccagaattatctgttgactgattaatctggccagatgaaagtctaacctaattcaatggtgacagagaagaaatttgaaaagaattttggaggaagaattaaaggaatttgattactgaggagttaaaattccaaatttgtaaactttgaaaagtaggtggttggtgattcattaactgtgacagagaaaattagaaggacccttgcagggggaagaaataatatattcattaagtatatatatacacacacacatatatacgtatatatacacacacatatatatacatatatatatacatatatacttaatgtatatatatacacttatgtatatatgtatatatgtatatatacttaatgtataaatatatacatatatgtatatatatacttaatatatgtgtatatatatacgtatatatatatacacacacacacacacacacacacacatatgtatttacactttgagtttttagcaagacatcctggtaaagaagtccacaaggcaaatggaaatatgaattagtaactcagaaagagatcacagttagacatagcagtttaggaagtatcactttatgtgggtggtaatttagccaggaggtggaagacatctctcagctctgcctc

SEQ ID NO: 75611 - DNA, 1122 bp, Homo sapiens
gacttcagagatattgtattttctcacttaagtgttgggagatatgctacattaatttctgtaattccaaaattgtgccatctgtttattgacacaagaacggggagacatttttcctgctaggaacttttactgtgtccctaggtactaagtagtgctgtggttccttgttttatttttcacatcttaaaaagggagaaaacgatgaagttgtatgagatctttaattaaggtatttgccggcaagccagctcttaactgaaaactgttatatatgttgtcatacagttcataagacattatcctttgagttaatcctgcttgacagttccagttgtaccttggaccatcttatgtatatttttatttaaatgtttgaccacatgatttcagtaacttatttggaaatatgtttgatttttttttttcccctctccctagcggggaaggggaggaggtggggaaatatatattttgctttctggggtcctgctattaggttaagtagtatatatatacgttttatatatatatatatatacacacacacacatacacatatatatatataacgtatatataacatacatatatataatgtaatttagtgactctagttacatggtagccagtaagattctgtgataatagagacagtagcccttagactacccttaggccagagggtttttaggacaaatttaaacgtatttatagatcttaaaactgacgtgactttttttcttgactatatgtagcttgttgcttcatcataattaaaagcataatagttacaattaagtttcaatagttataattaagaagtgcatttatcttttctggtactgctatgaatccagccctacagtggactctactcttgagtaagttttcatccccaagtgaaaagttgatctcttggccttggagggaggaggaaaaaaaatcctgtcactgctcagtttcctgtaactactgccatagcatctaggttgtagtaagagtcacgggaagtatctttttctcctgcttccctttcttagtcccagctggagaactgtggaaaacggaaggcaggatgtagtcaaggatgtttggtttttatgcatcctgattttcatg

SEQ ID NO: 75612 - DNA, 1263 bp, Homo sapiens
caaacctcgtttctactataccatttatctcttgtcctagttgtgaatgagtaggttagaaaaacctactcaagctagcttaagtagagcaaatttattttgagaatgcaataggcaatctcattgccatttaaggataagaaaagaagcagacacagttcttactgggactagaaccagaaaattagtatcagcctgtactcaaggtccaccctgtctgtcacatctctgcttctcagtctcctctttcaactggctttctctgcttacacatgaccttacagctttagggcttgccctgtataagtagtctttctgtgtcttacttcacatgtaccagaaataatgattggctcaccccagcctacaagttgtttcctcttcagtcagtcattgatgaccaaccaagtaagttactgctgaacgatgggattggagaactcatgggattcaattggagcaacaggagctgtgggcaggttggcagtaatcagtatgcctactgcatgccctatgcggcagatcagagaacatggagacggggagcctggacgagcaagtataggaacaagaatgcattgtacacctttgtaaagcgcttttctcatctccgaaaacaaagagagaagaatccctatccttaagatgaatatagattcatcattgctgttaccaaaacaacttggaataatctccaagtcattaaaagtaactcttttctcagttacttttgttgttttagactcattaacctgagaattatatagacatttatgtttctttttaggtccctgtcccaccaattttgggtttttatcaaatgaaggaggaagaagtacaactaagaataaccattaatttaaaacttcatgaaagtgtgaaaaataattttgaattctgtgaagcccatatacctttttacaataggtaggaataaaatgcatattgccataatttctgtcttccttaatacatttccactgtcccacagtaaattgtctttgtcttttaccttatttttaaggtctgaacaattttattttatttaaatgaatgctgattttcatgatatagtcataaaaataatctgtttacctttaaatatgcctttatctttctagttaaacttactagtaaattatacacttaagccaatgtagcttcctcagggattatttttctaccggatttatttctagcaatttttccatatacaagtcaaaccaaactatcaacaacctggtgaattagccaattatatca

SEQ ID NO: 75613 - DNA, 1075 bp, Homo sapiens
aaaattagagacaagccattctgtaacatattaatattccatatgaaagggtaatattgtaataagttaataatgctgagttagtgtagtgtcaacagaaagagaaaagaagggagaagggagaaaaatgaagggactgctgtaaaagctgtgataaaataaagccttgaccactaattaaatacagagacaaggaatggtgttgttccaagatgatattgtttaaaaaaaaatggaacttaaaccaaacttgacgctttttaagagggtagagacgtgaatctcattcattcattgttttattccaaatatctagtccaggacctaacacataaatatttgctgaatggatgaatatacctaaattattgatatggagaaaattgggaagaaatgggtttcatatcatattttttgctggcaatagcaatatagcccattgtaaatgttcagtgggtagctaaaaatctaaagcttgattcttaagagaaggctcagctgtatacaggatttaggaattagccacagagaacaaatagttgaggcagtggaaataaataagatcagaaaaggataaaataatacaggaagattaaaaaaaacaaatgagggaattgaaggagtgattagaaaggtagcaagaaaacataaaaaatgtattaaagacatcaagagaaatacagacaattaggggaagtggtagtgaagtcagaagtatactgatgataattcatttcttctatcttggcttcacttatgtccagaagctttgtttcaaggattattataaaaattcctacttcagatacctttcagaaaaaaatgtggaatgttaccacacattctatgtccttcaaaagtaggaattacgatttttctattcattcccatcaccaaccagttacactcacattgaaagcatgtagcacatatttttgttgactgaatgatctaagtgtgttttacagtatttcagttgtatggaaatcagtcttgtcataacttccagcattaagaattataccaaaaaagcacgcaacagccttttattatcagagataatttgggttgcaaa

SEQ ID NO: 75614 - DNA, 1136 bp, Homo sapiens
ttacgtgctgggataccaattgcttccatctttgcacgtcagttcactcagcataccttgcagtatggattagagctgttagtgaagtgcgtattatgtgttaagtacttcataatgacagccttacaaaaaaatggccctaatgcaaacggaaaaaaaaactgtgtgtgtttttgtatatatatgtgtgcgcacacacacaattcaagtttagtacttgtggtttttattttgtgaactgtgtaaaataaattccctaagactgggttaagggaaaaaatgtaaccatgctttttaccaaataatcaccttaatttggtacatttctctcttctttctagcttcattttaggatcttagattacacacttactggatgttatgcagatcagcattcagttcaagtttttgcatcaggaaaaccaaaaataagtgcacgtaagttacacagattcaaactaacttaagggaattaaaatggtgtttgcagttattacctaaggtaaaatttgaatgtaacagaacttagagattagagaataatcccaatttataaaattctgggctgattctaccccacataacagtttgtgtactttacactgccctctgccgccttcttgtttataaagtggtctggataagcaaagattgggatagaggggaacttcagtgtaaaattggatttgtttttctctggttattcagagatgtgattcacagagactgtgatgttggacagacagggcttaagcctggctcagccatttcattagctgtataactttgggcaagttagcgaacttcttgaagttttaattttcttgtgtataaaatggaaataatagtgcgatttacctcaggattgttatgaggtttagataagattatattgacttagtatgatgcttagtgtatagtatagatttagtagatactagagatgattcttatttaaaacttttaaatatctttagcaaatgttgcaatcaataagcattatttagcaccttctctattctatcaataggaagacaataaaaaagacgtttcctgattttagtatgtttaatggttggtaaagtatagatctatatgtgtgtacacacacacatacacacacacacacacacaca

SEQ ID NO: 75615 - DNA, 2045 bp, Homo sapiens
gattattacatctggaattctaaagcccctgctccagtaacatatggatcattattattgtaatagtctcatgtttaaatgggattatataatgataacagtttaaagaaaatcataatcttatatttttaatgtggatgcatataacctgtgagtgaaaaatcactgaatgatttaattgtaaaagtagtcttatgtggtgtttgtagtctgatagagcttgaaaggacattttaaaagctaatgtctccaattttgttaaccttcgattttatgccagtataattcagaacatagaaaagtaatgattcacttgggctcattttagactggtcctgggtcaccctgccacacttgtttcctagtgtttctgtggcagacattgctaatcaattacagcccttttctgtactgagccttggataaagggtcaggctcctttttagttcagagattcaggcagccactcccagtgggttgtagataatgtgcaagataaaaactattttctcttccaaatctaagtactaagctcctagtataaggtgttgttacagaataccagagaccatgttagagacaactacatctcttcaaaaaacagccaacagagacaaaggaaaagtgtttaaatagtaagctgttcttcttaatcagaactatcctattgactaataaataatctgcataattctacttaaggtgtgtaatctctgttctagagttagtttttaagtaagcttgttaatctgccactttgacattttgcttaggatgtcagtagccatattaagatgtgtagaataccttcagaagatgatcatagtgttttgtaatcatttaatgtctgcagccaaatttttaaaggtaatttagacctaatactgctcttgctgtgtcttattaagttaaaattaatgaatgaattctggtaaaaattcaaaaggcactctgtgagtagagagtatcatttaagcttattttagtcacatgtagtatatatctccttaaagctgtcactctcactttcttaccattctcttgatttcttcagaaaccatctagtcatcatctttatactctacctgcttctgcaattatatatcatattatgttttcagagcagttcattgtcaagttggactttaagtgaccattcaagaaaagatgaaatctcacgaacctcaaaacttcattcatgtctttttacaaatgagaaaaaaaaatgcattaaagattaatactcaatttgattatatcttgggttctgttttttaatgagtgttctaaggaaaagcttagaaaagctgctaactcctcagaagaaagcatgatagtttaaaggtatagggcatataaatttaggatttgaaatatgattttttaattaaggtcagtcctactcataaactcattttctgcaaagcattatcatggcataaggttctatgttcaaaattatcccaagtaacaaagaaaaaaagaataactgcctgaccaggattttaacttgttattctagcttaatcatagataatcagcagtgaaaactttccttttgaaagaagaaaatatcattccctataagttatttgatctctcttaaactcaaagcttaacatttcacttatgttgataagttaatggtaatggagccatttggaatcttgattgtataaatgtttaccaaatacactaaggtaagcaagaggcatttatctagtgagtaggcaaagatttaatataataatcccctaggcaaaagtttataagcagttagaaaaatcagtgaatcttctatttgacatttctagaaaccggaggaaaatctagggtgtcctggaaaagtgatgaggtgttggggaacctgatgccatctgttgccattccattctaacatagtgctacagaactgaaccaacttaggttttcatcccattgagatcagctgggcacactgtgatgcttttgattttgtctagaaacctgtcacttcaggataatttctgaagacaaagtctgtttcccgtttggtaggtgacctg

SEQ ID NO: 75616 - DNA, 1482 bp, Homo sapiens
tgaaagatgctttgcgtttgcagtgaatatgagcaactacttccagtgaaagatttggatagtgtcagaccttctctagatgcaaaattgctaaattcccttttagtgccaaaatatgattatgaaatctgatgtctatcacataggtaattattcttcaataaactcgaaaggttaaaaaaaaaagtgttaattttttagaatgaactccagaaaagatcgttcatgattttgtaaacgcttcttttctccattttttactaaacaatattttaaaaactttttagagccagcaatatagtacttaggcaatacccttacggtggtggcaatttttttttaactttttaagtaattgattcaaatgtcaagtttgaagcagtcttgtcaggaattctgatgacaattatttgtttaaaaaattttttttattaaacattagtctgtcccataaaatcgttttcatttttttcacaccaattcagtatttctactaggttaaaattatggtgtttttatacattgtatgatttaagatctttcaaggcagacatttatacttggtaacaattgccaatttttttttctggtttttgttgtagtatttcaaaatacttcgtagacattgatagactcctacactacccctgggagctaggtaggtggaattatcatccaggccttctgtagggactgctgccacaacagagtggttgttcctaagacaaaggtcaaaaaaaggggtgttaataaacagtcctcaggtttaagggacttttttaggattacatcttaaattccaacaaatcagatttaggagttactgaaagtgaaattgatccatccctcatccaaactttgcaatactttcctgttctgacatcatttagatagttagctgtattatcagattagaaaccattgtaccaggctgctgaaaggaaaaggaggcaaaaagctaaacatgggatgaattctgaaccttttaacctggctgaagtacgttggtccctgttatgcaaataccttcaatcctctgctaagttcagtggaaataattttcttgaatgacaggtttattcagcaaggattcagttggtgattaatccccctttgatctagggtatttcacttaactaccagttacctcgttctgacaaagtgcaactgagattagggagatcactagaacactaccagggtgtgcgtttattctctataaccttttaaagcaagggccaagaatgcaatttattttcagtatttgaagatgtaaagtcctgtctgctaagttagaaagtcaattgaataccaaatgaagtttatttcttacgtaatagaacaaacatttctttttgcttcgcctaacaatgatattaggaaacataggctttgaagaaagaagaaacaaagactacattctaagtattgcttctagttttgtttcatgcactagggtatacttaactggccttgacataa

SEQ ID NO: 75617 - DNA, 1113 bp, Homo sapiens
gcattttgcccaaatttgctccattggataaggtatcctaggctgcagctacacatttctgatggcagtgggtatattccttcatcttccctgggttgcgtctctgccacaatgccaagtttctctcatgtttgaaaagagaaaaataaatgacatcgaagcctggatttgatcctcagaaactcccggagaccactcccctacactcaaggagcttcctgacttcccagtcctgcataggagggcccccaccctccagggaggcacagttggtagtgccagagagcttcttaggaactacacatattcccatcttttaatagttacttctctttgtgtcttctatttctggcaaacacatttgttttacatttttaatagtgatttaaagttctctttaaataaatttaaaaggaattcatataaagaaaatgagtaaatcatttgggtagagtatagctaacataaaggttaaaactcaaatgagtgcacagtaatcttgggcctttgtgaaaaccaaagattgatgcttagggaatccaaaagaaagataactttttattatcctacgtaagatagtttctcaataaagcctttggcaggcttagtaagcaatgtagtcagtggagaatatactctggctgtagcattaggcaggccacagttcaaatgccatctctgtttaagaaggtctcctggggcccagggacctcatttataaaataggaaccttacatcttaagactggtgtatgaattaaatgatgtagcacatacaaagtgaatgcgacataggtgatgcctgttcattccctttgactcccctcgaatatcaatgtcagctgtttctattaatgacttatgaactgaaaataggtcataattatttacattccaattattgtttgtaatgtattctagtataatagggaaaagccaagtattaaatcctcatgtttactgcaacacatagaaatcaaaagtttatgtcaatggcagagtcaggtttagattttcatctagttaagctaaccagtgccacctcacctacacacacacacacatattagtatatatatgttttgtaacagattattttcctctctggtttggt

SEQ ID NO: 75618 - DNA, 1028 bp, Homo sapiens
gtgggtagtttgtcagagggttgagtaggcaatataagtgctaatattagagggatgtggctaattccatgtgcctccagaaaaaggaaactgcactggggtttggtcattgaagaagaaactgtttttaacagttgtgtcatgcctcattttatagttcattaaaaaaaaaaaaaaagctctaagaccagcctggccagcatggtgaaacctcgtctctactaaaaatacaaaaattagcctggcatggtggcaggcgcctgtaatcccagctactcgggaagctgaggcaggagaatcgcttgaacccgggaggcggaggttgcagcgagccgagatggcgccactgcgctccagcaaaaaaaaaaaaaaatagtaaaataaaaataaataaataaaacaaaccctcaagcttaaaataagtgaagactccggaataaaaatctccatatgaataagcattcaaccctgtacagaaacaaaaaccttcaatgacctgagtcccatcttctcgctaaaggagagttttccagaggtccggcagaggagatgtggccaagcttcatctgggcgcaggtgcagccgcgcttccacagggaaagaacaatgtctggagtgagccagcactggtttggtgaaccccatggcgactgccagtcgtttgcaggcttttgtctattctttgtgtactgtttgactcagcttgagccaaaataatcagcagctaaagctggagcctacctttttgcagagagcacagtgtttgatgtttctggacatttttgcaacgtgtaacccctaccctgagctcctgctgccttactagcacttccacatgaaagtacaagactctaaaacggtaccttctacacactatattcccatttatgaggcaagcagacaacgttttctgacagctggctgtccatctggtgtttgatgtgtggcagaaaagcaccatggggtaataagggagatggatgtttttctgaggtggcaactcagtgttcctgactgcagactccctt

SEQ ID NO: 75619 - DNA, 2991 bp, Homo sapiens
aagaactgcggtccccagcccggtggaggcagcggcggcgagcgatcccgcggcggcccgcaatggactggccgagggcaccgagcaggaggaggaggaggaagacgagcaggtgcggctgctgtcttcgtccctgaccgccgactgcagcttaagaagcccttcgggcagggaggttgagcctggggaggatcggacgatacgatatgtccgatatgaatccgagctacaaatgcccgatatcatgagactgatcaccaaagatctgtccgaaccctactccatttatacctatagatattttatccacaactggccacagctgtgcttcttggtaagtggatagaataaaaagagggtgaacccagcagtgatcgagactgtgcggggcagggagtgagggcccagaatgtggcagtggatatctcctgctgcgtatcatagtacgttatatgatgtcaagtgctgtacacattcctagttatttaatgaaattgttttgaaggtaagacttcatgattcgggttaacgtgatactagtgtaactgcagcaagcctgtatggtggcgtgtttcactggggtgggggtcttgtgtcttgtttacattagattataatcgtgtttaaccgtctttaattacccgcccgcatcctcaaacactttacagtcatttaatttgaacatggttctgttcagatacaggccttattagtctctcgattacaaccataatcagggaagagtgtatgcataaacatgttgtggtgaacatggatgtcagcaaacttggtgtggtcatattggagaattaaatcttacaagcattttcggtaattatggagatgtttctctttacttcaactggacaattaacagttgtagccagcctgctttctggtactccattccagaaagcgctactaacacttctggtggctgaaagactcctgaaacttgaacaaaatacccttttgtggaatgtagaaaacttgtgtgaaattgttaccgatctgatttttttttttttaatttaagaaactggttgtagatgtggccaaacactagtaacactggcttgtgtagagtataattgacaataatattacacgtaagtgaaagacttttggacggtttttaaaaattaacatagtattggcagtaccagtaatttcttcacaataatattgacccatttcagtctgtatgaaccctttaacttaaacgttgactgcaggtgtatgctttgtatcatgtgctcacaagcatattgtttctgttgaattttactacagaaagatgacatccttttaaggaatattttttaatatgtgaagggaaaagccaccattacttaatgttttagcattggcttagtttcacttggtaattccctgcaagatattttgacaatacttatctttttgattctctagcttggtgataatttgaaaatgtaacctgggtattgtagataatggtagttctattttctgtcttaacttgcttaaacttcaattcagtacatttgttaaaactgtgggtactactttatattcttgaaaactgctctttcagtattctaagcattgtatcagaatagttctaagacatgtctgtgtcaatgaatatgagaaaatgatttatagcactattataaatgtcatatcaaatgccactgtaattgctaaaaattgtagatttagttgtaagttaacccacagaagtagatgattgagtcacatttcaagttgaaatagatgtttttctgtcaattccaggaaatagttgtgtatatgatatttagtcaactttgagtcctgatagttacctaagcctctctcaacttgtttgctattttagactctggtcaacaatattagtaaactttagatttgattttatgtagaaccctcccaattcaccagctaatgtgtatgttagcctttagtagctcaagtttgtttaatattctgagtatctagaattgcgatatgcacaagtggttgacctataagatttactggtgcaagtatgaatcaggaggtattaaacaataataaaacagtaaaaaaacaaccaggccatttaaaactgaagcctttatcttggcatacttttaaatttaagtttcccataggaactatttttttaaaaatacagatgcgtaaatgtctgtttattttaaatcatatccttttagaactgaaagccatcctagagataatctagcccaacttaggttttgttctgttttgttttttgattgaaaaaaagttaagaaccaaagtgacttaaaatgtttcaatctccagatatttactgacagaggggtaggttttgttttgttttttgattgaaaagaagttaagaaccaaagtgacttaaaatgtttcaatctccagatatttaccgtcggaagggtaaagctagaacccagttctcctggcctctcattatggtaacaaacaagaacctgaaaaatgacatacccttgatccattcagtgaagattattgtgtcaccaagttatcttcaccaagggacagttgcccttacatcaatctcaagagattaaaaacctccaaaatgttccgttttccgtggataacctgtaatgggtcaatggagtatatggggttgaaccttacaaaattgccaatacttgattaataaaaatgatagcttattatgattcttcctaattgtaaaagatgtaaaaaaaaaaaaaaaaaaggacaaatgtgagacactttcagttactctgtacttaaccattttatctttacctgttttcatagtaacattttcagttgttggtatctttttgaagttcttaaacttactctcagcaaatgtaacatagtacttccatttatttgttctaaatttaactttttggcttcctccagttttctatttgtagtgttctagaatttgggaatctctcactttatttttttcatagttttatagactgacaaccctttggc

SEQ ID NO: 75620 - DNA, 1319 bp, Homo sapiens
caataccttataaactgtgctttttctgaaaatttttaatttttttttcctgatcgaaatctaccattcaggtgtaaatatgtattatatctggctttcactaaaactttattattaaatttattttcatttttttcttttattgagatggggtctcactctgtcacctaggctggagtgcagtggcacgatctcagctcactgtagcctctcccttcctggctcaagccattctcctatctcagctttccaagtagctggaactacaggtgcatgccaccacacctggctaatttaagtaattttggtggagacagggttttgccatgttgcccacgctgatctcaaacccctgagctcaagcaatctgcctgcgcctgcctcccaaagtgctgggtttacaggcatgagccacagcacctggccattattactaaatttaactgaatatatttaaatttacattctgctgatgggcaagttttacaatattttatgtcctaatgaatagactttttctttataatcattttttttttgcatatttccccttccagaaccttaggtctttgttgcaaataattgtgattttaagcacctcatatgtaatcttataaagtacttgaatgtttaccttgtggaatcttgtcttttttccctaggctttaatagtaagcataaaaaattcatgttctaaagaatattgagaaattttaacactggaacatttaaaggagttaggggatttagatttctgaaacttctgtgactgctgtcttgcaagagttcccattatcttcccccgtcgaaaatgcttaccaatggttggttgttgttttctctggataattgtgcagtacctgatggcaatgtattcttcataactgtttgtttatttttaaggccatggtaggggaggagtgtgtaggtgccatcgtttgcaagttggatatgcacaaaaagatgttccgcagaggttatatagccatgttagccgtggattccaaatacaggagaaatggcattggtaagaaaaatattattttatggaaagaatgcctaagctattttcatttttgttgtgttttgaaataaaagacttaaatgtaagtatgtagaaatgaaagaaactaagggaagaaaattaaggcgggttttaatttttaatttcaaaatggtatttttaaaaagttcttaaaatgaattttttctttattaatgttttgtttgacagtttttcgttttaacaagtagccgatcatcagctttcacctgcagatttttttaatcacattcaaaatgctttgcattatgctaag

SEQ ID NO: 75621 - DNA, 1183 bp, Homo sapiens
ctttcaaacacaatagaacaaactcctgcttgtggcaaataattatgtctgagaaaaaggagtatattgggagataggtctttcaagaggaaacatactgttatgtataggttctgttggcttctcttagcttatagctaaaatttttcccatttaatttgaggtaatccgtgtatctggattcaagatagaaactagcatttgacatttctgtgcttacgaatattataatttaggttatctttaagaaatacatttttccttcattaatactcagatctatattctaggtactaacttggttaagaaagctatatatgccatggttgagggagactgtgatgaggtaagtctttaaaaatgtttaatattttttatctgggcattattctttctgggtatttttaataaatattttataatttattgcagatttcattgcagtgttactatacaaatgcagcttgtggggaaaattatattccatttaaaaacacatgaatttttgacctagaacaaattttaaaatggagctaaaatttcttcaaaatgtgtggggggaatcttagacattttcagtacacaattttggtattcagaggctttatcatcagttatttaaggtagctcttattacagactctgttataatttgcttacatattggccttagtttctgacaatgggaaactgtcagtctatatggaggacatttcacacttgaaaataatcttttcagaattaaataatgacaatgttggctagggggaagacaaccacttttaaagagtagagctatctgcgcattaacataagagcattttctctcttcagcttgtttgtaaggtctgatggcagatatttctttgtatcctactgcacggtgtttctacatatagtaggtgcatgataaatattggtgatgattgggaatgttaacatttactgttgcacagtgtggaagggaacaagtataaactagagaagtatagatgtctttaacatagcagtggtgactaaggaggagcaaagttgtactagtacttttatgagtaatagaagtagcaattgtctttattattagaggtcagatgtgccttagagaattctcaaaatatgtgaaattgggtaagtttttttaaaaggttgaccttaataaataatttgtttagtgacttaaaag

SEQ ID NO: 75622 - DNA, 1048 bp, Homo sapiens
cattctcaggctccttgttcacattaggctctattctgacagatccattctaagtggtggttatatgagaaggcctacagacatagtgggtggcacagtgaagtcatcctgggatttaaaaatatctaattttactccaaagaaataattcacaggtgttgaaggatctcacattgttcacagcttttaatattataatgcaaaaggtgcagtcgccaaagctttacatgactggtaactgaaatttcgaggagagaattggatcagatatgttcatgagtataggtccatgtttggaccatagccacactgcttgtcagctcatcgagaaaagtcaggtttcacaaaagttgcttaacagcttggagaaatcttcgggataatagatcatgttttgatcttctgcagatccagtgaacaggggtgttaagagcagagagtattatgttccctatgattaaaccttttctgagttatcctacttgctatcctaagttactacttgtgaggcaggctatgtgcttttgtttaactgttcaaaggtttggatagtgttggcttttcatgtaaagatgtcaggaatgatatgaagatttttattgttttggtctcaaggttaaattctaaattaatgatatattttatggtagaaaaacttcatttccagcctaaaaagctaatgctgattcattcattttttcttttgaaacaatgaatgttacttaatctttaggctgacatcagggatagctttgtgaactttctccttttgtatgattatggttttgcagtttgtgaatacctctgtctctggattagataactttgtcttggtataaaaattttgcttatctgtgtccagtgttattcagatcgaataatttgccatacgaactcttgtttactctttagaagatatggtagctatttggttttcctttgcttgttaaaatactttagtctttaagacccaattcaaataccaacaactcctttaagtttttcttgatccttctggacagaatccatttcacttttctgttatttt

SEQ ID NO: 75623 - DNA, 2957 bp, Homo sapiens
ttttagacatgggctttcaccacgttgcctagcctggtcccaaactcctgggctcaagtgatctgccttgacctcccaaagtgctgggattatagacatgagccaccaaacctggccaaattgtgttttttttaagtgcagagagaaattgacgtttacttaaaccaatttgtttgctgtacaacttgtattttaggttttcttaggagcgtgttttcttgatcctgaactgttaattacttcattttagatcttttaaaggtttagatttagcattggtccctgctgttgttgggcttaccagctaggagagatgacataccactcatcaaatgttgaataagaatgtgtcataggaacggtgcagaatgttgctgggtgatataaaaggaaaggggcactgtacccaatccagaagtgacaaggtagggccaaaagagaggaggataggaagagcattcttctagacagaaaacagtttatttgaatgttctaaggtgggaaagatcatggtgggttccagaaactgaaaattcagtgttgagcatggaaagcaagaagagagagacctaaagcaaagctgaggccaatatattgatggactttttatgtctcttgatattatttttagattgtggactttctcttgaggacaagagggaatcagtaaacggttttaagtagagaattaacaagagcatcaccctaactctagagagaatgggagacctcttgagttaggaggctcttgtaattatagtgagagttgatggcagcttggactgtggtatatcgagcatagaaagaagaggaccacttagagatttaagagggagaattgacaataatcagtgcttggatgcatataggtggttggagaggaatgaggttcaaagatgactcctgggtttcaggtttgaggcattggtgtggtggggggtgatcctgtttactgagatatggaattgaggaggaagagcagattatgagttcaattttggatataagttgaggtactgtctttattatttgcatcagttgtttgcattcttgtcagactttttgatagcttgagaaagaacaggaagagacttatgcttcacttgggcctttgtttaattatactttgccatttcccccccacccactccaaacacttgagggttatgacacccaatagtaactgtggctcactgtgttgatagttctcaatgaaataagttgagaaacaattgaaaaggcaaatagagctacgtgtgtaaaagttgggaagatggggtagagggtgttagagggaggtaaaaataaaatcgcagttttcaaaaataccagttattcattgtcagggccactggctcagtaatatttcaaaagacttaaatgaaagttaatactatgtgttcctctgttaagctttgctatatagaccagtggttctcaaaatgtggtcccttgaccgcagcaacatcatcatctagcaatttaaaaatattaaaaatgcagattcttgtgtcctactgcaaacgtactcataaactctgagggtggggctcagcaatctattttaacagacccttcaggtgattatgatacactgtaacattttgaatacctcttgtctggattcagcaaactttcttggtaaaaggcccactagtaattattttaggctttgtggaccataggtctttgtggcaactgctcagctctgcccttgtattgagaaagccaccacagacatcatgtaaacaaataaacatggctgtttgactaaaactttatttacaaaacagcaggcacatttggcccaaagtctatagtttgcagactctggtcgagactccagacaaatatggtagttattgccagaataaatgacatattaatgaaaatacagaagttggaagtcaatctgaatagctgcttataataatatagcttattattttaaggaaataaaccagcacttttgattgttgattttattttcatctgtagtcattttacctttccccacagggaaataattaatctttgttttagtataaaacatactctcattgctaaacatttcaaactacacaaatcagtagaacagaagataaatctgcagtggtcctccaagcccttgacccaaatataatattacaatcttgatgactgtttttgagttctttctgtatattatttattgttttcactatcaatttttaaaataatgtatgattttttaaaaaattgtttagttggtaaattattttttaaattgtgtaattataacttagtttttttctcatttctttgaaggttgttttggaaaccgaaataacaaataagtccgctttgaaactttatgaaaatcttggttttgttcgagataagaggctgttcagatactatttaaatggagttgatgcactgcgacttaaactgtggctgcgttgagaaactgacatcaaggaacaactatcatccgcacagaatcgacctttgcatgcaatgcaatttgtacagaattgctttgcaggtggatttagtaatttccatgcagctcttacctgtcagtgtctcattgagtgtcgcacaatatttgttgcactttggcatggcacatttgttctgaattaaaagattgttttaaacttcaggagttcttttggtaccaacaagatgtgccagttgatagccaagatttatgtgttcatttgcaaagtctgctgacaatgttatttacacagtgatcattttatcacagaaccagtaagtggaacataatttttgttccttaaaaaagccaatgtggattgtaaaagtctttaagtatactaacatttcacacaaaacctgccctagttttctgaagtgggtgagggagacgcttcagttttaggttttattttttcaatattaaattttccattcttgaatattggtacctcagtgattagtgaatgaaa

SEQ ID NO: 75624 - DNA, 1717 bp, Homo sapiens
cttaaatcactaatagggatggttgtaaagtagatagatcattggttcaaccattttagtgtttttgccagattgtcaatgaaaccatcatactgaccttttcctccaaaattgccaaattgactgaactggttgggtgtttgtaaagatgacgttaactgtgtgactaaaaagtcagatggttgccatattgtttggaatatgttgaatgtcagtgtatgccttatgtctttaattgggtatgcaaaaaaatttttacttaagtagattaaaattttaacctctagcatgaaaacccagcaccaacactgaaagactccattcaggttgaagtagcctcaaacagtaatttactttttgataataggctgttgtttttcttaaataagcttaaaacaattctatctgaaattggtagcatgggttcacttggctacaactgagcaaaatagatgcaactttcttttaatggggtgctgcctctttaggactgactgtactatccactgacactggtttggcagttggtactgctgaacatttttatacatgctaccatgaagctatatatgttagtattgaagaagctaacgggtatactatcatttttgatgtgtgggctgattataatttcctgtatttcctgtacattgggatgaaactactttagcaaagtccacagatcagaaaccagacggtagtttttgaagttgaaaccagcaaaataagaaaaaataaaaaatcgattttaatattttctgcctctttcccaaattacccttcccacttgctcgacaaatctatgtaaagcagtttgttttttcatgttttaactttaccttgccctgtgttatggtactggctgacatgtctaagactggatgtgtatatttattatggtgtctaaaaatcatgaagttcatcacttttcaggagtatagataaaatcaaattggtagtacatcagagttacttttcagtgcaccatgacatcactaaaatgagtgctgtaatgttacagggctttcaggtttgtaaaaacataaccataaattatattgacgtcagatatgagttgagtatctataaaatatcacgtgtatctcaaaatattggactgctgtttgactggatattgctgcataattttcttctattgtcccatatccttttggagagagatttaatgggatttgaaatgtgcaagctgtctaaataagatgcagtcaaataaagtatggttaagttgtgtttgcatttttcttttagatacagctgtgtgcattttatgattgggttgttttgcttttacctactaagtaaaacagcaacaaacaatatattgtttcccgcttcctgcctttcatctaagagttacggggaagaagtattacataattgtcatcactgttgtgtgttctgacaaagtaaatttgaaaataacatgaacttgatttttctaaaagtactcagtcaactcatatgtcagttatcggtacattttccatgtgttcagtcaaaagtttatctttttagtctgtttcatagcagtttatttctaagacagtttttattttaatttacttttttgtctgtacactgccactctgtaatgttccccccaccccatcccacccttggtaagacaccaaagtaaaatagagcaatatccaaagagctttttgcccctgtcttgtgaggagctttaaatagctgt

SEQ ID NO: 75625 - DNA, 1517 bp, Homo sapiens
gttagatttattttttgagacagagtctcactctgttgcccaggctggagtgcggtggcacaatcttggctcactgcaacctctgccccctgggttcaagcaattcttgtgccttagcctcctgagtagctgggactacaggtgcatgccaccacgcccagccaatttcttgtattcttagtatgagacagggtttcaccatgttggccaggctggtctcaaactcctgacctcaagtgatctgcccgcctcggcctcccaaagtgttggaattacaggcgtgagccaccacgcccagcctatgatattctttttataagcaacttttaaaaagttttttaaaagatctcataagcatatagcactgctacactttagatcactactgtccagtcacactttatataaggatagatgtgtccttttcactccccagtatggtagttactagtcacatgtgtagctactgagcccctgaagtgtgggtgggatgattgagctgaatttgtaattttaatcaaagttagccacatgtggcttgtggctactgtattggacagcagagctttagataagcagtaataacaggaagggagtgtttgtataggttgaaagataaaatggaaggatcacaattaggccagatgtggtggctcacgcctattatcccagcgttttgggaggctgagatggtagtttgcaaccagccaggacagcatagcaagactgtttctgaaaaatcttttaaaataacacaactaaaaattacctctgagcaagagtatagctgaactgtttatactgacaatatatttcattaatacagtgtttgaccactttccaccccaccaaccactgcccttgttatgtagcctttctgagaaaagcagccctttcagattttattgttggaagttccttgggttgcagagatgcagattcaagtgccaaaagttgtttctgatgagacttacctttttagccttaaaatatttgtatagttggctctaataatttctcatttttgatgaatttgaaatcatttcacttctaaatgagattggtcatctcatgagtggtcaagttggaacatggaggtctatcatgtttttaacctccaagatccacttatggggatgaggccaaaggccaatgttacttctagaagaaccagattaatttttctgccttccatcaccgcagtgtattacctttgaccctcgctggtcatctggtaagtgtagttcatcaaaagagcagaaataggcatagtaaacacctggacacaaagacagtgccaggcttggtacaacctgttaacactgttgaggaaagagctcaaaacatgcattactttggggattaagtcagtgtttaatctcaatatgaaacagacctagaaataacaaagaccactgaagtgccaaatttatcttctaatactactatttaaactatgcaatatgggggttataatgaaatagttttagtctatgtaaggtttttataatgctaag

SEQ ID NO: 75626 - DNA, 1637 bp, Homo sapiens
gtttacagtgtccatcctcaagttttattaatctgtaaactaaattttcccattccttgaccactcgatactccacttctgtctcccccacccaaggaaccttgccaagttagctataaagttaatttattggcaaagccaagaacacgaatgcaccttttcagtcagagcagcctactgatagcagggcgaatccgggccaaaaagcagggacattttaaaatgtaggcaaagataatccactagctcaggctaagagtttggttatttaaacaggcagaaaaaggtgaagaaatatttgcagaaattttgtgaattgaagtaggggcttctgaatcttcatctagaatgattttatttttacaaagagcagtttttaaatgttataggtaccttttttgctaagtttagtttgcctttaccaagggaggattatggttggggtctatgtgtgtgtgtgtttgacttttaattgcaaagtatcgaattctcattgaacagttatgtaactgtaagcctcaactttttttcttttctttcccactgcccgccttcaaggattaactaaattaactaccagattatgtatctggatatctggacagagggatgcctgagaagtaatcttaatccttttggttctaagtcagcataacttctggaaaatgttttgggtaaataaagggaaaccatagcacaaatactggaaacgtttgccagcatcaaaggagaagtttaaactcctaactggaagacaccatttagtcacctcgctgactgatacttattgagcacttactatgtgccaaacgttacacctggcaccgtagaaggaaacagacacctctgctcttgtagcatcaaatagtctctgaggtccaagatagcagaaatttggggaagcaaacataaagtactaatcgaagacctgtgaggccctggagagaactgtattcttgagcagacagcagtctccgaattctcttgggaacctaggaacacttaaataggtattcagatgtgcagtgagtcagaactatggaaggcagattttgaaagatgagttagaaagcaggggatagttcatcttcctagtaagcattttaaaacttcttaactgtataattaaactaatgcgaatgtgattggatcttttcagcagcctaattctctctttcaggtcagtattttgtagcatgtctctgtcccttctcttaaaaaagttctaaaggcattggtgtgtgctgtggattttacgtgtgtgtgcgtgcgtgcgtgtgtgtgtgtgtgtgtgtgtgtgtgtgtgtgatccccttaaaatagtctgttcccccttcaggaatgaaggccttaaaatctgcccactgctgggatgggagtgctactggcaggcaatcctcaggcatcagcccctttaggaagtacaccagccaatgacagctgctttgctcaatgttatgcccttagtcaaggcctggttgatgtggatgtgtaaaggctcggctccctcacaattctgaaggggcatccagtgccagaactccctaagggattggctgagccttcactgagattacatcttagttcagcttccctttcttctctaccgtgtttcctatgagtacttcctaacaaaa

SEQ ID NO: 75627 - DNA, 1626 bp, Homo sapiens
ctacagctggaaagagtcctgtatgttctttcttttttctttttttgagacagagtcttgctctgttgcccaggctggagtgccgtggcgcaatcttgactcattgcaacctccacccccgctgctgccgccccactgctgcctagggtcaagccattcttgtgcctcagcctcctgagtagctggaattataggcgtgagccaccatgcccagcccagacctgctttcaaattaaaggactatttctccactgccatcttaggcaagagtggagactttgtagggtctaaaaggtttctcaaaaagcattgctgagcagaggatcctagagatggagcctaagccgtgtgcccagcaagtctagagggcaggccgaggggtctgtgaccttcgtatcaaagaccatggaccctcgtggaaaacaacatcccaggagagtagagagtatggtcagttaagaaatctggtctaaggaccagtggtggaggagggtcacctgatttcaacacagcattatcatgtggtccttctccaacttttccaaggattggtttatgatccacaaagaagaggaaatagaaggaatctacatcgagcatataatttcttctgtctcttacatttaacaaatagccattatctatgtgatttttgcattcttcttgatatgtcacaatcatttaccatttaaatggtttaactatttcattcttgccctcaaatctagtaaaatgtaggctccagaaggttttgccatctatacccatggtctctctctccccagcagcacaccatcttgaatccttggggaagcaaatgctccagtttgaagtgcacagacttagtgcatgctcttactcattgttctcagtgtagcccttatggacttgtgtccaagaaagagaaatgggactgattattcacataaaacagctgtttcaccaaagtatccattccttaaactgagggcacgagggcttggcaatgagtagccctgccgtattggtgctggtaaagcgttcttgttccatatcaccttgagaagttatagaccacaggatgcagaggcagcagaaagtggtgatggcaatgcagaacatctagaagcacaagcaaggcactctgggaaacccctcattcttacagggagtaacacagaagggatatggagctagagtttacattatgctgcagattgctagggtggaccagagacaacctgttttgtgagatattctggtgatcctttgtgcctgccctttccccaggatgttaagacttgagcacgtagcaccctcaagctcttggatgcttccaacttgtttcagtggaaactattcagaagtacctatttgacatattcacaaattcattttaggcgaaagcttgttgattagccaaaaatctcaatgtgaatgcctctcaaacatagcagcaactaaatactggaatatatgaaggcagtaacagagtccggtgtaatgtcaggccttctacttgccgtttgggggcattctgagagcagagaagggatcttaaagagagtggcttccaagccctgttccccacattccagttctcgccattcctgtctcatagctgatgagggagaagatagactttat

SEQ ID NO: 75628 - DNA, 1062 bp, Homo sapiens
tttctaacaggtttctctgcctctgccacccttctctcagatctactatggtggggatttaggtaaaatgaaataattgcagtagaagaggggaaaatgcaatagccctaaaaggaagcaacaatcaaatttaacctatgggcaggcatggtggcttaggcctataattccagcactttgggaggctgagctgggaggatcagttgcttgaggccaggagttcaccagcctgggcaacatagcaataccccgtctctacaaaataaataaaaagtaacaatttatcttagaatatatacaaataatatgaatttatccagaggtacttgtgacttgttgctgttgataattgacacatgaaagtttgcaagtgtttaataaattagagtcaacagcatccctataataatgtcacttgagctgacttgattctgataccctttcctatttgaaagagaaatggataaggttccagctgaccctccagaaacttagcaaggcagtatgtcacaccataacaattatccgttgagtattgaggcagaaaaaattcctgagagctcctgggactgaattgggaagcaaggatcatgatttttcttctagtctggtcctggctcttagatgctcccattttatttttggagacattgttcaggagtagctatttgacatatttaaaaattcaattgaggaagaaagaatattgattgagtcaggaattcctaattaaaaacataaggaaaacgaaattggagattagtatttttcagggtcttttctaaacaacctatttcttctgccctttaaccaaaagaacaactaagggtaatgaaacacttaccagtttgccacagcagtgaggcaatcaagggcagtatgcaatgtgatgtgagtcaaaactatggcccaagatatcttttattggtagagcagttctcctctttcttggttttgtttttagatgggtaccttaaatggttttcgatctgggtacctcagattttttttttaactgacatggtgtatttgttaaaggattttgaccctacattattactg

SEQ ID NO: 75629 - DNA, 1393 bp, Homo sapiens
ttttagcatccattgatgattcatgaccgaatcaattgttaccacgaaagttgctaaatggtaattttttaattcctacattatgatttggcattttgttgtaaggtagagttttccttttcctcccatttcattatattttcattcctttatttatataaatatggactcaaggatttttaccttgttcaatgtgtattacctgttagtattattatttattagcctctttgagctggctcatatgttcttttgacatgtccccatcattctttgagcactgactttctggtacaacaagaagttctagtcttattggccatttccctatcaaagccctggattcagtcatttgtttagagttctggctctttttagtgaagaacgttatttataagccatgatctcggtgttcattgctattggggtgtcattgcttttaggccttctcagaagactagaaaatatatttatacacacacactcacacgcactcacatacatacacacatacacatctttctgtatccatctatctatctgtctttgttaaaaactgataccttcaattccaatccaatatcacagggtttatcttagcctcttttacctacttataacttcctggttccgcactgaaaaatctggctcccattagcctcaatacatttatttagatgacggataccaacgtcccgaggatgcaggctgcctctttggccccggccccactgaccatgctaaatatgttggccaaatttttgccccaattaagggaaatggaaggggaaaagatggtgtatacatttttctttaattgagcctgaaatggaagttctgctgctcagtgtaatgtaaagtatttttcctacttacctccaattcaaagttcaaaacagacaagtaaaacaccaaaatgagatgttcacattcaattgttatagctagtgattgacttggcaagtgattatctactgtgcttattcttattatcagagactgatataatacctactctactgaagccattaaagtcaatcattttattgcataatggacagatctacctattttagtgcaaccaatgcacttgattaatgtgggtagttgcttgatgacttgtgatatggggaaaaaaaatttttttttaatgtggttagaaatccaaagcaaattttaaggtcttttgctaccaggttacagttcttaggttgcactgcctttttaaagttataactaatatttgagaattaagcatttcaatatacttaaacatcgtcctggatggaagtattatctcttgtatatagttcttgaagcctttagtactttggatgataaccttgaatttgctcaaccagccctcacttttgtgatcaagaaaaaacctgta

SEQ ID NO: 75630 - DNA, 1088 bp, Homo sapiens
aacactgtattttccatctgcatttggttgaaaaaaactgtgtataagtggtcccttgcagttcaaacctgtgttgttcaagggtcaactgtgtatatatttatatatatgacaaatatatattacccttaaatctctgaccagagacagtgggtttctatttagggtttcttcatgtaactgtgtttcatcaaggatttctgttgtcttaccatttagacgaggaaacgttggcagagaatcacctatattcaaaaattgctggctttgacaatatttttcttctgtatatctgttgcaatctccctgttcctgggctttgagactccgtgtagttttgctaatgtagttttattatcacaattatacccctccacaagtgatagttctttttaggccagtctttattaaccagtttgcatttatcagaagactttcagctcatttatatctgtgctaatattttaaataaactctgcagtgggttgatttatcaccatagaatcagatgatcacaaaggatttcagaaatcctctagtcttgcccttgccccaccgtagtagttctgtcatgacaccatccttgatatatggaaagttattttaatattttccaatatttacagggaggattctaggctacagagtaaagtgaaagagatgcagagtagcccaacagattctgcagaggaaataggaaagacaaaaagattaaaaatgggagtaaggaagggagaataagttgtggggatagactctgctatcagaatttagtggacagtatatcttgtcctgatatattcacaacctagtctgtagaggatcaccatgtaataactgggcatggcttttggtgcctacctccaattactctattagtaattaggcattattttgaagactcagtatgcctttcatagcctatatttcggacgccctgtaaaacattaagtcagggccgggcgcggtggctcacgcctgtaatcccagcactttgggaggccgaggcgggcggatcacgaggtcaggagatcgagaccatcccggctaaaacggtgaaaccccgtctctactaaaaatacaaaaac

SEQ ID NO: 75631 - DNA, 1797 bp, Homo sapiens
gtacggcacttagcttctttttttttttttttttttttttttttttttgagacagagtctctctctgtcgaccaggttggagagcagtggtgtgatctcggcttactgcaacctctgcctctcaggttcaagtaattctcgtgcctcagcctccccagtagttgggattacaggcatgtgccaccactcctggctaattttttgtatttttactagagacggggttttgccatgttggccaggctggtctcgagctcctgacctcaagtgatccaccctcctcagcctcccaaagtgctgggattacaggcatgagctatggcctgtaaagtgcctggccacactttacattttatgtgtgcttttatacatgttaatttttacataaactttacatggtatacaataactttattcccattttacagatgtggaaactgaggttcctggaggttaaataactagaatttagctatattctttctctctctagaataaaattatatagaaaaatatacagttaatatttattgagaggctatcatgtgtcaggtactattctagggacaagaaaaggtccctgccttcatggagcttccatttagtagatgcactactgggactcagggaagggctttgaggtcagttccggtgctcttcccaccctctgtgttcattcatgtcacagcttcagcaaagggtaggagccacagaaacacattaaatctcatagacttgtacaccaaaaagagtgacattcactatgtgtacattatatatcatttgtgtcatatgattgtatatgtaatttattataggaatgtatgtaaaatacatgtaaagcgtgggagatttcattttaaagatgcagtagaaagcagcaactgacttttatctcacaagagagccacaaccctcatttcacctttcaacaggggaacaagaatgggccagtatgtcattaagaggagactgctacagaggaaccttaatgaccagaccctgatagtagaatgcttaatgaccagaccctgatagtagaatgcttatgtaagtgtaagatcttagctacactccatttgtaggagaaagcgaactacttttagaaggcgtggaaagaaatcaaagatgctctctgggaataagcaaaaaggaatcatcgctaggacaaatgccgagcacagaggtgaaggctgtcgcctcaggagtcaggtgccccgtgagtgcacgcctgagcagcttcacctctcactggctggctgtgaccttgcatatgtgactggacctctctggacccagactcttcatctgtagaagagaggtggtaataattttcaccttgtagagttaatatgaagattaaatgctgcatttaaaattcttagaagcacttgtaaatactagctgtatccattattatcccagtatcctatacttttacatgtacagggctgcacagtgaacactgcagcacagaacagaatgatatcctttggaggcattgtaatctctctatcatcaaacaaatttccagtgatatttgctttacttctctttccaacaacttcagcaataggcaagtgagttgatgcagacatgttattctaaaagtctagttaattatgatatcattataataggaagagttagaattccctctctatttcatgctagcaaaatctacattttctaggctcattttgtcacgtgtatctcacacacacacacacacacgtacaggagttgttacaaagaaaaagattctcatacggttaaagtgttgaaagagttctcaag

SEQ ID NO: 75632 - DNA, 1063 bp, Homo sapiens
gaaaaaaaccccagcatttattttgcaagccgctgtaatacaaatgcactgggagtgtcctatttggggtaataggtatatctaactcccttttaattaacccaaatttctaccatgtgcatataggataaagagaaggaaggaaggaaggaaggaaggaaggaagtaattaaggaattccctcagtaagtagcagcaaaagcacaaagaaacaagtcatttgctcccatgttctagtttgtgtaaaagcacaaaaaaattgatgtaaaaaaacttacatattccacctagtaaagcaaatatcctactttctcttttcaagaagcagcaggaaaagatcacttatgtaagtgataaccatcaacaatttgtaatatagagtataaattcttcagatggatgttgctgagaggtgtaaccttttgtgggttaaggatggaggaactgaggagtagaaacagaagaattatctgtggggggaaaatcctgttatcttttttctcaaagtgtataggtataggaatggagtgcaagcaaagttgcaggcaaagtgggcatccacttggattattttattacctttaaggtgggtagatcatctgctctagtctcaaaagaataaacctggcatcagttcaggaaactgaggtttttattaaccagtgtcatgtccatctcaatattctcttcctaattagcagtcaaataaaggaagggaccaaaagcatttgaatcatttctctaattttatgtctcatgacatggccacagcatttgtgtagttcagacttcttcatgaccagacagactaaagtaggaaattataagtagtcttccaaaaaggaattttgatacaaaaccttcaatggtcattttcctttatttccctctttatgtaagaggtaaaggaggaggaataggaaatggttttgtggttgaaccaatcgaatcccaaagatttgattggttctttgccgaggagggtgaggatggctagagactctatcttcagcaaaccaagaacacttgatattgcttctgactgaatcagtatttattgaat

SEQ ID NO: 75633 - DNA, 1064 bp, Homo sapiens
attgcatttctaaataagtagaaataaaaataaggccattatcgtcattatgttatattgttaatccttttactgtatttaatacaaaaaactctttaatttgtcaaattaacttaatgccatgaattataagtaaaagatggttatttcattttattatcttatttttttcctagtgagaagctggatggaaaaattaaaagacaaggtaagaaaagtattttcttccattggtttatttttaggggcatatagctttattaagcaaaagatcttcagagtagtagggctttggtttattattctgattctggtaatctatctaaagattcagggcaacttgcagtacctgcaaaaaagaagcccttccctttaaatcccttcttttagaatacaggagacaccttattctttggagcaccattcactcttataaaagtgtaagaatttaccttgtttgatatgctccacagaataatatcattgacatatcaaggtgaagtttctttttgggaatttcaggattgtcatctcattccatctgtttttttttttttttttctaatatgagactctctaggtgtgtagtttatcacagtgctgccacttagtaggtattgattagctgacctgtctggaatggccaactacagataaagattttctttttttgcattaattctgccatctacatagtgattgacaacgttaacttccaggttgatattgttcattttcttttgattttcaatcctctccaagttttcacttttggttacttggtaattttaaactgaattactcataaagatattgatggagtcctgaattccttgttgtagccagtgtcaggtcccattattacagcccagctcagatttcactgggatttcagctaaatggaaatcttttcagtggtcagatattgagttgccttcaattcaccagtctcaatatatttctgttgatggcattccatatcttttttattacctgcagtcaatttccctcatatttgaattattaatattattttgctacagcttaatattaaagaatacaac

SEQ ID NO: 75634 - DNA, 1067 bp, Homo sapiens
tcagtaggcaatcttctatttacctttgccctatgttcaagccatggctttttatcagtggaagcccccaaatttatataaaggagaagaatgcttggggaccttgtcttgatgctaaagtggcttatcaccttacctaaaattgagaatgaggagggactgagggtagagctgatgggctttatggttgctaaagcctcggttatatctcaagatggcaaatttttgattcagcagatctggtaagcaagtcacacaaacttgactttgcactggaagcttgatgatactgaacttcagaaagcagtaaactttctgttaaaaataaagtatgaaggccaaactattttctttttcaccaatgaattgaagatcaggtagtgcaaatgtgagaagagatctcatgagaatgagaatttcagtttccctgagcatgcacttgttgctgctgggtggtaaaatcatagatcagaaaccttggtgctcagcagaaacttcaaggttgcttaggtaaagagaagtgattttttttttccgcttcatgatcaagcatagggggaggcaaatactttttttttctcccctggtgaataatgggaagcaatgttgaatattattgctttcctttttgggaagaaaaaggaagacacattgagggatactttcttcctcatttatgtgtcatatatttccctatggttgaagttcatgacagccttctcatcacaagagttgtgataatgtggtttatagtttatcagtattattagcactaataaataaccctggcaggatgtacagttgattgcaggacgttctctttgcatcttcccactaggtatctagtatcattcctaaacttgcaattaactaaagacattcttaatattacttgaaagtagagattagggtacctgggctctttgcacccttctttgtaaatatcagtgcagagctttcagaattaattgcttcttagatagacgattaatgttcacttagccctgtgcaaagaagtgggtcattctatttattggaatcttgctgttctgtaattacgtgaagag

SEQ ID NO: 75635 - DNA, 1055 bp, Homo sapiens
ttgagcacctacaaagtgtgtgctgtatgttctgaaaatagtgagaggctgacagataaagagatacatagtcatggggcagagtgtggtctcataaatgtgaggtcagtggctgagcaattctatagtgagggactgaattatcacttatcaccagggcttgctttgagtgggcagccatctcatttgaggtgtgacttcaaggatgcgctgtctgatcctctaatttatatcagccttgctgtcctcacacagcgcctgctttccaatattagagccttcctttgcattgatacgtgtcttcagaaggccttagaaaaatgcagaactgctatctgggtagaacaactcattaaaacattatcatttattatgcactgtaagggattaatttatcaggttcattagctgctaatttggcaagatgaaagggagaggaacataagatgcatgtgttttgaattggtaggagggtataatgcattgcagcctaagtgtgggaagtaggccttctggaaacagagcacttgactgtgaggaagtgagacccttagccctaaaatatgtcagcactctcttctcttcctccttttttcttattatccatttaaaacacttaacatgtagctaagattgactacttaatatagtgcaacacagattgtggcagcaaggaaaagatgctttgcaaaaaatagtgggaagtgtgagatttcaaacagctcctcattgcaacaaatgtcagtgtattttgatgtataacatgttaagctatggcctaaaggtttgctcgaagctgccaagactaacataattaagtatgtgtatggaatgagtggaaggaaagaaacctcagcccaatgtaaccagcacaaagagagatggtagattggctaaagcccccagatgactgctctcaatcttggctgccagtggaatccatttcttagaactcctagagagctataaaaattattgatacctggatgctacccctataaaacaactgtcttaaaccgaatctactggttgtgccccaggggtgaggcagcttc

SEQ ID NO: 75636 - DNA, 1026 bp, Homo sapiens
aggaccgattgtattgcacatttgtctggctttctgtagccttctgcttttcagcgttgccacacaatgtctggccttccccaaaatagaaaggaggagggagatagcacatgttcatgcggaaaaagggcagtccgataagatgaacaccgatgacctagaaaatagctctgttacctcaaagcagactccccaactggtggtctctgaagatccaatgatgatgtcagcagtaccatcggcaacatcattaaataaagcattctcgattaacaaagaaacccagcctggacaagctgggctcatgcaaacagaacgccctggtgtttccacacctactgagtcaggtgtcccctcagctgaagaagtatttggttccagccagccagagagaatatctcctgaaagtggacttgccaaggccatgttaaccattgctatcactgcgactccttctctgactgttgatgaaaaggaggaactccttacaagcactaactttcagcccattgtagaagagatcacagaaaccacaaaaggttttctgaagtatatggataatcaatcatttgcaactgaaagtcaggaaggagttggtttgggacattcaccttcatcctatgtgaatactaaggaaatgctaaccaccaatccaaagactgagaaatttgaagcagacacagaccacaggacaacttcttttcctggtgctgagtccacagcaggcagtgagcctggaagcctcacccctgataaggagaagccttcgcagatgacagctgataacacccaggctgctgccaccaagcaaccactcgaaacttccgagtacaccctgagtgttgagccagaaactgatagtctgctgggagccccagaagtcacagtgagtgtcagcacagctgttccagctgcctctgccttaagtgatgagtgggatgacaccaaattagagagtgtaagccggataaggacccccaagcttggagacaatgaagagactcaggtgagaacggagatgtctca

SEQ ID NO: 75637 - DNA, 1077 bp, Homo sapiens
tgtggtggcgggcatctgtaatcccagctccttgggaggctgaggaaggagaatcgcttgaacccgggaggcggaggttgcaatgagccaagatcgcgccatcacagtccagcctgggcgacaagagtgaaactccatctcaaaataaaataaagagacccccaagagctccctggccccttccaccatgtaggacacagcaaaaaggtgccttctatgaaccagaaagtgggccctacccagacaccaaatctactgtcaccttgatcttggacttcccagtctccagaactgtaagaaataaacttctgttgtttataaaaatccagtttattatactttgttatagcagcccaaatggactaagaaaaatgggtttgaaaaccctaaatatcatcattaaatgctgaataccagttacttttaagagttttttaaagtaagtaaataattttcaatgaaaatatgtcttttagctctttttcttcagcgaggcggccgggctgcagacgcagagatgcagatctttgtgaagaccctcacgggcaagaccatcacccttgaggtcaagcccaccgacaccatttagaatgtcaaaaccaaaattcaggacaaggagggtatcccacctgaccagcagcgtctgatatttgctgggaaacggctggaggatggccacactctctcaggctacaacatccagaaagagtccaccctaaacctggtgctgcgcctgcgaggtggcattactgagccttccctccgccagctcgtccagaaatacaactgcgacgagatgatctgctgcaagtgctatgcttgcctgcaccccggtgctatcaactgccacaagaagaaatgcggccacaccaacaacctgtaccccaggaagaaggtcaaataaggctcttccttccttgaagggcagcagccttctgcccaggccccatggccctggggcctcaataaagtgtccctttcattgactggagcagaaaaaaagaaaagaaaatatgtattttaaatgcttaaatcatttgttattctctgccacaactataaaagttacaggcaaaa

SEQ ID NO: 75638 - DNA, 1625 bp, Homo sapiens
ctgtggtataggggaagcgctccgggcctggaatccctacgcgtccctttgggtttagcacgatgagctcaatcggcactggggtgagttcgctgtctgtcggtgtaatagtttaacctaaggattggggttgaagggaactcggacagaccacatggggttcgcggacccggggtgctctgagaccgccttcggctgggtgggccatttgcagctgtttggagaccggtcgtctttatcccctatatgctaggcctgcgtctcaggtgaccgtgactcctgaagcttttcagcgcaggtgtagccggcttggcgtcgccgcagtgaggtttggagccgctttggattgctgagtcactttcttcagccacttagggaaaccgaaagtggaaactcgtggggcttgaaatagtgtgttctcttgagaaccaccgaggcagtgagatttgggattccggggtctggagatcgtgctttttgtggactgcgtttgcagttcctagggtgctgctgattcacaggccttctctgtctttaagtgtgcagatcattgaccgctcagtttaagagtcactggaaatcctgtcggaacagaactaataaaaatggtctgaaaaacaatctgatgaatccttcagtttttcctttctcgtttttcctatacaaattacctaacagcgcttgtaggcatttattccgtaaacgtttaaatggttacttaggaacttaacagcttcagacttttcatagactgttgaggattttgcagtgggacttgttaacttgtttggctttcctttgttaaacgtattgcatatgtgcagtcagtttactccttttatgtacttctctatatagaaaatacagtttctaaaagatttattggttatttgcactagagttattgaataatgagtttctcagttcctcaatttctacttcttaacaagattctcatgctcagccttaagttcaagtaccggtgttctaaatttgataataggcaacttatgtctggaatggtttaatccattcagttatgaatgctaaagttctgccatacttttcttggataagtaaatgctcaatattaaatcttgtagcaaactgactttgcaattatattaatattaccttgaattaatagtatttcattctacaaaccttttaaagaatacttgataatgtaaccatgtgggatattttagtaacaatggtagggttaatgatctgggtttaacagatcaggaaacagactcagaaagtaccactgctgaaggcttttcttctgtcttcatttctcccaagaactccagatacgaatatttgtttgtctgcttgacatgtctgttcacttgatcgtttaatagtcatttcgtactgcatgtgaaagtagagctctgggttttctcctcaccttgccattttgcatctactacagtcttcagctcagtgaatggtcatatgaaaaaatctgttattcatctttaattcctttttttactttactcccagaaccaacgctttagcaagtttatttttttatttttattttgtttgagacggagtcttgctctgttgccaggctggagtgcagtggcacgatcttggctcactgcaacctg

SEQ ID NO: 75639 - DNA, 1030 bp, Homo sapiens
ataactttttttcataactttttttttgtttgttttgttttgttttgagatggagtctcgctctgtcgcccaggctggaatgcagtggcacgatctcaggtcactgcaacctctgcctcccgggttcaagctattctcctgcctcaacctcctgagtagcagggattacaagcacctgccaccacgcccggctaatttttttatttttagtacagtcagggtttcgccatgttggccaggctggtctcaaactcctgacctcaagtgatccacctcagcctcccaaagtgctgggattacaggcgtgagccaccgcactgggccagagagaacttttttagtaaacatctattgggcactgagttagtcataaatgtggagacacaggtgtgaagtcacattgataaaatattagtgatatgataaagggacaacaattagggaacggactctttctggacaggaggcaaggaagagtgtgagatgtagggagacttggtagttgcaagcacaggaactggtatgaaaatacgtgcgccagagagagttaagtatgcttggtgtgtagagtatgaggtttagagatgatactgatgtaggaaggggtccagtcatataaaagtctgtgctccatgctgattttcttcaaagaaatgttgaaaggctttaaaatagtgacaatgagctatatatcctgaaggataagtctcatatcggtagaaaatggaaggaaatgacggtagggatgggaattgaatagttaaaatattccgcatataagatgatgtgtaagatgctgctgatttcttttctactctaaggcaaatatagttgtcccttggtatttgtgggggattggttttaggacctcccatgaataccaaaatccaaggttgctgaagtccctgatataaaatggttaagtatttgcatataacctgtgcatatcctcctgtatgttgtcatctctagattacttgcaatacctaacacagtgtaaatagctgttacactgtattgtttagggaat

SEQ ID NO: 75640 - DNA, 1022 bp, Homo sapiens
tttgaactagaactcagctgggttggtgaatgtaagttatttttgtacatttatttgccttaggaatgatctgtaccacagctaatttacaactgagtgtcctttctaatataatgaaagctaaagcaaatttactaggttgtctaatgaagggaaagttctgcttaataattgacttaagttgtgaacacgttattttttgaaacatccatttcatggttttaagatactatgctataaattaatgctcaggatttataaatagcataatttactttcatttccataagaacttaatatgtaggcacatataatctcatgtagaagcagcacacaaaaatattcgagtattactcatagtacaactttgcaaccttaggtgagtcagatatgtggattgggtagatcctatggtatactgcaagttacaatatggtactcaatttaaaattcatttacacatgtggcttaatttacagtaactaatggaagacatgaaattgttccaaaagatataagagaagaagcagagaaatatgctaaggtaagccacagcacaaaaacttctcttggccaggtacagtcagggaatcacttagcccaggagtttgagaccagcctgagcagcacagcaagacccccatccctaatttaaaaaaaaaaaaattctctaaccaaaattatgtgttgaataatataaatagactggggtggtttctatgaaataacactgagagttcagttgaactaaagatagaaattttctaggttatctctagtgggtaaagttgccttggttccaaaaaaaaaaaacttgggaggtttagactgcaaagagttttttaggacttttaatactttaaatatttgttcttttttttttttttttttttgagacggagtcttgctctgtcacccaggctggagggcagtggcaccatctctgctcactgcaacctctgcctccagggttcaagcgatcctcctgcctccgcctcccaagtagctgggattacaggaac

SEQ ID NO: 75641 - DNA, 1004 bp, Homo sapiens
actaaaatttaaaaagttcagatatagttctttccccagtgagaaaagcagatactaaaaatcactggcaaggtctattaaacgtgtatacaagctgggcacagtggctaccgcctgtaatcccaacactttgggaggccgacgtgggcagatcacttgtggtcagcagtttgagaccagcctggccaacagagtgaaaccccatctctgctaaaaatataaaaattagccgggcatggtggcaggcgcctgtagtcccagctacttgggaggctgaggcagttgaattgcttgaccttgggaggcagaggttgcagtgagccaagatggtgctgctgcactccagtgtaggtaacagagtgagaccctgcctcaaaaaaaaagtaaaaaagagatgtgtatacatatacttgtatgtctacactgaactataaacatgtgctttggggaggagagaacataaattctgacaaatatggaagggaatttgggaacatttcctggacacctagtggaagacccctccaatgagtgaattcaggagaaaaagcttatcaataattatgagtaaaaaacttctgagattccagtaattaaaacaaagtagattatgtaaaaatatgaaggacagaatttacatgatagtgggaatgcatgcaacagacaactttctcaaagtgtggttcgaagatcacctaagtcagaattctacagatttgaactcactaggtaggaagagggacccaggaatctgtattttcaataagtatctgaggtaattcttattaacactctaaaatttgagaatcactgatttggaaacaggttactaaaaggagaatagggtaagagaaaaggttacttttaaagtgatgacacttagggcagggtgtgatggctcacgcctgtaatcccagcactttggaaggccaagatgggttggtcacctgaggtcaggagttcaagaccagcctggccaacatgatgaaaccccgtctctacta

SEQ ID NO: 75642 - DNA, 1951 bp, Homo sapiens
ttttatgggaaaattaagcagatgctccagtttgagaaacctggatctgcgatctgtttgtggtaagtaattttacttagttactcttaggtaatcaagactggtcatgttgctcgtgtgtgtgtgtgtgtgtgtatctgtgtatcttttgaaaaatgataaccgggcatggtggctaaaacgcctgaaatcccagcattttgggaggcagaggtgggtggatcacctaatgtcaggagttcgagaccagcctgaccaacaaggtgaaaccctgtctgtactaaaaatacaaaattagccgggcgtggtaacacatacctgtaaccccagctacctgggaggctgaggcaggagaatcacttgaacccgggaggcggaggttacagtgagcttagatcgtgccactgcactctagcctgggcagcaagagtgagactcgtctcaaaaaaaaaaaaaacatagaatttgttcaactgtgcagttgtttctgtacacgagtatatattgagaagtggaaatgattgctgtgttgaatgtagcagctttcctaaagatttagttattttatggaaagttacataatttacttatttgtaaccaaagcagactttgaaatttctatgttgtcttttgccctattcaatttttatttatttatttattttttgagacggagtctcgctctgtcctccaggcaggagtgcagtggcatgatcttggctcaccgcaacctctgcctcccaggttcaagcgattctcctgcctcagcctcctgggtagcttgggactacaggtgcatgccaccacgcccggctaatttttgtgcttttagtagagatgggtttcaccatattggcccggctgctctcgaactcctgacctcgtgattcacccgcctcgtctcccaaagtgctgggattacagggatgagccactgcgcccggcaccgtgtcagatttatctgctgattttatggccacatggagtcatagataatggttcgtataattcaaactggaatgacagcgtattttaggattcagattcaagcaaatatgagttacataatggctttcctacaaggatctgtgctccagaagcttaaggtcaataaaagggagaatgtaattacacatgtggaaagttaatctaagtagttatttcaaaatatttaagcaatctatataaccttatttatagacttacatggctcctgataatagatttgtcaaagttctgtatacaatcagatctagtggttcttttaaaagagacaaattgctttagaaagcagagcagaaagaaatttataatggttattaaaggcttttcaaggatagtgagatataatgtgtaaaattagaaggagagaagacattctaattggatgaaaggttgtgagcaagaatacaaggaaatatgtatttgggacagagggtaaaccaggtcagaaaggatgattggctgaagattagggaaaattgtgtggccaacctacccctgtttctagggttagctgcacatcagagtccaatggggtgttacagggttctagagggtcttggaagattgggagtaagcagaaattgaccattatttttgtcttgtcttatttcaagttttacaaattataatggaactaaacaaaataaaatgcagccatgcatggtggctcacacctgtaatcccagcactttggaaggccaaggtgggcagatggcttgaggccaggagtttgagaccagcctggccaacattgtgaaacctcatttctactaaaactacgaaatttagcctggcgtggtggcacgtgactgtaatcctagctactcgggaggctgaggcaggagaacctgggaggtggaggttgcagtgagccaggattggaccactgcactccagcctgggcaacagagtgagactgtctcaaaagaaaaaagaaatcactttt

SEQ ID NO: 75643 - DNA, 1032 bp, Homo sapiens
tggcggcggagtgtcccatggaaacggaacccagaattgcagccaggggcttgcacgggggcggggcagggtctgtccaaggcgcttgcgctaaaccagcttgtcggcgccattttgtctcggcagcggtggccgtagctccatcgcattttatgtttctggcgagaagggaacggagttttcatcaggtagattggtttttgtgcggccgtcctccaccgtttcctccaggacagcacctagtcgtggccggaggagtctcagagctgtcagaaaggtcagttggaggctatggttgtccgattgactggggggatggcgcagccctagcggcaccggcaccggaagtgaaggggccgcaggcagccatggtaaacttctccctgcggcggggtggggagaaggggcgggatgaatgggggcgaggcttcctctcccgccgagataaagaggtggaggagaggcaaacgtctttcttggaggttctctttcgggttttcgagaatgtgagagattttctgggttctgtcccactgcaatctttcctgtctttggaagtgcatttcggggacttgccatgttctccacctgattggcaccagctgtgggagccttcttagttaagacagggaagaagtggttcttagaaacatcctgcatgggtagaggtttccgcgtgctcctcacgggataaagctatgaggaaactggagaaagcgctggctttctggatgctgaggaatttacttgccagcgcagacgcttcttctgtgaccttagacaagggtctgtcactctgcacgaggcttatgctactttttgaaagcaaacagtggttttgcagggactgaaaacatcttagacaaaaggacgtccccgataagatagacgttgatctttttctgttaacatcttatattctgttaaacgaaacacacatttttaaatagcggaattggagtataaaattgactagttttatagaatggagtaatttttaaaatgtgacatatcgtcagtaatccacgtgga

SEQ ID NO: 75644 - DNA, 1024 bp, Homo sapiens
tagtgttaatattagtagcaatatttcttttaatttgaaaaatttcaggaagctataaatgaataacttagttttatgatatgtgtaatatgaaatattttttctgtttttttcttatctttctgcttatataatagtagaatttttgaaaaattttgtatcgagacaaaacattattaatcactgataattttgaattacaactttaaaacattttatcatatcaggacatcagtctataaaatgaaaggttgctaatcaagtatttagggtatttttcaaattttcaatgatattaataagcaagtcattttaatattcttaatgcttcaaacacaaccttttaatgagacttgaggttggagtagggaggcatagtaatgacattcacagttttatgttcctttcaccaggcggcagatgagcctgcctacctgacagtgggaaccgatgtcagtgccaagtaccgaggtgccttctgtgaggcaaagattaagactgtgaaaaggctggtgaaagttaaggtaatatttgtttttatgcaatagttttattaactctagattgaagaaatttggggagagagagactgcaaatcagcattttattgagtcattatatgaaaaccctttatataccaaacttaaaggaaaagcacatcaaaaataaagaaataaaaaactcaaaaggagaaattattccaaaatgctaccatcaaaataccatgctcatgatatttcctgtcatttggctcttaactatttgtggtagcatacttggactgtaatctattttctcccctcatttaatgttcaggtagagacaattttagtgtttaggacaatacaaatacaacaggaattatgttttcaagacagtgtaaaaaagcatttaaaaagtttattttgtgactgggcgtagtgtctcatgcctgtaatccaagcactttgggaggccgaagtgggcagatcacttgaggccaggagttcaagagcagcctggccaacgtggcgaaaccctgtct

SEQ ID NO: 75645 - DNA, 2022 bp, Homo sapiens
ggggtaagatccagtaattgtgttttaataagccctttaaatatttctgatgcatgttaaaagtttaagaatcaggttgggcacggtgggtcattaatcccagcactttgggaagccagagtgggcagataacttgaggctagaagtttgagacccacctggccaaaatgttgaaaccctgtctctagtaaaaatacaaaaaattagccagacatggtggtgcaaacctgtaatcccagctacttgggaggctgaggcacgagaattgcttgagctggggaagcgaaggttgagaccctgcctaaaaaaaaaaaaaagtttgagaaacattgactagaggagtgtgatttgtaggttaaatagatgtatctatgattattataaaatttatgtttcagttttcttgatgaaccttcaagtattaggataggatgtcaattgacattcatttctttttgtttcatacagtgtttttatcatgtcagctatataggatttgattactctatatttatttgggattctttaacaattcaaatttggtattgtggctcttatttacttaaaattaatacaatgattgttttaggaggtcttaccatacattacctagattttgaatttatttggaccatctattatttggaccatagtaaccagccatctgttacggatggttactttatgtctttagatgtgtagtagaagggagcacttgtttgtatcagtgcatattacgattattgcttagcttcactttataaaggatcagagttctggttttaatttgtttacctttcatataggcaatacagtttgatactgttgtttttctttgtgtacttggtggcaatcagaaccttttgtgacttgataaaaagcaataaaggcagtttttttttacagtaatcattaaagattattatatagttcatttagtaaacagttattaagtgctgataatatgcattgacacttgctaactgttggggatatagcaatgaagggaagactcagccctcaaggagctcacagttaataagagaatgtaataagtattacattagcaggggtcaccacatggtgctaagaaagcataaattaaagacattattgttatagtgttactataaatgtatttgttttaaaagtaatatgcaaattattgtgcaaaatgtttttcaggtactcctgaaacaggataataccacacaattggtacaagatgaccaagtaaagggtcctttaagagtatgtatgttgtacggtttaaaatctgaaataatcatagatttataccatatttactgaatttacatttctacatagacttaacattttatgagaacgttaatcagaaaacaatacatatgaagggtttaaatataattagtataaattgtgatattgcaatggctgtattctgttttagatactaaacatcttctagaagggtaatttaatatatataaacatgttaagtttttcacctacctttctgttttgaattcttgaactggatacctggctttgtttttcacattgttgctgtatctgaggtgatgtttagccttctaagttgagtatcataaccatcaatctttggttgttctaatttaccaagtaaactatgttcacttcctaattcaatttaatgaatacctagattatgttttccatgcatttctggccatttgtttatgtaataaatctgttatatcagagtaccactttggttaatatctgatatacaaaggtctggaaactgaaagaaggtcaactggtccatccctatctctccaggtgaacctttatctaaaaggtaccttaaatacaaatgctgaatccaatattcactatttctgtgaaagaaaatggatgctattttggttgtcttataattttacagttcttcgatttaattttcttgaaggcaatgtgatatagtggaaaagctctaaagtaagatttaagagactgggctgtcatgctggactctgcatattattttctctttctgaa

SEQ ID NO: 75646 - DNA, 1086 bp, Homo sapiens
cagtgtgtaaagtaggggtaataatagctacctaacttttgtcaaagtgttttggagctcaaattgcataataaatagataagtactatgaatgataaagatctcagacagtgtaagatagaattatcataagtatggtgtttatttttcttagctagattatatagttggtgggagtgatttggtttatttgtttaaatttggtaaggaaattgggatttcacattttaggttggagctattgttgaaacaaggacatctgatggatcttttcaggaagctattatcagcaagttgacagatgctagttggtataccgtgggtaagtaattaagtaatttaacacagatttgatttggaggttgcatgtatctgtgttttgtggatacactgaatcattgtgttggtggagaaatatatattatttcctgtcagtttactggatatagctgactaaaattctaagaatgccctgtaggtaacaaaaataattatctcttacagtaagttggccacttttgtctatttcatccaaaaatgtacttctattttaggttactttgatgtttcttttcaagaaagttagatcacatgattgtgatcactttttctataattacaattaaaattgcatagttgcgatcgttactgtattgctacatattttatacaagggtaatgtagatgttgccagacaatttacagatttaaaaaatcctgaccatggtagattcaagaataggtgattgttaacttagtttttgatttttgatacagtgtgggtgctcatattaacagctttcaaggtcgggcatgttggctcatgcctgtaatcctagcattttggaaagctgaggcgggtggatcacttgaggtcagaagttcgagaccagcctggccaacatggtgaaaccccgtctctactgaaaatacacaaattagcctggtattagtggtgcatgcctgtaatcccagctactctggaggctgaggcaggagaatcgcttgaacctgggaggcggaggttgcaatgagcccagatcatgccactgcactccagcctgggcgacagagtgagatttggtc

SEQ ID NO: 75647 - DNA, 1009 bp, Homo sapiens
gccattggtgggaaagtaaattagtatagccatcatggaaaatagcatagaagttcctcaaaaaattaaaaatagaactaccatatgatccagcaatcccactcctgggtatataaccaaagaattaaactagtatgtcagagatgtatctgtattcccatgtttattgcagcactattcacaatagccaagatatgggataaatttaagtctctatgagcagatgaatgtataaggaaaatgtgatatatatacataatggaatactattcaacttttaaaaagaaggaaatcctgacatttcttacaacatggttgaatccaggggacattatgccaagtgaaataagccaggcacaggaagacaaataccatatgatctcacttaaaaagtcaaactcttattagagagtagagtgttggttatcaggggtgggggcagcttggttggggtgggcggggggtgagggattaggtaaatgtcggttaaatgatacaaaatttcagttagaaggaataagttcaagagctccattgtacaacatgatggttttagccaataacaatgtattgcatacttgaaaattgctaagagagtagattttgagtgttctcaccacacacaaaaaaataagcctgtgaagtgatccacatgttaattagcttgcttagccattccacaatgtatacatatttcaaaacatgttgtataagataaatacatactattaatgttaaatttttttttttttttttgagatggagtctcgctttgttgcccaggctggagagcagtggcgcgatcttggctcactgtaagctccacctcccaggttcaaatgattctcctgcctcagtttcccaagtagctgggattacaggcatataccatcaccctggctaatttttatatttttagtagagacggggtttcgccatgttagccaggccagtctcgaactcctgagctcaagtgatccacctgcctctgccttccaaagtgctggga

SEQ ID NO: 75648 - DNA, 1024 bp, Homo sapiens
agctggtacatgtgtagtaggttatcatgcaaataaatagaagcagtagaataattcaatagcaataccaggagtcagtttctggaagttaggggtactctaatattaaacttttgtggaaaaatccataatactttttttaatcaggtttttgttcattcttctaggattgcagttaatttaatatttatgctttgactaggttgctaatgagttaagaaggtggttctgtagtgatagaaatcaaaaaagcagatggaaatacttaagcagtcgtgggcagccatttaacctgtgtttttggtatctgtagaatgaaaaatatggcatggtatgctcattgtaaaggttttgaaaaatgactaaaataatggttcttacaaatattaagctctaattaatagcaataatagcattctgtgcttttaagtttttatttcattagtgtgcataaattctctgttatcttttgcttattatagtgtttgatgatggtgatgagcgaacattgagacgtacctcactttgtctgaaaggagagagacattttgcagagagtgaggtagggtgacacggatggacgatttggattgaactacaggtactgatctagaggtaaaacgtaatttaattaatctatttcttatacagacacttgaccagcttccattaacaaatccagagcattttggaactccagtaattgcaaagaagacgaacagaggaaggagatcttctcttcctgtgtgagttttttcatatatggtatcattttaattacaattattataaccttaaacaagggattttgttaggatggctaaattcatttgggtaagctttccatagcatattgtatccttatgttagacattttaccctgagtggaccttgttcttaattattcccaatatttgcccaggaatgataacaactcttacttctaatagattatttttgttttaagttactttgccgaagttttttttgttttgttttgtttttgattttgttttttgagacg

SEQ ID NO: 75649 - DNA, 1050 bp, Homo sapiens
gtacattaaatcttcacaaaaacctgcaagatattattattctcaatttatagctgaggaaaatgggaacagtaatgtcttgctggtttttgtattagataatgtatagaattttcttttttgttgttgttgttgttttttttggttttttgtttgtttgtttttttgagatggagtctcactctgtcacccagactgtagtgtagtggtgcgatcttggctcactgcaacctctgcctcccaggttcaagtgattctcgtgcctcagcctctcgagtagccaggactacaggtgtgtgataccacacctggctaatttttgtgttttagtagagatggggttttgtcatacttgccaggctggtctccaactcctgacctcaagggatccacccgcctcggcctcccaaagtgctcagattacaggtgtgaaccactgcacccagccgataatgtatataaatttattagtgtgtaataagtactcaggacatgatatatatttaataattcaatacccagtattttatttctaagctaactccatagacttctactgaaaactccttcatacttattttataattttaacaagttgagttatctggtttctcagagtgcagcagattggaagatgtgtcaaaaggaaatacaggaaagatcagtagatgcagtcaataaagaaaactgtggagtctcacagctgagaagtctatgacaagaaaaaaaggactaaaaccataaaaatataatgaaccaagtggttttgagccatttaataagagttaatagctctgcatactttaataaactccaacattatcaatatattgcaggatgtcttaaaaatgtaggcttggctgggcacgttgcctcacacctgtaatcccagcactttggtaggctgaggcgggcagatcacttaaggtcaggagttcaagaccagcctggccaacatggtgaaaacctgtctctactaaaaatacaaaaattagctaggtgtggtggcatgcgcctgtaatcccagctactcaggaggctgaggcagga

SEQ ID NO: 75650 - DNA, 2054 bp, Homo sapiens
ttgtgatcaaaacagtgaaattaaaaaagttttttgagttatagttctctgtgaaaaatttaatgccataatatattttatagtgataaaaatatttcaatattactgtctagtaaatgtgcttttttactaaaatgaaaaataaatttcacaaataataaaatagacattgttgtctacaagtgttgaaaacatcatgctgatatgaattaccccgtactatctgtaggaggattgtatagattgaaatattgtgaatgtgaggctctcaatgtactttgagtatatacaacttcagaattaagataactaactttgcccgtatttcctcttcttaccttttgttaaggactaagataaaaacattttatagacaatattttgattttgaggtttttatttttctatgtgttaacatgaactatttaagtgataatttttattgaataaattgttttcctccccttcttcttgataattagttactctatagcaagaaaggacattaaggaagtagacattctcaatctaccggaatctgagctctccactaaaccaggtaaaataaagatgaattaccctattattttatgttgtggctctatttggaaaatagcaaataaagcaagactgatactctctggtaccaccattttaactgtttagagttgatatccactcttacttgatttttttttaatgtctagatacaatatttgatttgtgattagataagtttaacttttcgtattttaccattgtctcacagtattccgtaaagtaataacaaatgtttatataacattataacttatgaaatatgttaaagcttactgtatcattttataaatgacagccgaatttgaattcagatctttgattctgaatgccatgccttttctattgttctatgctgccaattccatagcaactgctgaagtacattttcactcttagggcttcagaaagcaagcatcttcttaaaaactagagttgttcctgataattggaaaatggatataagtgaaatccttgagtcatccagtagtgatgatgaagatggcccagctgaagaaaatgatgaagagaaggaaaaggaggccaaaaagacagaagaagaggtggtaggtgtaatttcatgtttgtaacaaaaacatcttaatactctctagtgaaaataataccttcatatatttttccctctgtttagattctctattatttgtttctgtccgtttctagcattgcttaatttgggtgttgaggaagcattttggctcatagcatagtgtgtaaatcagaactaattcttagtaagagattacaagaaaatacttttcaggttagttaatcaacaagtgcaaactggtttttttggggtcttttccaaaacaacccaggagggaaaaaaatgtaatttttaggtattttatatgtgtaactcatttaaactactaccatatgaagtaactgttgttatcctactttaaaggtaaggaaagggagattcagaaaagttaagtaactttcccaagctggcacaactaaaatgggtagaagagggatttgtactcaggtctggcctgtctcaactttaaaacctctttcagacatttcacaatatttcaaggataattaaggttaaaaaaaatcctatccaaaccccaaagaaaatttcatttggcaatttgataaatcatagaaaatatttagattatatgttctaagtgctaatggttttctttataatattgccatgtcatttataatatgcatataattgtaggaaatcatccatggagtacttcatgattgcttatatgaatactgttgtttattctgcagtgttgtatcaaatgggataaactgtctagtacatttttggttgttacggggtaaaagggtttaggggcaagacaaagacaatgaatttactgaaaagggggacctatttgagcatgaaaaatattggcctggaaaaatgtgggattcttgtttctgttttaaatacacaaatatgaatttatgaaatgaaacgagtatagtcatatgta

SEQ ID NO: 75651 - DNA, 1019 bp, Homo sapiens
atgtctgatttttatgtggaagagaatgtaagtagtgctgtataaccctgcggatgctatgccctaagagggaaagcaaatatttgcaagtcagactgaaaaatgtccagaccctgtactgattaagtagaaggggaatctaaccactttgcatttgaaagaaaatgcagcatataggtaagatttttttgtgtgtttagttaccattttgattgccaaaaacgggattaaataagaattttaggtattgatgatgtagctgatagggaaggactcagaaccaagcgatattctttcttgtaaaaaagacagtaggagtctatttttagaatatcaatggatgaaggctatttttctgaaacaagatagattctgaaatgaaaatgataatgagacagtttggcaaaattcaggatttaaagtcagaatattaaatgtgatttttgtattttatctgtatttatttatagattatatgttttcaggctaattaggccacattttcagggtgtgaactgttgcaaatctgtgatttagcttttgttttttaaattaaccttaggatcttatattgtccaatattgaagaaagattagtccctttatttttgctaatacttttaattgctgtccgttccagaatgcattttccctacccccccccccccaaaaaaccctgaaattttaaacaaagagggtaaaaagagctttgtaggaagtggcagagggagattataaaatagtaaattgtaagtagtgctcttattacaatgattaatttcataaatattgtaatgttttattcaagctgtgagtatacgttagtataaaagaatgaagagcagaggcaaagctctgttacctattgtttgcaggtaatagtaaataaatttttaaagataaggaagcttacaaggatagtatcttaaaatgtgtcacctaaattatgagcctgttaaaattaagtgaatcaggatgcttttcatctactggaaaataacagcaaaattacagaattta

SEQ ID NO: 75652 - DNA, 1026 bp, Homo sapiens
tatcttaactagccttaataaggagatttgagattctgtgactttacatgaaagagcaccttttccacttaatattaatttgaattcctaagtattggtagttcaggatttgagtacaagatatagatctcatgctgttactgtgtgggaaaagattgaggatctgacagaaagtaggttttatctatattgattactttaaacttgaactcaataattatattgaaaaaatccctgggggatatttttatgggtattacttaaatgtttttgttaagaaaattttgtattagaaaagatattactggatttttcacctttgaaattgatcaaaaagtccatgtaaacataagtaatcatatcaattattcatttattcctgatttatatttactttggataaatataggagagttttctaagggtaaaataaatggatggttgtttagaaaacttgagtattaaggggaatgtgaccagtgttagcttttaaaatcattttggcttataataagtaggcttataggttgggcccttttaaaaatttcctatttagtaatgaaaatttgaattcagtgaatttttaaataactactgccatttctgtaatactgggaattgtttagggaccactgatacattaatgcctaagattatattccagtattgtaaaaaatcataagtacttgagtttgtttactcatggaaacatgaatattatttttgatgtttaaatcatattatttgtgcatatttatgccttgtagattgtaaaggcatttgttggtggtcattcaagattactttaggtataaacttacagtaaatgctggataacttaggaaatccatgctaaattggtggaatttaaagaatattttaaatgtaatgttaatattttaagtatatctaataacttaagttgccaatgaagcatttctaagcagatcctaaaaagccaaccttccatgaataattgggactttagcttgcaatcatatatgacaactgacttgctaaaatctt

SEQ ID NO: 75653 - DNA, 1148 bp, Homo sapiens
tataagtgccttactatgaatatatcatctcttatgtgagccctgaaattttctgtaggtgtaaaacaggaaagaatagtaccactctaaattttatgattaccaaattccactgggccttcagcactattggtcagttcccaatttctgtaagcaaatcattatttcctccattaaaccaataatcctatacccactccacacaacttcataaagaaattgggagcttcagatgcgagcatgctgtaaacctgtttgcctgctctctttcgctcaaggcacaattgatagtgttttgtcctccctataagatgagtctctcaggttatgctgtggatctcattcccttcctcttttcaggaaaagagagactatcgactctctcttttcttgcatctttaacttactcctttcagttatatccttctcatcagctttttaaaacatgcttacatctctcccagccttctgacaacccctccatatttcctccaccagtcttcagacaacctctgtgctttcctctccagataactacattccttcttcatcgtcatggccagaatgcttagagttacatacactgttcatgacctcccctttactcttaactcactgtagtgtgtcttgatttcccacaactaaaacaactttactaaggtcaccagtgactccaacaaacttttgtactaaaccaaacacatttttgtcttgatcctatttgactgttgagtagtattcagtacctctgacatacctaacttcttagaatgcttgatatccatgacgacatcacatttttggcctacttcctatctaaaatgatataatgacttgatatctatatgtacatcaaagatgtctcttcttagctcaagacatttatatcaaaccaatgaggattttatctttttttttttttttttaagagacagagttttgctcttgtttgccaggctggagtgcaatggcgtgatctcggctcaccacaacctccgcctcctgggttcaagcaattctcctgcctcagcctcccaagtaactgagattacaggcatgcacctccatgcctggctaattttgtatttttagtagagacggggtttctccatgttggtcaggctggtctcaaactcccaacctcaggt

SEQ ID NO: 75654 - DNA, 1039 bp, Homo sapiens
tttcatgcttcagccttcccagtagctggaattacaggcatgtgccaccatgcccagctaatttttgtgcttttagtagggacgaggtttcaccatgttggccaggctggtctcgaactcctggcctcaagtgatctgcccacctttgcctcccaaagtgctgggattataggcatgagccactgcgcccagccccaaagtgaactttctagaaccttacaacaaatctcctagaaccttctctttatttatatatatatatatatatataattaaaaccgaggtttagagaggtttcagaattttttacaagcttttaagaaaatgttctctcctcctctagactgtaagatctgtgaaagcaggggatctcaggatttttgttttttccttttcctaccagtatatatacctaacagctatcaacacagagcttgcttggctcatattaaaccttcattaaatgaatgaatgtggattatgcaattgttgtagtaaattactctttgaaacaaggtggtgggagatttgttataaggttctagaaagttcaccttggcagggggaactaagggataagatatctaacttccctttataatatctcttttctcaggctgtgtactctgtaggcaatctcaatttcttacataattttgtgagtttataaaataaattattttttgcttaagccatcttgggatagttttctgtcacttgtagtaaaagttattgagtaacaatgctccttgcttgtattttgttccacttactccaggtatcttccttgtggtgttttcccttcgaattcattatccataaacatctttataaaacataggcggttcctgatggtaaccctttattggctttcagcaccttcaggacgaagtctgggttttttatcacaggcctttagaagtctgcctgatcatgatgtgacccatgcccacctctttattctcccttccattattcttccatgatatgggacttcttatagctcccctgctgccacttagatattgttcagaaggtg

SEQ ID NO: 75655 - DNA, 1012 bp, Homo sapiens
ttttcctcacgctagaagttcttaaaattaatgtgtgaagtggttcttgggctactgaattacctattttcttgagttaactcattggcagttaactttataaaagcaagatttttaaattcacatggggaaaaaactgccatctcttaatctgagcattaagtaatgaccttcactaactactttatagtgattattaactttgtaaattgctgattttggttagaacttatatttaaatttctttatatttggtaaaagtattttagtgttataaatcattatgaatgaatgtactaaaataatgtaataaaagatcttactccctttctcttgattgcctcatggttttttattatatattttgatcaactacatgcttattgatcctggctgtattatcagctattagataacacaattttaaagtgcctgttgccctctggacaccgaagactcaacatttattgcttgagcattgcctttgttttgaatatggctttgtaaagacaaaaatccaggctgggtgctgtggcttatgcctgtaatcccagcactttgggaggctggagtgggcggatcacttgaggtcaggagtttgagactagcctggccaaatggtgagacccccttctctattaaaaatacaaaaaattagccaggtgtagtggcacactcctgtagtcccagctactcaggaggctgagtcagcagaattgcttgaacccaggaggcagaggctgcagtgagccgaggtcgtgccattacactccagcctaggcagcaagagcaaaactccatctcaaaaaaaaaaaagacaaaaatctgagctcttcttttagaacagaggagagtaatactctaagttatgatcatttatatggaggaaacatatcagtgttttgtttttctctagtagtgctaaactttaagaattttaaaagaagctaaatcagtaattatgtatctagtttccttccctaagaattacttctggaattattttgttatc

SEQ ID NO: 75656 - DNA, 1016 bp, Homo sapiens
tctcgagtagctgggactacaggcacgtgccaccatacccagctaattttttatttttctattttttgtagagacgggttttgccatattgccgaggctggtctcaaactcctggcctcaagtgatcctcttacctctgcctcccaaagtgctgagattacagctgtgaaccatcatgactgtctagttttggattttaaataaatcctagaatcagttacacctgacagtagtaaaatatttggaattaaactgttcatacctattttacatagaaacaagtgagaaaatattttgatacaatttagttttccctgtcacttacaaagctaaagaatattctgatatttcagaaatagaaagtgaccagttatgttaatctgcatacccactaattactaatgctatatttgtggcaaataaactagataaactagcctgatccttgttctcagcaaattaaacataataggagaccaatcgttatctgaaaaagatgagatttctaatataggtagaataatagaacaattataaaccatcatactccttgccatttgttagtcctagaaaatcttaagataaattggtcctaaacattctgtgtggccttcagaaatcatccttcagattactgctaacagtcttaacatttgtgtcaaagtagtgaaagtggaaccagggtataaatcttatcttttctgttgtgtttgtttatgcctaaactttttttttttttttttttttttttttttgtgacagagtcttactctgtcactcaagctggagtgcggtggcgtgaacatggctccctccagcctccacttcctgggcttaagcagtcctcccacctcaggctcccaagtacctgggaccacaggtgcacaccaccacactcagctaatgttttccttttaatttttgtagagacaggatatcaccatgttgcccaggctggtctcaaactcctgagcccaagtgatcttcctgccttagcctcccaaagtgctggggtt

SEQ ID NO: 75657 - DNA, 1071 bp, Homo sapiens
tatataaaaaggtttaggttgacagatacttgtgattgaaagttatttcagcgcatctaatctgctttactccatttcttatgttgtcctgatttcctttccaaaatcaggatgcaggtagtgtctgcgattatgatacatattacagagctacatcttttggggtgaacagccttcatatcaaaacttatgatagttatgtttagctatcacaagctcagacgtctcaggacggcattttatgatcagtttttctgtttatgattctatctaaaacaccaagaaaatagtaacacagaaaagagtaacaaaaatttttttaaattactgggctttactttttaaaaatgtgtttaataacatgaattcaagttagatgcaaagactgtaagatttcttaaatgaaatattgtttgtttaggtatctctatggttttgaggagtactgccgttcggcaaatattcagttcagaactgttcatcaccatgaaccaaaagtaaaagaggaaaaaaaagacttagaagaatcaatggaagaggctctcaaattagatcaagaaatgcctttaacagaagtgaagagtgaacctgaggaaaatatcgattcaaacagtgaaagtgaaagagaagagatagaattaaaatctccgagggtgagttcttaatactagttttatctggtttaagtattatttaaaattttttattatagccattttcatatatacacaaaagtactacagtgaacctagtttattttccagtatttaatgctgcttagctagctacttttttcgaaatatattgtatattatttcctctacctgaaaacccttccttctgttttctgtttatattcgatcaagtcattcttgtctgggatgaatcccagatattccttttccagtcttctgctaaagtatcacctcattgaaggctgtcttggtcaccttatctgaaattgtaacctgcctcctctctttggaactctcagtccctctgatgttgttctttctgtaatttacttatttattctgtttattgtgattatctattttgccccactctaca

SEQ ID NO: 75658 - DNA, 1068 bp, Homo sapiens
agtcgagaaataataaaagtgagataaaatgatgtagtaaacaaaggagaaaatttttatttcttttttgttgttgttgtttacttttttcattcaaacagattctgacagatatttcttaggtagtatatagccaaagtagacctggacataattaagtaattctatcagttattcttttactttcaaaaggaagagaaaggtacctttgagttggttttcagggccacgtttcaagccagagacattgctatgaaggttaaaggaaaagatattttttcctgcttttttcccctttatagtgatagctattttaaagcttttatcccctctactagggacgaaggagaattgctcgagatgtaaattctattaaaaaggaaattgaagaagagaaaacagaagacaaattaaaagataatgatacagaaaataaggatgtagatgatgactatgaaactgcagagaaaaaagaaaatgagctactactggggagaaaaaatacaccaaagcaaaaagagaagaaaattaaaaaacaggaggattctgacaaagactcagatgaagaggaagagaaaagccaagagaggtacattatcttatgtttgttctccagaagcacctgtctggggtacaacagcgctttgttcctgcttagagattcaggtttgagggaatgttttcttattgggacttccgttcctcttgtctaatgaaggtgagacacattgtgaagatgatgtgtattgcctttcggaattggagaatatactggtcgcaccattttaatagcacttgtgccctaaacagtggcctcaaagaaggctgcgccacccagtcaaaagaaaggtcctgcagttgacagcagggaagggagctggagaaaaatggaggaagtggacaagaggaaacagcgacagcaaaaattccattttaaaaaaggtacaatgtgggaaagctaacaaacacatgggtgcacagtactagagatgtttctgtgtgttagctttaagacatttttctttttcaagttattgtattagattatgtggcatgcacccctgattc

SEQ ID NO: 75659 - DNA, 1045 bp, Homo sapiens
attttctagaaatttgagttgttaagccaaatttgggaaaactgacctgccattgagagaataaatatttggaaaaataggatgattggtgaatgggagaggtaatttgattaaatacaaataggcacaggagctatcacaattacatatgacctaggttagtgagtaaaaaaaagttctgtaatgaaatataattaggattaggaaaagtaggaggaactaattggagttgagtatagtgagtatagaattttaaatatttggacaaaaaatttaagcaaaggtgaaaaacatcaaaatatgtatattgtaatatgtatataaaacatataatacatctatgtaaaatgtgatttaaaaagactgtaactcttttgtaaatggacaaagatttattttagagaaaatttcacagacttgaatgtaagaacaatattatctttaagtagtttttctcatagagttttgaatttaccttatcactctattattggaaggtgccttccaagagaaaacattctcactacaaatgggctgtcaaagcttcatgtcaggacccccagggatcaccaaaataatgccctatatttattacagagcccagtagtacttgttgagcttttaatgcttgtgacactagaatgatctttgatgcagttctcctataagtctttacaggattgatacacaatattttattataaaaatattaaaagtatttttagctctccctgtgttaatcttccttatacctgattatcaatacaaagaaaagccgatggaagatgagtaaacaaatagaattcaacacaaatgtaaagctttgttcttgtggtggtatcctacagtgtcaacaaatgacctaatactcaaatttcttttctttgttagggctgggaaacctttaaaatataaattagtttaaaagacatggttactaaggtagatagcccttgttcattattttgcccaccaaaaaaactagtcttgccaagaactattctaattctggtagtaaagcagatttaagataattcagttacag

SEQ ID NO: 75660 - DNA, 1056 bp, Homo sapiens
cctaacaggaaccaaagtgaaagtaaaatatggacgagggaagactcagaaaatttatgaagccagtattaaaagcactgaaattgatgacggagaagttttatatttggtacattactatggatggaatgtcaggtaagcaagaaactattttcttactattgaaattttttcgatgattaaatagaacatcaacttaatgttatgaagagtgaaagcaaataatggtacatatttacaaagcacaccttggttctgaattttccaagactttgacattcctgctgttatactagcagtgtcaatgcttctagccagagactaccaggatcacacctgtagttagaacaagttacatttattactcatttatagtgagggagaacacacagcaaggggaaccatagggcatcttagtaatatggtgttaaatgaatcaacagaggctcaaggcaccatctttgggaaaacaataattcataattctgtggagacatattactgactatgagcagggagccaggcctgcaacttccaaccgtgcaagtgtttgtttcattaatcagaaatcaagcctatgtcaagcactgtaataattctaagtcgactaattaataaaaaagaacgttagaacttacatttgatcttccgttagatgattttggggagggtttaagaaaggcagggcatgggggctcttgcatgtaatcccagcactttgggaggtggaggcggaaggactgcttgaggccaggagttcaagaccagacctggcaacatagttagacccccatctctacaaaaaattaaaaattagcctggcatggtggcacgcacctgtagtcccagttacccagaaggctgaggtgggaggatcactggagcccaggagttggaggctgagatgagctatgatcataccactgtactccagcctggatgatagagcgaaaccctgtctcataaataaaaaaaaaaaaaaagaaaaaagagattttgctccatattggatcctgtcaggaagttggggtaattatagttggttttcgtaataaa

SEQ ID NO: 75661 - DNA, 3074 bp, Homo sapiens
gtccttcctagatactatctcaaaccacttaacaaattaacttcatgtctaggatgtctaggtactaatcttttgatcttttttaaggactattgtacctaaatatgatactggggaatgttgcaaaatagcttttcatatagatttgagttagtaatatgcaacgtaatatatttttgcttggagcttagtttcccctccccctcaaattcttggcacaaatgttatgatttgttttatttcagaaatttctacagggaggtattcagaggtacatgattaaagatttttattgttatttttggtaagatttttattgtaaaattacattggtaatataaaaacctgtataatataataatatttcctcttacagactcttgttcatctgatagtgaaacagaagatgctttagaaaagaatttaataaatgaagaactttctcttaaagatgaactagaaaaaaatgaaaatttgaatgatgataagctagatgaagaaaatccaaagatttctgcacatatattaaaagaaaatgataggactcaaatgcagcctttagaaaccctgaagttagaagttggagagaatgaacaaatagtacagatttttgggaacaaaatggaaaaaacagaagaagttaagaaagaagccgaaaaatctccaaaaggaaagggaagacgaagcaagacaaaagatctttctttagaaattataaagatttcatcatttggccagaatgaagcaggaagtgaacctcatatagaagctcatagtcttgaattgtcttcattagacaataaaaacttttcttctgctacagaagatgaaattgaccaatgtgtgaaagaaaagaagttgaaacggaaaatactaggacaatcatcgccagagaaaaaaataagaattgagaatggaatggaaatgacaaatactgtatctcaagaaaggaccagtgattgtattggatctgagggaatgaaaaacttaaattttgaacagcactttgaaagagaaaatgaaggaatgccatcattgatagcagagtcaaaccaatgcatccaacaactgactagtgaaagatttgatagtccagctgaagaaactgtaaatattccactaaaagaagatgaggatgcaatgcctctgatcgggcctgaaaccttggtttgccatgaagtagatttggatgatttggatgaaaaggataagaccagcattgaggatgtagcagttgaaagctctgagtctaactctcttgtttctattccacctgccctacctcctgtagtccaacataacttttcagtagcttcaccacttactcttagtcaagatgagtctcgaagcgtaaaaagtgagagtgatataacgattgaagttgatagtattgctgaagaatctcaagaaggtctctgtgagagggaatcggcaaatggatttgaaactaatgttgcctctggtacctgtagtataattgtacaagagagagagagcagagagaagggtaaggactttctagggaaaagtaagtgtttatatgaaaccaaaaatcaaaactgttgagtttcaggtactgttgatctgtaaagtactttctttttcttttctctcttcttttcttattaaaaagaaagaaatgtcagtgtagtctgttgaataatatacttgctcttttttttttttttttttttttcaacattctctctttccccttatttcaggtcagaagaggccaagtgatggaaatagtggattaatggcaaaaaagcaaaagcgtaccccaaagcgaacaagtgctgcagccaaaaatgaaaagaatggaacaggttggtgtctttcaatgctagcttttgtatagtgttagtatttttagcagtttgttggcttgttttaaacataaatggagcaatactatattgttttataactgcattttcatttaacagtattatactagatattttgccatttttattcttaggaactctagctcattctttttaacaactttaggaaagtattcaatagtttatcatttttaaccatttccccgttggtgagcatttaggtttttttgtttttttgttgtttttatattgttataaactttgtgcatttgtgcacttatttctgtaggataccaagaaatgtaattgttaggtctgttgcattttgatatttaagaattttatttataatctgagtcaatcttttttattatttataggacaaagcagtgatagtgaagatcttcctgtcctagacaattcaagtaaatgtaccccagtaaagcatcttaatgtatctaagccacagaaacttgcacgatctcctgcaagaatatccccgcacatcaaagatggagagaaagataaacacagagaaaaacatccgaattcatcccctaggacatataaatggagctttcagctcagtaagaagcttatagaaaacttgatagatgaatactgtaaagtggaatagatcttaaaatatcaacttggattaatgttaataaaataaggaataatgattaactatttagatattccaaatattgccttagcaagaatcaccacatgttgtcttaagtataaatctgtgtcttttcataaaactgacttgataaatattgacttacaggaaggtctccattaagaagccatgtatgatttatataaatcagtgaaattgaagtgccctttgtagcactaacaattagaaatagccagtagttatttctattatgtaactagtagtagtgaagaaaatgtcaatacagggaaactattctgataactataattatagataggtcagggttagtttgtgttgatgttttcttatgtttttctgatcatttaagtaataaatgtttagtatagaaaatttgggatctaaaaataattcttaatcatgaatttaattcacgacttccttgttttcagtcttattcagcttactgtaggagattttaataaactaaagcttttgttgatttatgagttagacgtttgatagaattgtcatcatttttctcacagaattattttaaaatccaaattaacttc

SEQ ID NO: 75662 - DNA, 1035 bp, Homo sapiens
aaccctgaattacaaccacagaaagcactcaactggtttgacattgctaagtatatcctgtatacttttccaggctggattgtatctattcccctctctcttcttttttcttgttgcaaaaaataagctgattaataagtgaaggttaagcagcctgccatatttgtcataatttttcctctttacttttgtttttcgtttgttgtgatatagaacaaagggcacttagcaaatttgaatttgtataataaagctttcaggtgttacagaaatcgtagacaagcaagtgcacatgataaacatcaaaatattacccagctgaatagttactgctgcactttcactaagatgtatttgaacacttggtgagtagggggtttatgttgtgttttttttcattatcgttttttttatttttgtggaagcacttgctatttagaactgccaaagtatatgttcagcagtgtgcccaggattgaaggtgtaaatgggacaaaataaattgtgaaaggaagtgtagttgactgaaaactacagttgtaataagtcttccactttttataggatttttgagcacaaaattatgcaaatattttaatgtttattaatgtttacagtggaattgtgaataagttttcagtggactatcttatcccttgacaaaaatattttgtcttttttctatgtaatttcagagtttttattttgttacaaaaagacaaaaatgaaatatataacaacaatgaagttatttaacaagatttctaaagctgaaatttttgtgtaaaataaggtattatcttgcaacttgttaaatatatttattcagacattggatgttgtatttttatgtattttttaaaatattaataaaatttaaaaaaagaaaattctaggttaattcactctttggatgacaatagctctcagctgtcctttttacaggaggttgcatcctgcagccttgcctgtgttaaagggagtctgtctcagtccatcaaacagtatagaactataaatgggcatctggatcat

SEQ ID NO: 75663 - DNA, 1037 bp, Homo sapiens
attcaaagaaaagcaaactaccccactgattcttttagaatacatgcattttaaaaaattcatatttttgtgttgcctcttggatcttcccttttcattcctagaccacctgttcagaacattgcttacagaaatatttaaaaatgacacaaagaatatccatgagatttcaggaatatcatattcagcagaatgaagccctggcagccaaagcaggactccttggccaaccacgatagagaagtcctgatggatgaacttttgatgaaagattgccaacagctgctttattggaaatgaggactcatctgatagaatcccctgaaagcagtagccaccatgttcaaccatctgtcatgactgtttggcaaatggaaaccgctggagaaacaaaattgctatttaccaggaataatcacaatagaaggtcttattgttcagtgaaataataagatgcaacatttgttgaggccttatgattcagcagcttggtcacttgattagaaaaataaaccattgtttcttcaattgtgactgttaattttaaagcaacttatgtgttcgatcatgtatgagatagaaaaatttttattactcaaagtaaaataaatggaaatatcactgagcagttgtttatactgtatggtaccatagtattctcactggactgtggatacgttgaaatgtttttcaatcaggatcatcctccaagcagtcctgttcattcatgtctgcctcaaattgctggtgaatacataaaatagttacttgctaatcatttcaatgcatgatccttttcttgcctcccttgtgtcagggtgggcattacatatacttttctttttttttttttttgagacggagttttgctttcgtcacccaggatggagtgcaacggcacaatctcagctcactgcaacctccacctccccagttcaagcaattctgctgcttcagcctcccaagtagctgggattacaggtgtgtgccaccatgcccggctaacttttgtatttttagtagaaatggggtttcac

SEQ ID NO: 75664 - DNA, 1024 bp, Homo sapiens
atagtaaaaaatttaaaataagcaatttggtgactagtggaatagttaagtaattttaggaaaacagcaaaaatctcttgatttcctttatttttctttttattatcattattattattattatttgagatggagtctcactttgtcacccaggctggagtgcagtggtgtgatcttggctcactgtaacctcaacgtcctgagttcaagcgattctcctgcctcagcttcccaagtagctgggaccacaggcacatgacaccacgtctggccaatttttgtattttttgtagagatagggtttcactatgttggccaggctggttttgaactcctgacctcaagtgatccacatgtcttggcctcccaaagtgctgggattacaggcatgagccaccacacccagctttttttaattatttttttaagcccaaacttcaccatcttggtttcctttataaccctcctaggaatggggctttaaacaagcagcttagcaaggtagcagagcaaactatcttaaaactggagattttgatagacagggcctttgagtcccaaactagcattagaaaatctaattctctggccgggcacggcggctaacgcctgtaatcccagcactttgggaagccgaggcaggcggatcatgaggttaagagatcgagaccatccttgccaacatggtgaaaccccatctctactaaaaatacaaaaattagctgggcatggtggtgtgtgcctgtagtcctagctactcaggaggctgaggcaggagaattgcttgaacccggaggcagaggttgcagtgagccaagatggcgccactgcgctccagcctggtgacagagtgagactccgtctcaaaaaaaaaaagaaaatctaattctcaactgtaaggttctatggtcattaatgatctgagaaattgggggtggtggcatacaattacatacacagatttataaaatacgagcagtgattccctaactcttcagttagactaaaaacatttgtttataga

SEQ ID NO: 75665 - DNA, 1790 bp, Homo sapiens
cttggggcattcctcatatatgtcttttcagattttttagtaacaaccatcatttatcaccatgagatatataataaggacaagatgtgtgtagaggcagcacagggtaccagtatgaaacttagagaacatttaaagatttcatactttcgactgggcacagtggctcatgcctgtaatcccagcactttgggaggccgaggcaggaggatcacctgaggtcgggagtttaagaccagcctcaccaatgtggagaaacccccgtctctactaaaaatagaaaattagctgggcgtggtggtgcatgcctgtaatcccaactgcttgggaggcttaggcaggagaatcgcttgaacctgggaggcggagattgcagtaagctgagattgtgccattgcactccagcctgggcaacaagagcgaaaactccgtctcaaaaaaaaaaaaaaaagatttcatactttctgtctctctgacctcgggttgataagtcaataaataagaattttaacccaaagaaatacaaggatggaattaaaaaaaaaaaaaaaaagaacagattttggcattataagaaggaaatcagctctgtgttattttttgatgtgaactgtagaaagtccagtttgctgggtgtcctcctgaggtgcagtgagtgtactgtccttattcgacaattcaaaaggctcaggtctagtagatgaccttttgaactttcagctaggagcctattggtaaacaaagttccttaatgcatattttattacccttgtattttttttcaagttctcacaaaacagtgatttcatttaatacttctttagaagttgttttaccagttcttagatcttttcagactgttttctgagtgggaatccagaagaactctagcttggaatgcttgctaacagtatctaccacgctgcatgttgttctttggcaggtaccagaaagttatacaataacattttttttctttattattaaactttttattttgaggttagtgtggattgaaatacacttccaacaattaacacaaaggtcccctgtgtcctttacccagttttccacaatggtaacatcttacaaaactggagtacaatgtcactcacatccaggatactaatattgatacaatcaagatacagaatatttctattacaaaggtcttgtgttgccttcttatagcaacacctactttcttcctactccttccctcatccattccttaacccttggcaaccatatgttcttcatttctgcaattctgttatttcaagaatgttgtataagtggaattatacagtatttaactttttaggattggcttttttcctcagcagaattttccaggcttttgcaagtatcaatacctcatcctttttattgctgaatagtattacaggtatagatgtaccaatttgtttaaccattcacccactgaagaacatttgggttttcagtttttgattattaagaatagagtttctacaaacattcacatataggatttcctgtgaacacaaattttcatttctctaggacagatgcccaggaatgcaattgcagggttatatgggagatgaatgtataacttctttagaaactgccaaactctttacattcccaacaggaatatgtaagtgattcagtttttccatgtcctcactagcatttggtattgccactgtttttgtttttttgttttgttttgtttttatgttagccattctgataggtatatagcttgttttttttttttttttttttgagatggatttttgctc

SEQ ID NO: 75666 - DNA, 1348 bp, Homo sapiens
cctgggctcaagtgatcctcctgcctcagcctcctgagtagctgggactacaggtgcacaccaccatgccggctcatttttgtattttttgtagagatggggttttgccatgttgcccaggctgatgtagaacttttgggctcaagctatccacccacctcagcctcccaaaatgctgggattgagccactgcacctggtcagtcacttagcttataacatatatttggctatttggaaaatatttttagatagatgatatgtgtcataatagcttataagacattttataggtcttaaataggtcattttataggtgcaatggggaaaatactggattttgaagtccaaagaccttagttaggctccagctgtccagttactatctgtataagtgacctcatgtaagtttcttaagatttctgaaccatccctcccagaattagtaggaaaatcataagggaagtgtaatgtatacttatacctggataaataaggatagcatgacattaagtattttttttaatagtaacacatatgccaaagaattgtaacctcagaatagaggaaactaatttcacttactaaaaaggaagaaactttaaaaaaataaatgattagccaatagaagtttacatttcattgaaaagactattagaacttgaaggggacttagtaatcatattacctcatttttcaggtaagaatcaggccttattggagacattcaagcaaaggttggacaactacttttccagaacagaaaggaaactcatgcatcagaaaaggttagagcttgatgactgataagatctccctttattcttaagttccctggttctaggatatattttgtttgccacaagaataacagcatcattgtaatcattcccaagatctaagccagtgattcttgaatttgcttatttcttctctccctctccaggtttcagggatataatcagaaggtaacccctgatgggtctttgccacagtaacataaatttgctgtaatatatggaaactaggatcaaataaaagaacaaccacattactgctacctgttctcaccatcaggtggtttatgtggctggtggaatttgttagtctaagcttactattaaataactgcgaagtgaatagtgaaaaatttagaagacctcaaattagcaagtaactctgaaaatcattgatttactcagtcatctccagtattttctctgaaccagttgcctacaattatgtataccataatctttttttttttttttttttttttttgagacaaagtctcgctctgtcacccaggctggaatgcagtggcacaatctcagctcactgcagcctct

SEQ ID NO: 75667 - DNA, 1038 bp, Homo sapiens
ttactgctcccacgtgttctttcccatctggcggccgcggctcctgtccagaccctgaccctccctcccaaggctcaaccgtcccccaacaacccccagccttgtactgatgtcggatgcgagagcctgtgcttaagtatggtgtctgttctctgccgtgagaatccggggttcccggacggggggtggcaggctacgctccaggaaagtggcggggtctcccgaggaggccgccgcacgtacctggagcagtggggggtgcgaagcgggacagcgcttcgccgggtcgggtgcagaccttcctggagatggtgtcacctgggcgagggtaggaactttaggccctgagccacccccaacccggatctggggagtcggggtcctgttttgggacactgaattagactataaggtatttacgatgtgaccttgagctgcccgggggaagatcctcctttaaatgaaaatcgtctttagacataataccaggtctaacaccccttccctgatctgctcatttcccaggatgcgctacttagagctttccctttacgccttactggaggctttagaataatcaaagcagaaaatgtaatccgatctaaaagctaaataactaattttatttcttttacatctcggcagtctaccttcatagaagtctagacttaaaatggactttaaagtctgagcgcggtggctcacgcctgtaatcccagcactttgggaggccaaggcgggcggatcacgagatcaggagttcgagaccagcctggccagcaaggtgaaaccccgcctctactgaaaatacaaaaaattaactgggcatggtggcgcgcgcctgtagtcccagctactcaggaggctgaggcaagagaattgcttgaacccggcaggtggaggttgcagtgagctgagatcgcgccattgtgctccagcctgagtgacagatcaagactgtcttaaaaaaaaaagaaaaaaaaagactttaagggctcagcgttaaagacccttttaattattatttttttgtaactt

SEQ ID NO: 75668 - DNA, 1555 bp, Homo sapiens
ctagaagaaaaagcaggtaccatcagcgaattctaaaatctcctaaggattaacttcggttattttctgcttagacaacgctttctattcccgacttcctctccaataatgacccgaatctgtcgaaacttcttggaagcctaatttacctaatcccacgtccctaacggtcttcggaagcgaagcagtgtcaacagtccctggtaaacacaagtagtattacaagtcgggagctcttcaagtcttggatgagactgtagagcggtcttgtgcggcaatgtgctaccttaaaataaataaataaataaacccctgttatgtccggagtttgtttccacccggagaggaatggaagagcaccagagagcgcttagctttctggttggatgttttgggtgagtttcttggcgcgcatgcgtgttgtgtctcaagggcgggtttgaagggaagtgggtgttgacctgcgggcaactgacgctgttgtcagattacacccacgacggtgcgggtctcgggcgttctggagatacgtaggggtgaatttatgtttccgacgattgcatctggaggggtgtgtaagactctgtggctgaagaaagctattacgcttcttatgtgggtcattattttaaaaatagcatttcgcttttatttgcttgactgcctcttctcaacaaattttaagcccgccactacatgtgtttggttttgccctaccagctctggggttggggagtgcactgttatggttattgttgctcctgtggccattctcttgtcatccccactttcacattttggcgtggtgtattaatagactgagtgggattaatgggtaaatatgactttatagtcagctctaatcctggattcaatatcagaatttagattttcagctttgtggatgttcgacattttaaaaacagttattgcaaagaggtgaaaattttgttctgaagtcttaaggaaacagagaaagtttttccgtccttaagtgtgggacttgttttgtgaccaacaatatgaaaggctctgaggtcagcttggagaagaaaaaaaagattaagatgccagtgaagagacttcgtgaggtagtttctcaaaatcatggagatcatttggttttgctgaaagatgagttgccctgtgttcctccggcattgtctgcaaataaacgtcttcctgttggaacggggactagtttgaatggaacatcacgtggtatgtgattccatgtagtttttcaaccagttttagtttagtaaatctttagtccttatttgtttaaattcccaaacgtaagatataagtctagtttgtacagatgtttgaaaactgaccctgtttcccgggaaaatggccaggaagcctataaaatgtttgaatagatggaatgaatgaaactttaacgtcccctgttgtgctttttttttttttttttgcattgacttttgcatatttttttttttatatttatggtggatacacttaacttgtataatgtgctttattttcccccacgtagtgttttttatagttttcccccaaagtagtg

SEQ ID NO: 75669 - DNA, 1054 bp, Homo sapiens
attaaaatataacattcaggctgggcacagtggctcatccctataatcccagcactttgggaggccgaggtgggtggatcacttgaggtcaggagttcaagaccagcctggccaacatggtgaaacctcatctctaccaaagatacaaaaaattagctgggcatggtggcacatgcctgtagtcccagctactcaggaggctgaggcaggggaatcacttgaatccggaaggcagaggttgcagtgagttgagattgggccactgtactccagcctgggtgacagagcaagactctatcttaacaacaacaacaaatgtatatatatgtgtgtgtgtatatatatacacacacatatatgtatatatctataacttaatgactttctaaattatatattttttaagacaaaaattcagaagaatgtactaaaataagtttattatacttaatatatcatcataaagtagacattaatttgctataattttcaagacttaacagggtttatcttgagcttttcatgtggttgaagataatattttattggaatgattatatgcataccaagtaaagtttagtaagtactccctgcatgactaaaattgagcacgcagcaaattatctagtgagagaccaggaatgagtctataaactattagtttatagataactttacttctttaagcctcaatttctttacctagaaaatattttctgttgttcaggataaaatgagatgacacatttgaaaagcacattgattccttaaggagtggctcctacttagtcctaagtacttacctgccatcatccatccttccataactaaatctgtaacttaatgactttctaattttggaagaatgaaatctgctaatttagatgtcttacttataaagcttataattacagagagagttgaagttttgtttacatactggatatattagttgttcagtaaatgcttaatgaaatgaaattagttgagtctgtttcatctgttttatgtagagggatctcaacacacttttagaaattctgtaaaactataa

SEQ ID NO: 75670 - DNA, 1033 bp, Homo sapiens
gcttgagccactgcaccgggccccatttcaggtattttaataaatagtgctgaaaactatgttgtcactctagtttccatttatatacaaatgcatatattattgctgctgctaagcatggatgtttatttgagtactcactatcaatgattttcaaaccttgacctcaaacaaaatcctaccatttaggatataaaagatgggatgttttggtttaaaattctctgattcaagtagaggtttagggtgagggcctctccttcctggtcttctcttagccggctgcaatggcccctgagccatgtctgtggtagaaaggacagcactgaggtttagaatggttaaggaaaatgattaaggtcacacagcagagtcaggcttagtcagatctttgtgcttctacatctttccaatggcatcactgctgctactacagtggatacttgcaatgtaatacatatttttcattgtttattaaatgcagtaaattatgtttaactcctctaatatttcaatgtattttatcatctaactctttcaaatgatatttgaaaataataaaataatcttatttcttctagactcattttattagtgctgcactcaagactagtagttttcagcctgttagtatgccctcctccagagcagtggaaaagtattccgtaaaaccagaacaccctaatcttggtagctgtaatccatctttatataacacatttgcttccaaacaaggtaaaaatatgtagttctctatgaataaaaaatgtcagctgtgaattttctttgtgctacataagctgaaaacatatttcctgagcagtaggagtttttgttttataaaatttatttataggagtttttgttttataaaacaatttttttaaatgttctttttttaaaattgtgtttctcaggctaccttgtcttagataaaatgagttctttttttgcgtcaagtaatttttagtttattttgaaattttttaaattatggattatgttcttaactgattttaattaatctcataaa

SEQ ID NO: 75671 - DNA, 1011 bp, Homo sapiens
tggcctaaattgtaggctactttgtaggctataaattttttttttttttgagatggagtttcactcttgtcgcccaggctggagtgcgatggtgtgattttggcttgttgcaacctccgtgtcccaggttcaagcaattctcctgcctcagcctcccaagcagctgagattacaggcacgcaccaccatacccagctaattttttctatttttagtagagacggggtttctccatgttggtcaggctggtctcgaacttccgacctcagatgatccacccacctcagcctcccaatgtgctgggattacaggcatgagccactgcgcctggcttttaggctataaattgagtagataatcatcataagaagctaacttaggccagaatacaaatatgtgagatattatatacaagagaaatgaattagtatttggaaaatgatactatatctcttctatttcaggaaatgtaagactattggaacaaattttgaataataatgattctttgacaagaaaaagtgaatcatcaaacaccacctcactaactaggtcaaaaataggatggactcctgagaaaacaaacaggtaaaaacaagagattggaatgaaaactagattgaaaagagttttgttaagatttttcaaatttctttgggacttttaataaattatagcattgcttcttaaatttatcttagatttagttactattttttgatgctaatatatcttccccctttctataatatagctatgaaatgaatatctcattttttcaaaatgcaggttattaatttctaacgtatggattattcatttctgattaaatgatatctaggatttgtttcaaaaataatccaagataggttaggggcaagtaagttgggagtatagataaaatgaggctagccaaaagttaatgattgttgtagttaaatattgggtgtatggggttcattttagtattttctctatttttgtgtatatttgaaattttacataataaaa

SEQ ID NO: 75672 - DNA, 1414 bp, Homo sapiens
tggactaattctgtgaagtctgtattctttgtcatgtgctcccactgaagtctctgttttgttagcttagtctgccagtgattggaaagagatttccttaactgccttgaactgataagtctccctctctttgccatggattacgtgtgtgtgtgtgtgtgtgtgtatgtgtgtgtgcgagtgcatgcacatgcatgtgctagagcatgcctccagtgcctggcagattatgagtctgttttagcctttcacttcctacttgcacagagcctcaaggtcggaagtgagtgattaggaccttcccaggtctctcttgggcatgtacatagccctgtatgtggactagaaggcatgaccttctagattcctaggaatatgttggagcttttcaaaactccactttggacatttcattgcctagatttttaacatttgttgaccacaatcttgtttgccccaactagtgtcactacctcacgctgctgagatgttaaacaattgccaccgttttttgaaaaatgccctggggatactttctcgctgagctagcagtgagtcagttcaaataaagacaaacactatgaatgagacttttaggagagcttgaaaccattctactgtctttagtggttgtgaggctgttggttttcgaggccgccacagagttgggaatagggtcccgagaatgaggcaagttaaaaaaattccataaagcttgctcttcttacctagagtcagccatttttcttgaataaatgctcctggggttcttgcaagtctttaatttccagaggttagaaaaacttgattttgatgatttttgctagggttctcattgtgcttatggagaagcagattttcagaatttcttactccaccaatctggaagtgcttctggatgttagcttcttgaaagcataaccttttcctgctccttttctgctacatctaaacttttctggttagataattttgtctcttgtgattttctgtgtttcatttgtttaatcacataactgattaattccatagttcaattttaataggataccatttagtaatatagctaagactgtatcaaagatttgtgtaatgaaatgtttactgaatttacaacaatttaggaaactttttcaaaaatcttctgtagcgttgaaactctaccttctcaaagatttccttcctgtgaagagctagaaacaactaaagtgactatgcagaagtctgatgatgttcttcatgaccttggccaaaaagagaaagaaacaaatagcatggtccaggtaaagtgggaatggtcttaaaattgatgattagttaagataaaaattaaaaaggaataaaagagttataaagatagaaattaggaggaaggatgaagaaaaagcactgaaaaagatatgtcagccacatc

SEQ ID NO: 75673 - DNA, 1603 bp, Homo sapiens
gcctcctgagcagctgggattacaagggtgtgccaccacacctggctaatttttgtatttttagtagagacagggtttcaccatgttggccaggctggtcttgaactcctgacctcaggtgatccacctgcctcggcctcccaaagtgttgggattacaggcgtgagccaccatgcctggcccacattagtatttctaaatggaggaaaaacactttgattgccaagtattcttttgtaagtcttcagtttgacaaattgagtccttagaatatattggtataatgtatggcctcaacaatagtgatagctgttattttgattaaaggaatcgttgtgagtttagtaactttctggtctttttttcttttaagccaaaagaatctctgagtatgttgaagcttccagatcttccacagaattctgttaagcttcaaacaaccaatacaacaagatctgtattgaaagatgctgagaagattttgagaggagtacaaaacaataaaaaagtacttgaagaaaacctggaagctattattcgtgcaaaagatggagctgccatgtattcgcttatcaatgctttatctaccaacaggtaagaggatgttggcatccagggttatttatgagtctgtcagttccactttcttcataatttttttctaagcactgtattttcctattagttttcatatttttaaaaggttctttattgactttgaagatgtggaacttataaagttggaatttggatatatatatatggtggtactacttttttctggtggaaatttttcttttaattttttctttctttggtacatatcttcttggatccacatgtgcttttcaaacatttatccttcaaatatttgatgaaaactaataccatgaaaacaaatagcaaaggtttttccttttcagatgaaggatattaggcccccattctactatcctaatatcctttccttttcagatgaaagatattaggatagcaggttcacaactagataagagttagatctgatccaagtcctgctcaggacagtaagtgctaatttaagaaaattcctttttctcttttatagagagatgtcagagaaaattaggatcagaaagacagtggatgaatggattaaaactatttctgcagaaattcaggtatgtcttggaaaaaaactgaaaattaagtgaattctcagaagataatattgattccaatttacaggcattacatttgttttcaaaatatttcttatataaaaatccacttatttttaatttaattgtcactctttatatttacttagtaataagtttagctttgtttaacaagtatattatctccacttatattctggctcttatttggcaaattgttggacaaaaactaaaacatgaataatctgaaagaaaatttagcaaaagtgtttggaaaaagaattatacttgcaaagatatttgaagacagtggatttaggagcattgacccgccaaagtaaaaataccagagtaatgcaaagagaaaaaaaccaacgagatttactaagtttacggaagtcagttccagatggaaaaacagcctctttctcacaaccacaatg

SEQ ID NO: 75674 - DNA, 1904 bp, Homo sapiens
gaagatttggagtctagttttcgctctacagctaactggcaatgtatcttactcttttgcaatgaatcccatgtaaagtatatttgtttaaactttcacataattttaatttatatttatctcagttttgttacaaaagtgtttgctttttttgaaatgtatttttaattttttaaactgttagcaaaattcatatggttcaaacatcaaaaagtataagaaggtttgtcatgcaaagttgtcctgctacccctgcaacccttctattatttcccattccccactccaaaagatactagtctttttagggttttgtttatttttccagagatttttgatttttatatatccaataaagccaatatcctttatttttaatgcatttaaaactgctaaactgtatttatatagcagcaaaaaataaattctaatactttctgatgtgaaagcattactatttgtagacattttaagtaattttaactttggttatgttaaggatgaactgtcaagaacagattatgaacaaaaaagatttgatcagaagaatcagagaaccaagaaaggtcagaatatgactaaagatattagaaccaacacacaagataaaactgtcaacaaatctgtaattccaagaaaacattctcaaaagcaaatagaagagcattttagaaatctacctatgaggggcatgcctgcttcaagtttacagaaagagagaaaggaagtaagatcctaatctgttcttttaacataattgttgtgttataattgatcatttcctttaagagataaataatgaagcgaatgtgaaggtgttttaaaaatatgaaggactatacaaatgtaagctatctttacactattgatacttagggttttggatttataatgtgaaaagcactgaacaaaatagatagttcctttcttatgagatctcacaccctggcatcatgattttgtagttatagcaggtataaaggtatatctagagatcatctagtccaaaaactagattctctagtttatggtactcaaaattttcatttgcgtgtgtgtatatagtttatttttcagtttaacaaatgcatgtttagtgcctagtatatgcaaggcgtggtactagatggtatggaggaaatttttttgactgctgtaactaggctataagtttctaagtgccaaacatggattgttgagcagatcagtaaagcatctaattcaatgcttatacttagtagattctcagtaaatgctccctttctgtgacatttagattatggttgaaggtgggttcagaaatatataaaattatttaaaggttaaggttgttgtatttttattgtactggagtataataaatatgtaaaatgtgtttaaatgtttcttgttggtgctgaaaatatacttagtaatgtaaaaattttcatgtttcttaggtggatgatttttatatttaaagcttttcaaactaatgcttgaaacctgttatctagaatttaagggctgttgaaaacagaggttattttttacttaatcattcttgttataatacttaagctagcaaaaggaggctttagaaaaatgagataagtgtttgatgactgttttcatggtgagttgaataactttgtacacacaggggcttttgaaagcaaccacagtaatacaagatgaagattatatgttacaagtctatggaaagccagtttatcagggccatcgaagcactcttaaaaaaggaccatatctcagatttaattctccatctcctaagtccagaccacagagaccaaaagtaatagaacgagttaaaggtaaggaatctcatttttaatgtttaatctcatttcttaatagtatcagtttaatatgtaaagtttctttttgctttttatttattg

SEQ ID NO: 75675 - DNA, 1872 bp, Homo sapiens
gtcattgctgttcttttgttttgattaacaatttaagtatgaatattttttaatgtaagagacttttttatttttgatattatgggttaatttcatgtcaacataatagctctctgtttaaacatatctcctagtaataaaatagctcacacttttaaagttcttactgtgtgcccggtacagttctgagcactttacatatattctctcatttaatccaccctataaagcacatggtaatatacaaattgtatagctaagaaaactgaagcacaaaagggttacataatttgtcaaaggctacacagctagaatggtgccaggattcaaacccaggcagaggcagtctggctttatagtctgtgttttcaacaagtacactgtactacccctctttactttgatatgtagaagtcaagtgggactttggaagtgaaagtttttgacattttaaaatgtggatagtattaatagctttctattagcctttattttgaggtttaaattagatagtgatgtgaagcgttgagtacatataagtgcttaataaaagtcactgggtatggtgagtatgtcgacagtgctgatgatggagggaggggtgattgtcagatagggcttttttaaatatgagaatatagccattaagatccagatggtatattagacttttccctttttttctgaactagttgacttattttttctcctaaacttcttaggacaaacccaaagtaatagtgataccatgccacctgctggagtgattgtcagcaagccacaccctgtaactgtgactacttctattcctccatcatctcgaaaagtagaaactggagtaaagaaacctaacatagccattgtagaaatgaagtcagaaaaaaaggatcctcctcagcttactgtgcaggtatgccagggtgcatgagtagaaaattttaaggaagaaaaaatttttttgcttaacgttagtacggaaatccattatattgcttcataaaaatattgcttttgatcatgactcttttttttaaatttatttttattttttagacagagttttgctcttgtcgcccagtctggagggcaatggcgcaatctcggctcactgcaacctctgcctcttgggttcaagtgattctcctgcctcagcctcctgagtagctgggattacaggcgcccgccaccatgcccagctaattttttgtatttttttttagtagagatggggtttcatatgttggccaggcttgtctcaaactcctgacctcaggtgaatccacctgcattggcctcccaaagtgctgggattacaggcatgagccaccatgccccgctggctctgttatttttaaaactgtgatattaatatgatgtttctgtcctgttttgcatgatttaagctgctcttctaggccaatgacttatatacaagtggcttggtgatattccaaggggaacaattgaactgtgtattataattaattttaaaaagttaatatatgtgacttatataattaatacttcaaactttacactaacatatgttagaagacttgaatgaatacaagacttcaacaggctcatgtgggaagaaaccctttgacatttcacaaacatctacccttcggcctgggatccagctgtagaagctgaggtcttcactaggtctggacaaaggtgaacatgagtatttacatgcgactttctattgaccagtcaggaggcaactgtaggaaagcattcatgaactgtggtaaactttttggctgatttactccaactcctgtattcgtcttaccatccttgcttacttacaaataattagaacactccagtccttagactgctccaaggttcctcttttgattg

SEQ ID NO: 75676 - DNA, 1045 bp, Homo sapiens
ccaagtgatccctctacctcggcctcccaagttcgggaattacaggcgtgagccaccacgccagcccaaaacaaattttgaattgtttatgaacttgaaagtttgtttcagatccttacatttataactatttggaaagtgataatctttagtgtaactttttggtaatttaagttgtgaaactctcatgtgaagaaagaatttctgtcactttggtgatgaatctttgatttacatgggaattatagatatcctaaatgaattttatagtgacagttgggagtttatattttggaatgttaccttgttatcccactgttgacatgatacaaaaatatgcatttcttcctggcatttatttgcttttgaataatgaagttatggctttactacacagcaaaatagcactgtaacttaccccaggttttgtttattgtaagcaaacttggccaagggtacagttttaaaaggagagagaataccagcaatctttcatgatcataagtaatgaaatagaactgtccgtaagtgacatttgtgcttaattgaattttttcatcagtatttttttttaaccttctgtttattgaaacttctgtgataacaagcaataaatttttggactgtttatcattctgctgtcagtaagaggctattgcatgactacattttatataatgaggcctaatgattagatttgtaaaatgactattttgttttttttcctgaattatttgattctgtatccatcttcatgtgagttcatatatgtttatacttagagatctacacatgtaaacactttcctttatcttaattctggaagagaagtctcaattatatcaacctgttgatcaattaagtgatattgctgatggagtcctttacagaaaaacagctgattaattttttaaagctattgaaatgttgacctaatggcttggggactagcttggatttcatttactaattaaatcaattctgaatagggtattaaaatgattaaaaaggaccatgtaattataagcttatactataggtggaa

SEQ ID NO: 75677 - DNA, 1049 bp, Homo sapiens
tgaaatggctgaatattaatatagtcatgaaaattaggtttagaagaaatttaatgatataaaaagatattaataatgtactggcatataaacaaagcaggatactaacaatgtaaccccagtttacaagatcttactcaaaagtaagtaggcagctagcacagtggctcatgcctgtaatcccagcactttgagaggccaaggtgagtggatcacctgaggtcaggagttcgagaccagcctgaccaacatgatgaaaccccgtcactactgaaaaaatacaaaaattaggtgcgatggtgcacacctgtggtccctgccactcgggagactgagacaggagaatcgcttgaacctgggaggtggatgttgcagtgagctgagactgtgccactgcactccagactgggcgaaagagtgagattctgtctcaaaacaaaacaaaacaaaaaactgtgcataaaacaaaagtttgaaaaagcatacataccaaattaactgtgtttattgctgaacctaggattataggtgagctttatcaattttttaaactcttacatttttttctaaattttctacaatgaacacctattatttatataataatttttaagaagtctattaactgcactaaagaaatgttctagaagtctcctgttcccctttcccttcctgaagatgactttggaaataaattttttctttacattttaagaggaaaactacctataatacagcctatatgtgtattaccgtgaagaaagggcagctggacatcttttctagctctgatctgatatggtttttatgtgtgcactcagagtggaaatcaaacagtttaggtacatgatatgccagatagtcattggcccaagtcttattttgagtttaggagttcttttaagcttttcattagactaatctgaaagattttaatttgatttcataaactatctcccacaaggagattctgtttagtgtgttttatcttcttcagaggtactttttttttttttttttgagacagggtctcactctattgcctaggc

SEQ ID NO: 75678 - DNA, 1026 bp, Homo sapiens
tggtctcgaactcctgacctcgtgatctgcccatctcagcctcccaaagtgctggaattacaggcatgagccaccgcacctggcccaaataatatatttttaaaatggtcagaggacagacagttcatatacatagaagaaatacagatcacccatgtacatataaaaagatgaagatgatcaacctcatagataataagaaaaaaagttattgaaattgcatttttactgatcagatcggcaaaactctaaaagtttgataaatctgggggaaattgtcattttcctaccttctggtggtagtataatatagtaaaatcttgtagtaggaaatctggcaatatctattcaaattaaaaacataattagtcctttaatagagcagtcccacttctgggaacttattccatagatatatccatatatcatacatatgaaatgactgaagtcaagattatttgataactctgaggaagggctctaggtagaaaggacaagagtaggagagagacttaattttcactatccttttgtaccttttgaattttgaaccatttgaatgattacctattcaacaaattaatattaaattgttacatttttccttctccagtactttccatctccctgctgtcttcatctttccctaactcccaattcttcttatccttccattactttttatatactcagtttgtgtgtgtgtgcaaaaaggctgattttttggtatgttgtcaatcacttaaaatgcttcctttctgttctatgcctttccttcatgtctgtaactgggtttgatcatcagctttatctatttaatctttcagtcttctttatttttaaaatttcagcttttatttaggtatagggggtacatgtgtgggattgttatatggatatactggacccaggtagtaagtgtagtacccaaaagtagtttttcaactcattcccctttcttccctcctgccccctgccatcatagtccacagtgtctgtttttctcatgtttatgtctatgtgtgc

SEQ ID NO: 75679 - DNA, 1004 bp, Homo sapiens
gatcgcaccattgcactccaccctgggcaagggagtgagactccgtctcacaaaaaaaaaaaaagtatacaattgaatagatgcttagactactttaagtatatggtggtattaacaatgatgtcttctcaaggtattttttaacgcttcactaaatttaggaattatcacattaatggctaccaccattgtcattattattattaattataattgccattatttgtgtgctaaaatggtaagggatatctgaagcaatgtatcatgccatcctatggagttctttactgactactatctttttctgtccttttaaaaaaaaacctttaggagatgatatgcctgccatcatgcttgttaatactccaacagttacccctactactacacctcctccagcggcggcagtttttaccccaactttgtcagatatttccattgataaattgaaggtatcaagcccagagcttcccaagccatggggtgatggagacctgccactggaagaagagaaccctaactcacctcaagaagaacttcatccaagagctatgtaaatgagaacatactcactagtaactgtacatttcaacttatgtttgacttatgtgatccattgaaaacatagaaatattatacaaagctttataaaccacagactaccttatactttgaaagaaagaactttcataagtgttgagttttgaaaaattatcaaattataccttcaccttttttcttaaaaggtttgaaatagctagaaataaaggtatctattatattgttaataaaatagaaaacaatttctccctattgtggatcattatttactatgatcagttaacttttatattattttatatctctctgtatggaagagctttcaagatggcctatgattaaagcatgaaaacaacttttaaaaatcttgttaattatagtagtgcagatttaaaaaaatattttgctaaaggagacatagtcttcgagtctgttttttatat

SEQ ID NO: 75680 - DNA, 1092 bp, Homo sapiens
aagaaggcataaatgagatatctttattttcagagaagcattactaacattcggcctattagtgtacaattatagcatttttctcctctctttgaactttttcaagtggcaaagcatgtttaaatttatttaaagtaaatagctaaaccaaaccaagactaaattataacttgtttctctttttctacatttgaaactaaattctaatgttgatatttttactatgcctaaatcacatatgctacaaattcataataaagtcaaatacaatagtacaatctggaaaaaccccaaataacttgaaatcatgtaccagtgggcattttatctatacatagctaggggatagggacttataatctggagttaataaactttatttcatgaaaaataaatacaaatactttcaatgaatttaaagtcatgttaatatctgtatttacaagataatctactttgttggactctgaggcccacactgttcctcattgttgggatgggcctattttgaggcatgaggaagcctatacagggtgctccagtgagggtcttcaataccaatgccctcgccaagtaagccagatgtcagcccaaaggcaaagggacattgaggtctatagctgccataccatacttctgcagtttttcatttttgcttgtggtccaagttgcagcattacagtgctttgcccccattgccacactgtggcattactttactgcagaaatatgaggaggaggctgtgacccaaaaacaatgatatcatataaaacatttatgattcatagtagctcaactgtgtgggacagactgtttgatttttatgtttttataatctccagtttatgttgtaccaaattatactgtggtttatatttgaggcaaagatagagggcttttattatagacaaatggaaatgagaactagatgaaaataaagagttcatctcctttccaaaaatgctaatatcatcatctcatgactgataagtttttattaatcttaaattgagaaaaatgcaattgttcgaaataatttatttttattaattgtctttatgtttcttttaggaggatgatcctcctagtga

SEQ ID NO: 75681 - DNA, 1042 bp, Homo sapiens
ggagctcacataactcaatattaagaaaacaaacaatccagttgaaaaatgaacaatagatttggaacagtcctttacccagagaagataatataaatggcaaataagcacataaaaagattcttagctgggcgtggtggctcacgcctgtaatcccagcactttgggaggctgaggcaggtggatcacgaggtcaagagatcgagaccatcttggccaacatggtgaaaccccatctctactaaaaatacaaaaattagctgggtgtggtggtgtgcacctgtagtcccagctactcaggaggctgaggcaggagaatcacttgaacccagaaggtggagtttgcagtgagccaagatctcgccactgcactccaccctggtgacagagcaaaactccttcttgaaaaaagaaaaaaagattctcagcagagttagtcattaggaaaatgcaaaataaaaccacaatgagctaccaccacacatccattagaatatctaaaatctaaaaggcggtcatgccaagtgtcggcaaggatgtggagcaactgaactctcatactttgttgattgggaatgtaaaacgatccaacccctatggaaaagagcttggccatttaaaaatatacacccaccatatgaaccatgcatttcactcctagtttctcaagagaaactaaaacatatatttacacaaagacatgtacgtgaatgttcatacaaccttatatttgtagtaaccaaaaactgaaaacaacacaaatgtcaatcaactggtaaatggacaaattgtggtgtatcctgtacagtgaaatacttagcaaccaaaaggcatgaactatgaatacaaacaataacatggatggttcttacaaaagttatgttgagtaaagaagccataccaaaaaaaaaaaacactgattttatttatataaaattttagaaaatgcaaactaatttatagtaatagcatttcagttattttggggtgatggtaggagttagaggtggaaagggcaagaaggagaagataaaagggtgtg

SEQ ID NO: 75682 - DNA, 1058 bp, Homo sapiens
aatctgggcaatcctgcatgtgcagactgggaaacccaagtcttatatctcatataccatagtaatttttacagttccacagatgaaaatgaaatgaaatcaattccatcattttcagaaaagatatcttttaagaaatctattattattattataagagcaaaataaaacaggatcactcttttatataattacaaaatatttttaaatatgtgcatgacaaatgctgtgtaatacacctcattattttcagtgtccctgatgggctccttatccttgacctaaaaatggtgattccaaatttaagactttcttgggtatattttttaattggaataaatacagaggtcaaaattactcttgggtttctaagtaagaagaaatgcaattacttgtgaattattttaagctcgaatgctatttgctctctgttaaaatggtaaaacaaattactcgttatggaatatatacccacaaaagtctttcagtaaaatgttattgctaaaatgtatcttaaaatctaattgttagtctttgttacacttgtcagctcagaatggtcaggaacctttttttgtgataagcctcacagaggctatggaaaacaggagcacttttttcttgggaatataattgcagtaatactgtaccacctaatggagtcagaaaaaacaatttatgtagaaatatagttctgagagccttgcgattattgccttttgtgtcattctacctacattacacaaagtaggacttaggaagtcctggaaatcatatgttggatattttctaattactgtgtcagcatgatcaatcattttctaaatttgccagtttcctgaaatagcttagcttatgttcatagcactttagaggaagcagcataaaattagtttctattggtgtcacaaaagaaatgaaatatttatctttggcaaaaagacctgtacaccaaacttcaattaatgagtacaagaattagaaatcaaaactttgtttagtctaaggaaaaacagttctttaaactgtaaccacatggctgtttcttgtttgcatca

SEQ ID NO: 75683 - DNA, 1454 bp, Homo sapiens
tgtacttcacagcacagattaacagcatcataacggagccatgcccttagtatccagagtgtcttgttggcctgagacctatatgtgctataggtttctctcagttaactttccgattctctggccataaaaaagattttttcctcagcctattttatctcaatactaaaaatttgctttgctataatagtgtattgctcttctgtgctccctgccagctttatgggttgtttcctacggattgtattgagtaatatgctccaggctggcctaggaagaagggagattctaaacctctttttgtaattattaaattcttaggtaagagaatctgtgaaaacttttcacctttgaagaaatggcccattaatttcctttatttgatacaaatttcagattttctcatgaccctttgcttcccccccccatctgtgatgcataaagataataatccgttaaagtatttcctattgatagtcattaaaattcagctgtttaacttccttctttacattcaggccactagatcaaacttctgtttacctggttttatgagaataacggtgggagtgcatttggtttgtgttcttttagtgaataggaatgaatcatgattatttctatgcttaactgattttcttctgaaaaaataaatttttatgtagtttcaccaggtgatatggatcggacacaaattgagcttaatccgtacctcacatgtgtattttcaggtaagatttttactttaaaagttcttgaacttggagctgttcagattttttcatttcctgatgattctttctctcataataatcaacacagtagaaatactaatagcaatttttaattcttctgtaatatctgtaaattcaccccaggttacaaactcagctctccaaaaggcgtaagttaggggacaggaaagaaaacctatcgtttcgctttggaaagtttataaaatgatgaattaaaaggctgcaggtgtggtattcagagcactaaggataagactcgagataattccatctgggggaggttatttgttgggacaggacagtgtttaaactttgaagtcattttaaacaaagtgaagcagctggaacctggcataaaaagaaacagatctttcacattaacgattgctttttagaggaaaaaattggagttgtttttacaggtgtcggaacatttattcttcctataagaactgctttgtttttaccttaaattataaattttaaaataagcatttgtcaactcatttgaaaaataaaaaaagtaataggattcatatgcctaaaagatattttgggataagatcattgtaacattttaagttaccctttctaaaacatgagtaaggaaagaaatgtttaatagtgactaattctggaaagcaaaagtaaataaaatattgcatactatacttaacatcaaatgatgaggcaccttct

SEQ ID NO: 75684 - DNA, 1098 bp, Homo sapiens
ggggttcagagaagttacgtaactttttcagtctcttattattttctatccctcttaccttttacctatttttctttatagtacttagcacttcctgttatattagatgtttatttccttacttgtcattcatcccctaaacccaacagaatgtgtggccagtgaggttagaccctttgttttcttcactgctgtattctccagagtctagaacagtgccaggcacatagtaggtgcacagttgatatctgttggatggatggatgagctcagctctgccctgttccagaatccattctcttatcccctctgccttttactccttcccatacagaagcctcacatcagcagtctgggtggggccattcctaagtgacctgatttggaccctactcttgatctgtcatgaagagacttgtgcttaaaatttcatcaccgctcccaagtttgttggtgttcttattactgcctagtcagtcaaccaaatctgtcatttcagagtgaaacttggttctttataagtactaagtctccatccaaaatatcttgaccctatttccactgccaaggatcattagttcttctatggactatttttatagatccgtctcccgtctctctattttccacacagctattaggatgatttttacctcttttttttttaacttttattttaggtttgggggtacatgtgaagaaggtttcctgtataggtaaactcgggctgtggaggtttgtcatacagattatttcatcacccaggtattaagcctagtacccaatagttattttttctgctcctcttcttcctctcaccctccagtctcaagtagatcccagtgtttgttgtttccttctttgtgttcatgagttatcatcatttagttcccacttataagtgagaacatgcagtatttggttttctgttcctgcattagtttgcaaaggatgatagcttccagtttcatccatgttcctgcaaaagacatgatcttgttcttttttatggctgcatggtattccttggtatacatgtaccacagtttctttatccaatttgtcatccatgggcatttaggttgattccataccctt

SEQ ID NO: 75685 - DNA, 1050 bp, Homo sapiens
ccttttttcagcttccataccggcaagcaagactcaatacaatgggatgatttgtcaaacagtaaggagttttacatgctagacgaccaaaagaatgacaattatgcattcctatattgctgatttgcacgaaggcactgaaatgagaaaaaaaaaaaactttttggaagagtcatgcccaattctaggttgctccccatcaaattctcttctaccttttaaaaatatttccagtttatcttacctgcagtcttcctacccttactctgtctctattctgctcccctccatgaccatacccaaacatatacacttctggaacatgtttagatttgactatggcaggggagtttggagggtgggaggtgtccaggctataacatcttcagcatggcttctagatttcattcagatctgctcagatttaaaatgattacacacacagtactcatcattttgccacatacaccgccttcctattctcaagaaccttacccacctgtgaccacagctaaatctccaggcgttgttcagccttgtcaggctccttccaacatcctgatgttctgttcccccttgtctccatgctgacctgttctgaacctctgggcttggattcctgctcctgtccactatgcatacatcacagactcttcataagggaggtatagttacattccaatatgtggtgaagggagcctgcaggcagagccacacatgtggttgctgagggaatgggcacataaaaagaagcccctcttcaacaatcttcttcaaatagttcacagtctcaccactggccatccaaaagcacatttagcattcatgtcttcaacgtctttctatcacggtcttaacaagcatactgttgaccaggcagggtcgttcacgcctgtaatcccggcactttgggagaccaaggtgggcagattgcttgagctcaggagtttgagaccaccctgggcaacatggagaaatcccatctccacaaaaaaaatacaaaaaagttagtcaggtgtggtggacgtgcctgtagtcccagctacttgg

SEQ ID NO: 75686 - DNA, 1025 bp, Homo sapiens
ggtaactctgaaatgtacccctagttatgggctctttgccttttcctaaggattgtttgaaataagaccataagattaggacaccaaagtccaatgaatcaaaattggccaaaaaacaaacaaaaaatctccttttcctaaatgattattcattttcctgttaagcgtgaatatgcattatttcttgacatgatgttaattccaacggtgtttttatttgtagggttttatgagctgagtgatggggcttcaggatccctttccaattcctctaactcggtgttcagtgagtgtttatccagttgtcattccagcacctgcttttgcagccccttggaggcgaccttgagtctctcagatggttgccccaaatctgcaggtaagaatttttagcactgatagaaatttttaattggaaggcatcaagggcccttaaaaggttatttggctccagcacctttcactggtggaaaaatgaaggttcatcactttgcggcatttagtgccatacttacatctagaactcagtttcatctaggtgagtatctagaactattccagtaccctttgggtgctacttggttatatattttgatagcagcaagacactttatctctagaaatcctgtcccaatattgtaggtcttgagctctgtttctgagcctttgctgttaggttgtctgtattttctttcattttggaactgttttcttcttttaattatgtaaagctaaaactcagccaggtgcagtggctcacacctgtaatcccagcactttgggaggcttaggcagctggatcacctgaggtcaggagttcaagaccagcctgggttggcccggtgcagtggctcatgactataatcctagcactttgggaggccaaggtgggtggatcacttgaggtcaggagttcaagaccagcctggccaacatggtgaaaccccatctctactaaaaatacaaaaattagccgggcatggtggcacatgcctatagtcccagctactcgggaggctgaggga

SEQ ID NO: 75687 - DNA, 1502 bp, Homo sapiens
aaacctttgtcaaaattaaggcctcacataacctcaagaagaagatcctccgctttcggtctggctctttgaaactgatgacgacggtttgagtgacatcattggtgtagaaagtttgtgtgtttttttttcttctccctagttgccaaaattaaaaaggtggtgttttcatttttgtataatactttaatggaatgctttttaaaaaaatataaaaccaaggtaaattattgtttcatcttcacgtatggatgctagtgcctttaatggaaggtaaagaatgttttgctagttagaagtacatattgaggttttaatggtggtgatagtgagttttgtggcaccagctgttttttattttaaactttctgagcatccggcaaggtacaggttttgatgttcaagttttattgggataagatcttttgatcccaaggtcaggtggatggaatttttggatttatatttgttccttgagtcttcagggcagtgtctccatgagggttttcctgttgaggggcaccacatacaatagtgtgaagtaggtatgaggggcagtcattgtattctatagtttttttatgtagtctacatttctcagatgtatccccattcggttttattctcagaactgttactagactcatgacttggaggccaaaccttaaatccagagatagcagcctcgatagggaccttaaaaggattcacaaaaacttttgccacacttggtgcctaggccctgttcctaataaccccttctagggccgtttatccaacatttagatgccttcttttccctccctaatttgtagccagtccaacctttcattccttggaggatttagttttgggataaaattttggtccttgggcacagagacattcactattaatgaagtaacccttgggcatgactccaatcccagaattgctcactgagcgctatgccaccgaagcgttgacctgaacatattagtgcaatccagtccagattggacctttgatcctatgtggaagggctgttttttaagaaaaaatttttggtaaacagtattgtgtaaaattgctttttgtataccaatatatgcatgttttgtgcatgagtagtacttgtgttgatactcctgttgatgttaaattactatataatataaacagtatgtgtttttatatatcattgtgtaaatttaatataacatatgcagtaataaaccatttgttttactgctgttaagtttgttatttgggtataaaaccagatgtttacacctgtaaatcttgtgctggttattggtgttatttgtgagatttatgttagacctattctagcataagaatatcatttgcaatatagataggttttagtattagaatggacgatgagcaagcaaatgaaggaaagcagacaacttctagttaaggtactttaaaatttaaggtaaattttataggtgtcatctaaggaaaatatttctgaaaagaatcccttctcccaactt

SEQ ID NO: 75688 - DNA, 1057 bp, Homo sapiens
gagcccagatttacataggggtgtaagtgccaggaagcatgattggagggatatctttggagacaaactaccacaggtacctaacattggttatgttaggtccatatgtaacattcaataaattcttatttagtgaacagcccagaaacaggagataaattgttttctgaaaaagccatttgacctttaatttcctttgctggtggcagggggatgggagcgcgccatgaaaaatgagactttggcatagctgcaatctaatcttggaagagcaagcaaccttgaagaaattcacttatgggtgtaaatatatcctactgacaactggatattttattccaagattctattatttttagttatctaaccaatatttttctgtttatgttcattctctgcctctgaatagggagagagctgcactgatgccagttctccaatcacacatgctattgtcaaatgttaggaagtaatttcagtgccattgcttatcctggtctagctcacaacatttagaagtttggtgttggttactatgacagcccatcttctcaggagagacctagatctcagagtttctttctgaatatgagttgggggcaggggcaaccattgtgtctctggctgactcagtcagggatgtttttgtcaagtctgctttgggctaatgtgtaaaattgatccatcatttcccacacaataacaacttcttctgatagcatccaaatagaaaacacatgttgctgtaagattccattaattcagctaaaaattattgctcatttcttatatttaagattataccacatgctttccagaagcttctatgagagaggagagataagacatgtatagataccagacagcctatactgcatataaatgatatagatgtgaaattctacagcaattcagaggaggaagaaattactcagactagggtggcattcgttggcttctgaatagagttttgatagataaatttgtccaatttcagagctaaaaacagtcttaacacagagctcaacacaagtgggaaaggaatggggctttgtta

SEQ ID NO: 75689 - DNA, 1022 bp, Homo sapiens
ccatcatcagcacatgcaaggctgcacagtaaggctggcagccagcaccttctctggctcataggttggtggagtcttcaaacaaaaaatccttactgctataatatgtattcatgtatctcctttctgtttcttgaggtttataatttgtgttagtttttttcttacatttttagtgtctttttattctacctatttcattttctaacctcttcactctcactcctgaatcctaaattaatcacctttatttttctcattttcttccggaagcctcttctctggtttctccttttaaagcctctggagttctctctacattcatttggcagatgttactggctaagttattcattcatgttaactggcccagctgtgtaggcctcttcttgttttgatgtgaattggaccgtttgaataaatatgttttaattttgtcattaaagagattgtatacaatttgtttgaaaaggatgaaatatgggtgccttgttcttttaaagtacctaaatgatttttttgtgcacatagcttagtcttttggatttatgtgtcaatcaattgacctccttatctatattcatccatccatccatccatccatccatccatccatcttccacttattcttctatcatgtctttttggctatctaatcttaccttccctatctttaattgaaaacaacattgtgggaatttaacccccccgccttgctacaattctctttctcatgtgtactttctatgtacatatttcaaatgtgctgttgctttccctgtaacagttagaacatcattatgtccctctaattttaacacaaattgcttgttttcattgttgtcatttttgagaataaaacatttagtcttggcctgttaaacagaattgccaaaaaatatttgtatatctagtctttttctctgaaataggcttaaaaaaatctacttctgttgatgaattgaagctcttctattttctggaatttaaatgattacaaatgataccctgtgagttcatcc

SEQ ID NO: 75690 - DNA, 1042 bp, Homo sapiens
cttctgtaccccataggaacatatcatgcctcacacatatactttacatagcaatgtccagaaaaaagaacatttaaaatattgtccccaagacatgctgtaattcttgaagttaaatgttaagtggtgcaattaagttaaagaactcaagtttctgtcgaagaaccgagttagggaagcttggttgaaagtatcttaccaccattaaaagtgctaggtttgtatgagcatttttgtagaatttcctgtacaaaccttattggctgtcacttaaaagagatagtgtgaatgatcctttctgagcctgaccagcttccttgtcatttaagcattggctatgggatgaatgcaggggccggttgccacagcaacgacatcttcagtcaaggtgatgagagaaatcatttctctctgaatgctaataggttgtcactttagtcttaaactggctgtttcccactgttttcctgattgccatgaagccagagagattatttacagattaagggctgctatttgatctgatcatctctgtcctaatttatgctggatctttcaggagaaagaaaaaaagatttgaagcaaaatgttaaggattatgttttcagaaatttgaggcttgtgactttttctccagagaagtaagacttttccgtagtactgagaaggtcacttttcaagcagagaccatccagtgttgaaagtagtccagccactgcctgtaaattacctgccctgtaaaggctggccctttgccagtgctgagcttggggctagatgtaagggtggttctctcactaaaaggcagtgtgagtttgtgaagatgatcatccgaagaggaaatctgcacatgagactttttaaatcctggaagttacttgaaacaaaggattttagtttttctcatcctttactccaaaacacaagattcaagaccttattcactcacggaagtaaaggattgttgagtaaattatgcttgtgtgataggataaggagataattgctgtgtgggccgtcaccctttcattcctgaagagag

SEQ ID NO: 75691 - DNA, 2131 bp, Homo sapiens
ggctgtaaggctgggagggggcgggtcctgaagggggcgggaataagaggcggggcagaagggcggaggagtgtgtcgggagatgtagttccgcgagtcccgacagcaaagctgtcccggctccgctaatagattgggaccactactcccaggagtctgcgcgcccgaccggagcgtccatgcgcagtgggagccactttgtatcctatcaggcgaggagagggtgatgtcacctgcgagttagtaacctacgagcggctgtgaaggaaactgtttaaccggatcccattgtacccagagtgcagagccgcctttccagcatgcaggggctgctcaggtaagggggacgctcctccttgcccgccgcactcattcattaagtggcactgctcagtggtgcgggggtgggcgtgcttccgtgggctgggcgctgggttcgcggcgcgccctcctgctgcctccccggagctcccgggccagtaggtaaatattaaacccgtccttcaggttgggtctgggtgggaacgggaccgagacagctctcggctgcctagctgggggtgggaaaatggctgcagcgcaacgcaaaccgaggcagcagggaggaagacgcccccaaggactggggtccctccctttctttctaaggcgcccggctggccgaggagctggcggggtaacactcgccgccttgctgaaggctccccggggctggggccgcgggtactgcagcggcgtccgcgagctcccggcccggcggctccgagagggagaaccccgaggcaggcttggtggacacggcggtggcgacagggaaggagggactcgtgtacccgttcgcgtccgagcagagcccccagtgcccctggcaccctcacttccagccccattcgaaagggacggagcgcctgtaattcagactaagttggacctaaatgtttcaaaacagagagaagggaaatcgggcgttgcggagggagagcagggtgttggcggccggggaggctgcgccgcctgcggacccggttgtgaggcaccgcagagggcttttgccgcccgtccctctcgggagggcgcatctcagtctccacggtcccttggtgtagagcacctgggctggggcgaagcgcctgccctgaagccctgggccaggaggtggtagcgcgggggtggaggtgtcggataatctaatgattaggctcgctgtggggcaggagggctggataatcgggtttacccagctggttctgaaagccaactgcttgtgatcggcttgccctctgagtggagacgtgcaggaggcccagagctctcagtcctctggatgttctttgcctttcctagtaccttcatttgttcgtttactcattcatcaaaccctgctaaggtctcaagttgttcacggcctggctttgcggagctacctctcgccccataacatatttagtgatgcctgaactccattcccctctccttcatctccactttctggagagcatcaagagcaaatgccaccgtgaccgttttgctggtagtttcttgagattcgagcaggacccagtgaatcgaagcggagttgcctgcaagatgaatcccgttgccatggcgactcctgccttcggaatcttagccgctgccactgctgtttcgattcgatgtggctctgcgggcagctgggagggagtggctagtgggtgtggtcaaacgctcgccctggcccagctgctctctcctcctcgcccctttcacagccccgggactctcccctttctctcctaaatagcttggacacagttctaaacccctttcccttccccgtgccacacctcatcacgccacctctctccctgaaactaattgtttggcgcctttttcctgaggcaaactctgaaaattataatttgaaaaatctcttccccctttcgggctagccgcatcatttccccaataaggtagtttatggtgttggaggcagctttgtcatgaaaggcgccctcccctgttgtgcataaagagagctctctggtcaccagcaaaggccctcaatttgctctaggtgcagctgattggaagtgattagggacaattaataacggctggaagacactgcagtcccttgtggttctcataa

SEQ ID NO: 75692 - DNA, 1170 bp, Homo sapiens
ctatgattggagatccaaggtctattatttccactgatagttctgtcatccgtggtaatattccccttagcttttctatcaagcagtttcatttcatcataaaccaaaacttgtctggcataaaaggccttctatgtatttgaaatagacatatttcctaattatttgcttttagaatacattcactcacatcgactgtttctttgtagttacaatttcttattacccctgaaccaggcatttctagatttctctcagttgcactatccttggcccagataatcttcccaggaggtgtgtgacacgtgaatagggagagacaccaagagaaagatacccagaagcctttgccaggccaccagtgtctcccagaagagctgggagacaatagtcctctcacctgaggcagagccgttccgtaaacaggatcagttgtttcaggctggttgatgtgaaagaaatgtgaaagaacatttgcccaatatttgtaacatgttaccatccagtagtctgattctgtgggttttcaggagcataaattagtaaattagtgaggaggtgtgataatgaagagggtgtggtgggtcacatccttgggtggtgcttacaggagctccatgaataggtgctaaggaatttgaatcctggctttcttgttttgtggacatgttctgcttgttaaggggtgtgtgtgtgtgtgtgtgtgtgtgtgtgtgtgtgtgtgtgtgtggttttgagctactttgtttaaaaggctgcttttagtgttggcactatggtccttaaaacaaataaggtgtttacaagcaaaagttctgattgaaagtgtttcattttgtaaatatttgggagatggcataaagagaaacttgaggtcttgtgtgaaaacactttaaagttgcagctgttggaccagaggaaacatgcttttccaacaaagcttggtatccttgagtgccctaggtgtttggttcaggaaataatcacagagcttgtaactgctgtggggccctccctggcttcaagccgtgctctggtatttccagtgttaagtctatccttatattgccggaaacaaagcaaggtgtccaacttgggttagcaaacttgttttctctctagaggggacaccagtcaaaatagaagttctatattctgttgtgatttttt

SEQ ID NO: 75693 - DNA, 1064 bp, Homo sapiens
ctctactaaaaatacaaaaaattagccgggtgtggtggcgggtgcctgtagtcccagttactcaggaggctgaggcaggagaatgtcctgaaccagggaggcggagcttgcagtgaacggagattgcgccactgaactccagcctggactacagagcgagactccgtctcaaaacaacaacaacaacaacaacaacaaaaccctcaaagtttagaggaaattgattgcacaggtactatttaagaaactggtactgagagcattttctctatttctgtatgtggcttggaggtaatgtctggttgacagatcaggctagggtggatgatacccctcttgaagatgcattcacttagcaagtgtactgtcttttatgtagattatattatttagagtggctgaggctgctgatagagaccagcgttgaagtgtggatctgaagttcaccccctttctctgagctgtcaccttgtttgtagccccactgaaacagggacagacgaacatgagattcaagttgattttagtgacctatatttcatccagcagattttttttttcagaaataaaaggttaccttttaattttttagtatcctttccactgttctaggagcagggggagaacagagcatttcagggagagtttgcattcatagtccacaagtttgcatacatagaacatgtgtctaaaaatgaactgaatgttaagtcctagaagcacagcaacaagtgtgcagagccttccccatcactcccaattaatctggggttaccaaatacaccctcagctttggtgagcttgttttcctcattgatgtttaagcgttcctggtttttactctgtctgtgactttctgcagtaatggctgtccacgtctggaatgtgcttccctctgagtgtctggattatcttgtgctttcatatctagctcaggtgccacagcttccacgaagccttccctgcccttcctccttaaagcacttagcttgaccacacaacacttacagctaatttgataccgatattgtatgtgaggtgcctacctcatgccaagccctttc

SEQ ID NO: 75694 - DNA, 2442 bp, Homo sapiens
tttggagctctcctttgctgtatgaacgatagacaaattatttgaaaaaggaaatgctcttatattacaactctaaatctgtttggagcctgtccagcattagaccttatttgttaagtgaggtaacttttcactgggttgaatccctcatctgataaaagatcttctcaccctgaacagggccacagaagcctgtgttgagagttaagagggcccataatttctcagcctccctcttccctgtagtcttttaacatacattgtgaaagctcttttgaaaagaaaataatgaacacttgagcagtagtcaaacatgtaatctaatattggatagccttagatattaaaataaactttttccccccacctcagaagagatacttttatttatttttacagtggagcaaatttggtgccaaataaacaatttctattcttttaaaccatagccacagttgtgaattaaatggggaaaaccagggaagcaagttcaatttccaatgcagttggtgcgatttcgtgacttacaatagatcttttccttttggcttaaaactagatattgtgccacttagacaatatttaatgaagacaattgactaaaacacaaggaaataataggaaagctatgccttaacggcatattgccaggaagggaaacatgaaaacaaaaggcttgttagccattaggctacacaatcataaaattttttgaacagacattgatttcagaaggtttttcttttttcttaatcattcatcttgttatacttttttttttttttttttttttgagacaatcttgctctgtcgcccaggctggagtgcagtggtgcgatctcagctcactgcaagctccgcctcccaggttcacgccattctcctgcctcagcctcctgagtagctgggactacaggtgtccaccaccacgcccagctaattttttgtatttttagtagagatggggtttcaccgtgttagccaggatggtctcaatctcctgatctcgtgatccgcctgcctcggcctcccaaagagctgggattacaggcgtgagccaccgcgcctggcctcatcttgttatactttttaagtatgtcattcacctttagtaataacctgggtttattctgttctataaattacaccaggattggggttttaaggctacctgtatttctgctggcacacaattaaggtcacctattaaactggtctttgtcatttttatgtctaaaaaaaatacctgcagtgtgattggaaaatgttgcctatctgatagacttcctgaatttaggcttacaagagtagatagcccagatcctagctttgggcattgttggggtaatacagatgcccatcttttattttctgagataggttcttatattctggcttgttggctagctcagtttgttagtgacatacaaaccaggtcaagggcatgggttagctttgccttgttttggagccacaaactgtacctgtaattctagtcagattttttctgtatcttttttttttttaaattaatcatgcttttggggactagactgtacattgtggacatatcagtgcacagctatcactactaagggcaaaaaaaggtgccatattttaaagcgaactggtaggaaaaccctgtaagtgagaggcaagactgccagcagcttgctaaggaaccgtatgcttctgacagttgtcctcctgtgaagattaggtcaggactaggggcagcttcttgaaagtttgccaaagccaatagccttgatctttttcctttcttggcagaatgacagatgccatcaatgtgtgtttgggtgctacttctggacttactcttagataaagttctggatatttgtgcccaagaagaagagtaaaggatggtggtcaacattattcaccagatgagatagattgttcatatgtgcctaagcttaaatttgtattagtttcatagagatttggtaaaaccaagcagggaaatgtttagacacaagttagaacccgcagttctgtaacaagaggtttagaccagggacccttctaaatccccagaatgtactacaaaattaattgtaagaaatgggccgggtgcggtggctcacgcctgtaatcccagcactttgggaggacgaggcgggcatatcacaaggtcaggaagtcgagaccattctggctaacacggtgaaaccccatctctactaaaattacaaaaaattagccgggcgtggtggcgggcgcctgtagtcccagctactccggaggctgaggcaggagaatggcgtgaacccgggaggcggagcttgcagtgagctgagatcctgccactgcactccagcctgggtgacagagcgagattctgtctcaaaaaacaaaacaaaacaaaacaaaaaaacaaaacccacaaaaaaactaattgtaagaaattaaaggaaa

SEQ ID NO: 75695 - DNA, 1118 bp, Homo sapiens
cagcctgatccggaaggaggggtggaaatacttaacctgcttttaatgcttctgttaggggataaagagattttacaacagtgatgtggggcaaacatgtgggtgacttttctaatgaggaaggaggataatgctgagtaaatgtagattcaatttacatgtaacttctgtttggtagagtgtttaatcacacatgtttgacaccttgaatgaaatctcttcacctgtcttttggtgctttgcaattgcacagagaaaaagacacactctttgattttaggttcagtttgggtaatcgtggcaattcctttaaactttccggacctctctttcctcattcacagtgtattcacatagaataagctatcttctggataaaaattctaaatttttgggaagacagtatcctcttaaaataatgacctcacttatgtggcactgtgtactcatcaaagtaatatccattgagtttccctaaaatggagatcggtgagggagaactccgatttttcgcccccagttttcagccttggctgcccctgccttggcatggtgtcctgagatcctgttcttggctggagctaagccccatgatctgatccccagtctcttctcaactgcacaactcaggagttttgtaggatataagggatgaaactcgacagagtcttttggtgatcatacagttctgtttaaattgatcatcactttttagtttctacttaattgtttttctttttttaaatttgacatgaggtcttgaactcctggcctcaagcaatcctcccgcctcagcctccggagttgctgggattacaggcgcatgcaaccgtgcagggctgatcaccactttaaactggagtctgaccaccagggggtccacagagtgaatgtagccagctgtccatgttttgcttggccagcacagtattatttttaaaaaggagtgatattttagtgagcatttatgttctgatttgtcacagaccttaccacactctagtgcctaatgcacagccacttagtttatgtgatatttatctccttggcccttgaagacattgagtttgtgattcctattttcaactaaattaaattgggatgaatgtctcttcaaa

SEQ ID NO: 75696 - DNA, 1016 bp, Homo sapiens
ttcatgtacatctcattttttcctctaaataaacagagtatgacatgcacaaaggatagatgtggtaattccttaatatttatggaccacttgagatatgagaatctttgttataaagaaatttttgttgtagtagaatctgatccatgtttttctcatacatcctaatcatgagctagggtattagaggataaaaagctttcttatactttatacctgctgtgatgacaagctaaggttttggtgatgcctttggcttggtcacaacgtgctttcagtgtgttcatttgattattttgcagcatgtttctgctgtagaagtcttcatattgtaaaaagcattcaagtatgaactcttgcctataaaactaactgtgttggataagaaatgttttatttaacagggattatgtagctcaaggtttctcaaatttggattcatgatcgtctgtgaaacactgtattaaaagttaaattgccaaatgtttaggtactcacttggtgttgatgggatcataaacccatgtgcaaaggtaggccttgagatactgtggtgttatttggttataaaatgcttatgaaggtgtattagttttattactgcataatacattaccacaaacttagtggcttagtagtctgcacatgctgtggctagattctctgcccagggtcttagcaggcaaaaatccaggtgtcagccaaaatgctgtagtcttcagctggggctcaggggcttcttccaagctcatgaagtgttggcagaatttatttcctgtgaccatgggactgaggaccactagctgtgggccagggactgcttttagcttctagaggccacccacattctgttccacatggcccacattggcagttcacagtgtggatgtttgctttcttccatgccacgtggagaacatctctctgatttttttccctgcaatcagctggagaagaggctgatattaaagggctcccctgattaggccaagcccacccagggtaatcttcttttg

SEQ ID NO: 75697 - DNA, 1882 bp, Homo sapiens
ttgcattttaaaaatttattaaatataactttcctccctaggtcatttatatttttcctttcttaaatggcctgtttgcgaatttatctgtttaaatctcaatgtttttgaaatgaccagaaatgggagtaattagcaatgcaaataagccagcacttttcataaatataataagcagtcattaaaccctttggaaggaaacttacgatatctccaggtacattttaaatgatctaaaatatttctctgtgattaagggtctcttgcttcagtttcgcataattaattatcttaacataccctctcctcattatctggagggaaacctcaggctagcttctgtcattttcttgccagtttgcatttcctggagtttgccttagtgttttcttaatcttagtagttttctgctgatggtgtgactgctacaaagaaggcttttctgaaggcataaaaaccagggaaatgatacatagtttttccactggactaaacttgtttggaaaataaggaggtagaacaatgaaataatccaaatattatgaggagagagggagaagtttatattataatgatttatgtgataaaagaaatgttatgcccagtatattttgtttatacatggtgttgtaaaacagatccaaatgcttgtctaaaatatttgcagcattgcctgtacagcacctaaattttacaaaatgctgtacttacggtccaattgcctttttgtcaatatatcataaaccaatattgtaggagaaatggtttttcttttaaatgctttaggtttggtaaagcactttaggtttgctttaggtaatttaaacagagaaataaatcttcttccaagcacagagagcttcatgtttaaaattttagatgattgtaataatcccagtaacagaatataatgaagtgtttcccagcacactttagagaagacatactgagtattatggttctgttcagattttattttctgggactctattttaaagtgctccatctgtatttaagaaaacacatgcatgcacatacatcctgtggcactctcttctagggcaggtgttggtgggtaggtccctgtgcatttgtttgggggacacgtttgacccagtggtgtaatagttgttacaagaggattctctggaggaaggctgctgctgcagaggaggaagtcacatttgtcttctcccaaaacatcaactcattgtcttcctagcttgcaaaaatgaatatttctccccagttgatttgttaatttcttgcatcattcaaatgccagatgattggactctacacaattgaccgaaggaacagaatttccaagagtgtcagttgcctttctgagtaaaataatcagacacttcactcacattctatgaataaataacacctccagtgtaaaatggattatgagatgttttatcttaattttctatatttcttgaatttgcactgaaaaaaatcttgtgaacaatctttaatataacacagaataatgattttaaacagcctctcccctgctatgactagtaaagttgtggactaaaaatattcaaacatatttttctcattaatgatgagttccatattattttatgaacttctgaaagataaattttaagaaatataaaacactccttttattttctgatttagccattcctccttaattcttattttaagtgaaatatgtgattgctagattcacattttgtaactttctttatgtaggtttcattttttaatggggctgattctaaatggataaaactttgatacatagtttctaagataaaacatcattaatttttaccatgactggtagctgctattggcttgcatttactgaggttctcatgtttctactatttaggct

SEQ ID NO: 75698 - DNA, 1041 bp, Homo sapiens
aatgtccgagtcaagttagaacacaggtctctgctaattgtcatatcttagatgattgcctgataaagatgattgtctggcgtagcttggagtaccaatacaggagacatgttcttcccccacttcctattccttccactgccatgctagacaatgcttatcaaaggtgacattctttcctacccagcttggacatgcctcataatcctgcccaagcagcattctaatagccacagctagtaaacaagggatctaactagtttgtcagtgtaggtagtagaatctttaaatttttttttaaaggccattgttagtatttttaagagatcaatttacatcatttatttcagatggaatattgtttatttctctgtcgcagtggctcccaatcttttagaatgttcctttttaataaaaaagaatcagattctcacatgaccttgaatttctttaacactttaaatgaattttacttttatcaatcgcagcatataaattcattggaaaaataggcatgtgtatatgtatcagacattcacatgcttatgaatgaaggaccccttgtaatacttctgcccctgccccccattccacacaccaccccctccccaggagtagggattagaaatcgttagtctttccattttgtcttctgtggtttcagttaaagttctaaagacgtattttactaaaagtggaattgactttttgtattcaggggaacttgtcagtggttttcatattatgtgccgtggagtcccaggattccagaagatgcctcaagggagacccctcccttcccccgtatcccttccagctttaagcagcctgtctgctttaagctcttatatatattgagattctccatgagatttcatttgtataaatgatttcacagcttaccaaaaaaaaaaaaaaaaaaaaaaggaaagagaaaaccactgataatcccaccttgtttcacacatgattaaatgcaatgcccagagtattttggggttatcctgttagttaatgttgaagccaggttgaggactctga

SEQ ID NO: 75699 - DNA, 1084 bp, Homo sapiens
cagacccctgacgtgcttctttcttccttgctctcctcaggaaggtcatcctatttgaagagatacttttctgttaactgtggaaaagccagatgtctcactttaggcaatagtttcaacttcgtttcttcccatgtagtttgacagatcgacctcaaccctgacccagacaactactaatctgctttctgtctgtatggatcaaccagttctggacatttaatataaatgaagtcatgtaatatgtggtcttttttgattgacgtctctcatctagtttaatgttttccaaaggttcatccatgtcatggcatgtattggtacttcattcttttttattgcaaaataatattctgttttatagatataccacatttttttttattcatggacatttgggttgtttctactcttcagctatcatgaataatgctgccgtcaacatttgtgtttaagtatttgtgcgaacatgcgttttcacttctcttgagtaaatacctaagtatggagttgctgggtcatatagagacttggtgtttaacaatttgaggaaatgccaaatggttttctaaagtgactgcactattttatatttccaccagcaatgagtgaaagttcaggtttctccatatctcatgtgttttttaaacactgtattctgttgtgtttataaaatgtttcctcttgtcttcatagatgagggagtcagggacctgaatgataattttggaggaaatgaaacagatgaaagtgaaataaattattttcatattggctcagtgtagctgtggaaacctttcagccctgagcctacaaaccttcctgtttgactggatatgacattaccaggagttttactttcctgcctttattgtccctggagagaaaaaagaaatatgtcttttccacagctagacatggaaggttcaaacaaatataaaggacccctgagttattaacaattccatgggaacatgtgcttggtgtatgcccagaatagttcctttcaaatgattctcttggtgcttctgcactgttcttcaccagagtgtaacataagagctgaatcaaggcttgttcagtc

SEQ ID NO: 75700 - DNA, 1040 bp, Homo sapiens
tggttgcaagcaagagaaactaaatttaagacaaacacacacacacacacgtacatagcagaagaatatggggcagtctttgtatctgtaaggaagactggaaagcataggagactttgggcatttagggttccaggaagaaagtcaatttctcacatcttaggtctgctcagcatcacatttctagcaggattgggggtgggatgggcctgacatgataccaagagtgcagggaatggaggtgggtcattccttgtaaagtcaatctctgtatgctaggcaggcaaaaacaacaacagatttcagtaggattctcagttgtctgaaactagaagcaatttaacgtgcttattcactagcatgggttaagctgccttttcatttttgctgaagtagaagtttagaaagatggaaaagggaaggatcatcactagattgggaaacatttaccctgcaaatgcaataggagggccctttcattagaacctgggaatggactgggacactaagtagcatccctgtactattttaaagtcctgtggatggctacataggttggcattgcccaactccagtcacatgaagtgcagcatgaatagtgcctctggagttgtacaagttatagttccacctttccatgtctctgtttgtcagatttttcccccaccttgttttctactttaattaaaatgcctagcatacatctgtagaatttccagtaaaactgactgttttgaattaaaatattgagttgcccagaataaaatgattatatggtatacctttaaagtgcgtcttttacattccagtttaagcttctggttctttacagactcccttacaaatactgttggtgctttcataaagtgacttgtgtacagaaataggcttacatgtgaacaaggatggtgtgaacaaggatggtgtggtgtaccttttcatttccttttctttgccccttactcctgaaagtatgctttcagggaataggaggggaaaagtctctggttccccattacagactgactatgtaggtcacc

SEQ ID NO: 75701 - DNA, 1094 bp, Homo sapiens
ataaaatatgcagaaaaatgggaggattcacatataggcttggattctccccatgtctcattatctcgattatgtgtcacctcgtgcttgttccactttttccagttttccagaccagatctggtgctccagaacatgattaggagaagctgttcacattgtaagccctttcactaaacttgattcttttgagggtagggataggttgtgtttccatcagtgctgggcacacagaggacacgtagtccaaatgtgtttgagttcatagagcacccataggggcacccaggactaatgaatgaatggtactccttgttccacaggcaggctatcccagtgagacgcggggatttcttacccctagtcattgctaccagtttgtatctctgccacacaccgaaacagttgaggcaggagtcttctagaaaaggtttacctgcaagtaaagacaacttagagcatagaacttggttactagtagaaaccctttgaacttttttgaagaagtcctggaattacatgtttcaacccacaagttgttttttcttaccactttttttttcttctaaatcttaagggaagaaaaaaaatcataggctgtaataatgaaatcttttaaatttgtggcatgatgggaaaatgtaatcacagtgtcaacattctgtcattctctattcatctttctttatggaaaaaaataattacggtggttttcactgacaaagttccaaggatctaatggtttcccatgacataagttagatgttaaagatgtgtaacctataggtaatatcagcttctcagaaaatttagaaatgatactcttgcccagtattgtgtctccctcctccgctccccaacttccaagaaaaaaaactaaaggaaggggaaattgtatttttactattggttgaaaatggttcggagtatcacttgacttttaatgaaatctggaaattcacttaactccaactgctttgtcttcccacacatttcgaatgaatgttaaaaggaaaatacctctgtagaaacagggctatttttagatttcactcatatatttgggtttcatcactcagattcttttccctcag

SEQ ID NO: 75702 - DNA, 1304 bp, Homo sapiens
ttagcaagcaagtattaaaactaaaaagcatttaatgggctgattttgaagactcctcgcagggtgtttcttccatgtgtgccattttgcccagccctacatgtcagcagtggaagatattttgatttagtatgtttttaccaaagacactcccacttttcattgagcgaatgatgcattttgtagtgtgtttttcattatggttagaggagatcttccttgagaccagtgtgtcatttggcttttgatttttgtgagttgttacctctttagtcctaaactgtaacttcatcgtgcaaggatttaaccctaagcatcaccctaaatgatgtagcattgcatgtcaggtatttactaattcgtctttatgacatactgatatgttttaaaagcctatataatacccttgatttataaattcacttcacattgctcttcagagaaggtgtaggtaaaaccaagaataaacatacaaacaagattaaaatgaagacccacactgacttactatctgtcctggccctttgtgtatttattctactctcatttttgaagtaaatccagtaggaagatttcttctttctttacttcctaagagatggccaacagtggagttctaagttccaaaaacatggtaacagtaaataaagtagtgtaaaacctggttgattaaacttcttggttgaaattaagtagaaggaggcttaatcccaccttgtgggttagtttctgcttttagcaagccctcagaggcacttcagtgaaggcatggctctggctggtggtttccatcctgataggtggccatggctattttcctgtctataaataactgttcaccaggttgaagtgaatgccaaataagcttctcccaccaccacccatcttaatagtagaatgtttgagataatggaacagtgataagggtaaataaatttagcactgtcaacctaccagcataaaccttagctgattttaaatttaaggcccactattaactctcttacccttgcaaattgaatttcagctgtgatgtagttgagacaaaccacacaacagatccgtcatttctctttgtgaaacagcaggtacctgggtgtgcctcttaccacttccttacaaatgggtcccctcaggtggctgcaatggaactagactcccagtagcctttgttacttggaagtctgattggggcagcacagagactcctgtaactggaagcaaacactgcagccgaggggggtgatgcttagaggcttttttttttttttccccccacaagctaggattcccttacccaggag

SEQ ID NO: 75703 - DNA, 1005 bp, Homo sapiens
tttgtctgtctcctctcactaaactgtgacctctgtgatgactcagggtgggtaacgctcatctgtctggttcattgctgggcctccaacacctagaacagtgcccaaaggtgttcagtgtatgtttgtagaataaattaattaatttatttgtaatataagtggttttgaaaactttcccaaacttctcttgtttcatgtacttaatggagagcagggatcagcaatttttttctgtaaggggctatgtagtacacttattaggctttgggggctaaaagatctctgagacaactactcggaaagcagccacagacaatatgtaaacaggagcctagctgttatccaataaaactgtatttaccaaaactgttggtgagggggcacttagcatttagcccttgggccgcaatttgcacacccctagcatagagtcagttttaacctacacgtgctggaatatatgtggaaagggtggattggaagagtggttgtcttgattacaagctcagttcatttagttttcagccagggaaatgtgaacatctattcttgttctgtcagaatagaatgtatagtgaaaactatttgtagcatgatggagatagaaacattccaaaagagagacatcccgccaggtggtggaatacatattagaggctgttgaaaaattaaatactgatcaagcacttaagtactgcaggattgtggaaataccaagagaaatagttctaagaactgaaagttgaaaaagtgtattttgaccacccctgagcaagctaaacaatataggattgcatttaggctaatgtggaataatttacataagaagtgaatttagaaaatgaagtgatctgacctcatagagcattttgtcatatactttttctaatgaaggaagaataaactcaaggatatttacgctattgggcctacatttgaaaacttgaatttataaaatattttgtgccaggattgatataggccttattgcatctaataaga

SEQ ID NO: 75704 - DNA, 1005 bp, Homo sapiens
atgagtctctcctcagctaggtcgtcagctccacagtaactgaaactaagtgtgatttcttttgtttcccaccctctggagacagtcctggatagcatcagttcctccttctgtgtgttcccatagcacttgtacttactgtgatcaggggcagttcagcctcttcttatgttcttgatttttgaaaggaacagagtatagcttattcaattttgtattcctaacccttcacgtataacccctgacatgtagcggcttactgactgttcagatgaacagagtgagtaaagctgtaactgacctaatgaaacactataatattacttctgaatatttttttttgcgtctctagacacctcctggaagtataacatattgttcttaaaaccattaaatgtatcgctgacacatggtaatcatttatttcaaagataatttgaatggtattcttgcatcagagactttcagagaaggagcctaaggctaccctttattagataattctaagatgggctggctgacaggcaatgcagaatatcgaaaaaaggacagcatgaatttgtccctgctctgctgcttaggagtgggtgaccctatgcaggtcacataagtgctcagatagttactcagctgtaaagtagaaataaaagcaatatctgattgcctgtgcctctctctttttctctcagggttgttgggaaaataaaatgatactgtgcacacaaaagtacttagaaacccataaattactttatgaaggtaatatactattatgctgttgtgaaacagggtaatgccctatggtgctaacacttactttttttgtggttatataaaataagtaatccaacctataattaggacaattggctgctacccaaatagggcctcaagttccacctgtcacacccaaatcttgcaaaaaatgattataatgcttaaacacagtctccttattgtcactctagtttttttctagatggaaaaagagagaggtgtagctag

SEQ ID NO: 75705 - DNA, 1029 bp, Homo sapiens
taaaagctccctgctcagcaacaataatgacttttacattctagcgacttttctttatctttttagcaccatacataccgaaacttgaattacttccaagctccaaggaatgattccctgataggcttatttaagactcctggaaagtcaatctggcaaaatttgtttccaaaatgggaaccctttgagaaaggaggtgttacattactcatgtcaatttgtgaacagtaaaaccaatacagtcttctgtaaaacaagacatttgtgtttggatttatggctcgatttttcagttcactgttaatttgattcttggaaaataataatgctgtagcttgaaagatgtgagattgtggctagaggggggtatggcttgagatgagacaggtagggtttatgtccttgctgaccgcccccagttctatggatttttattattacttcatctctcgagatctttctttattgtaaaactatgatatcttcctatcacgcatatacaaattagctgaaatgatgcttgctgaaggtcccacatagtctctgaccttggagaggtgctcagtaaatgttagttcccatctcatttagtcaagtggaccatgaatcagggttcttcaaatctttatgggacagaaatcccattggaattggcttaaaggggaaaaaagttcattgaatcactcaatggaaagttcaaggggtatttgactgaggcccagtatatctagtagttaaatgatgtcatcaaaacctcctcactccccatctcccttgtcccatctctcagttctgcttttatctatgctggcttcattttggggtagcttctgacacatggtggaaaaagcaactattgtaaatttctggtattatatggtgcttatatgtcatgattccaggcaaaaaagaggcaccctctcatctgcggcatccagccacataaagatctctggtcgtctttgtgttgtgtgccatccctagatcagtcactgtccaggggatggagtgacttgattggcgaagcca

SEQ ID NO: 75706 - DNA, 1055 bp, Homo sapiens
atgtatgtagaaatcatgaaatgaatgtataggagttaagcattttttctactgtgtcttcacgtggatcaaatgcatccttcaaatgcaaagactaattttcctccctttgttattttggggtctcttttgatgtcataccacctcttattttggcattaactttcatgtcctttgcctttatcatttgtgatcagctgctgtgtttccatttggtgcccttttgtaatttatactttcaatactgtattgcttgcttgtttaagtttgggtcagaagccatgaatgtgacaggatacaatgtattgctatttcagtagctttagaatcttcctttaagtagcaggaccttgagattaccaagtgaatttattcctgtggagtcaaactttctaataaatatccaacaaaatattacctaattagacacttttagtcttttatataatattcctagggccaccacccagcaagtagatgttctaaagataaggatagtaatatctacttctgtagcaaaaaaaatacaatggatttaagaaaattctaaattataccatttaggtgaaagtgagcacctggcattctgtcactaagcaatgaattggggtgacattaatgtacagaattgtctctagtgaatggtttggtagcttttcccccatcgccccattgtaaattgatgacaaatttaaaagaagaaagtcattgctcatattagtgttgtacagttgaacagattgttttcattttgaggactaacaattgtagagttgagtgtagtaaagtggaaaattgcagaaatgaaagcattctataaaccattctttaattactttcagagcatagctattcattgacagtggcctgtgtttctagaaagacaaaatgagacgctgaagaactcattgcttatctctgattaattgagataattaatggacttaaagtgcattgaaagtgcctagcatgttgaagagggttgataaattaaagttatttaaattatttttcaaatttaccatttagccatttttctgtgtacagttcaaagc

SEQ ID NO: 75707 - DNA, 1075 bp, Homo sapiens
tattgttactcctttaacataccagaaaagattttttaattgagtgtaccctaaatcatttaagcagtactgtattgaaagcttcccgtatttagccactgatgacttttgcctgtttaacaatattcctcagaatctgaagtctaaatattaacttctgtccaaatactctggcttggtaagtgagtaggagtaataatttaaaatagaactttccatgttatttcacttagaaaaaattttgcaagagaggcagtctctttagtgtttagttgtcttgaattatccaataaagcaattagtgttcacacctaattatttagaaaattacagagttgggtggagaggacatgttgggtagtatcagcttccttcacatttccctcttgatgactgtggaatgatgttttgttttgttttgttttgttttgttttgttttgttttgttttgtttgactcaggcttaagtaaagagtgtagtaatccacttacagtaattaaaattcagtaaagatctttctttgcttattgtttgtctcctgcagcttcagaagtgtttgtttagctatgtgaataacttcccaaggatatttagcacatggagaggaatccccagtgagaaaacacactctttcttgccgccgctggtaatttctgttttggttgatgattagctttgtttaatgaaaagagattatatatgtgaccagtttacacactcaacacatgtgcttttgtgttcttggctgctagtcttataatttcctctaccccttctccatcctcaaggtctgtgcattatttttattttgtatagggcaagcaggtttaaagtgcagattaaaaggaaactcctttgttttcctgagagtccatccctcatttttttgttttgttttgagatggagtctcgctctgtcgcccaggctggagtgcagtggtgcgatctcggctcactgcaacttccgcctgcctcccgggttcacgccattctcctgcctcagcctcccaagtagctgggactacaggcgcccaccaccacgcccggctaattttttgtatttttggtagagac

SEQ ID NO: 75708 - DNA, 1062 bp, Homo sapiens
gtacatacatattgctacaaatacagtttttaaacataatggtgctacatgtatattgttataaacctttctttcttctctgtcttttattctgaatatgttcatttttttcatgtcagtcccatggacctagtactttctttgtaaccctgggcatagggttctttagcactatttctcaaactttgctgcacattggaatcacctatggggcttggaaaaatacccatgcctgggccccaacaccagagattccgattttattggtgtgtggtacagcattgttactgaagtatgagacaacatttattaaaacattcccctactaaaagacacatgattctctattacaagttaggaaacctgttttctatttcacagtcataatgaacacctttgttgatacatcttggtgcctgtgtatgaatgtatctgcaggtcaaattcttagatatgcaatctagaaagtgtaagatgtggatcaaagggcccgtgcattaaaataataacagacactgtcagattgccttccactgaggtggtgcaattgactttcccatccacaggttaggagattgcccattgtggggctgaggttcttccctcagtcatctttcactccgccgtgtttttttttttttttcctttaagtttgttgtatttttagaggatcgtatatctaaatgcttatgaaagttctcaacatgaagggaggtcgggcaagttctgagtcaaggcgttatttctctaagtctttttaatgtcatgtctttggaagttttatagctgacataccaacttaatgcctttaatcatcagagaagatgtgtagcaatacctcctagagccacacagcacctgaaacaggacagtgttagaggcgactgtcctctctactgccttatttctatacttcatcttgcatacagttgaagcgttcatcatctttccatatgcctcttttgaacatccattatgtaaaatttgtaagtagaatctttacaaagggcagggtgctgcttttgaagggagttccagtttttataatgtgattctgtcatt

SEQ ID NO: 75709 - DNA, 1160 bp, Homo sapiens
ttcctgatggagaggatgttgaaacctgcggggaacacacaattccctttcagacgtttctcctataagctttagactatatcccgtgattttttttttaagctccaaatagtatttggcatctggtgtatttgggaaatgaaaccagacatgaggaatgtgagagaggagagggatggccaaggagagaagcaaagtagtttttttcctttcacatttttcttgataagacaatttgggttaacattattgtgttgttgcaatgcaaattacacatcagagccctctggaaaattgcaaaatgtgaggtaaactgcagttctgaaaacatgggtgtggcaactaaagtggagggtcccccaacctttctctttaaagatgctcttattgcataactctgttttcttgtccttctttttatggttgtgacatgaattctattgtttcagaaattccagagaccatttatagtaccagaacaatgactatattttagtgttgagattataattcttaggaaaattcaatgtcaaatgctgtctatcttgattcatataatagaagtggggaagaacaattatggtccccactgcactttgcaagtggatgtaaaaactctcacaacttctaaccaagttggtggctctcaggaactaattgtccctccctccctccctccagcatatcttgactgccatttccactaaacccctctagctagaggaaaaccttggcaattggattcctcagtctggacagtcatcttataaatgtgtggcagaagtcctgatggatcaattaaaatagtctgcatatcagcaaaaatctgttttgtttatgccaaccttaacatttcactcatgtattaaatactgattgtgtcttggtttgtggaaaacaaactttacttatcacatatattgtgacttgacattatcaaagggaaagtattagggagggttttcttgtggactgtaggttgttctccaatgttttatcatcataattatcatcatccacattccctaaaatttggcctcagtttttgactgttgctacattgagagtcttgcctgttttgttgaagagcagtacaaatgactctgacttctagctaggccacagatggattggatttcttactctttgctaaggaaaat

SEQ ID NO: 75710 - DNA, 1049 bp, Homo sapiens
ctgaggcttccacatacaaattacctgtcaaaggcaatattttggtacttattgaaaggatttcaattaggttcttaagtatagtagactctgtgtcttattacccatctccgaaactagccaagaacttcatattcttttgtttacagaactgttgggattttctttttaagacttgaaaaatgctctggactgatttttagatcttaacgttacccccgacttctcgcccctcctcagtgcagccagaatgtaatataacttgggtttaagtgaaacttgtagcatgcaaaaggaaaactattgctgtttatttattctgtaaatactttgattgtacctctgtgtgcaaaacactaagtgacatgtgccatgtcacttttcctcccgattcttcaatgagggaataaagacccagacctcgatttacagttaactgttggctgtacatgatggaggtcacaaaatgctaagagagcccagaccatatctagttaggcagattaacaagactgcctgaaagagatagctggaaatgagctttgaaggctgaatgtgggccgtaggaccctgcatgagctggtccttgcctattttagcttacttaattttcttgccctcatttcctggtagcctgaacactgccttcctgccctgtcttcctggggaacacttccccatcccccacagtcatacagaccttgtcagtagtcccagaatgatctctcttcagtttaccaaggataagatatgggacactggcctggcttctgagtgggatgtggtccctgccctgaggacacataccagagacaaatattaacagttatattttaatgagataagtaatgactcccatgtcctaatgtacatcagcgctgctgctgcctacctgtgttgggtacaagaattgagattaggccgggcgtggtggctcacgcctgtaatcccagcactttgggaggccgaggcaggcagatcacgaggtcaggagatcgagaccatcttggctaacatggtgaaaccccatctctactaaaaatacaaaa

SEQ ID NO: 75711 - DNA, 1112 bp, Homo sapiens
ccacagatagtttgaaaagctggtatgtagattaacctaacttggatatttttgataggaacatttttgcatactcatgctcatttccccctctaatataagcagataatcatatcaatgggttttttaaatctcactttattaattgtgaaaatagtatgtcttcaatatgccaacttaggaagtgcagaagagtctttttgtttgttaaaacaaacaaggtaatctctacatttgtcacagaactaactgctgcctgtattttgttatatttattttgtccttttatcctgctcatatatgtaaattttttctcacaaaaatgggacactgtattgtttattctttatgtgtttgcatgtcattaaatattattttacaaagggctgcttggtagtctgttatctagttgtaccataatttatttaccttttctgtatagtccttcattacaagcacttattctatgcccttatttgctcttgcagataatgctttggaaatttctgtgaaaacatttttgataatatctctgaatatttcctaagcatacattttcagaagtagaaatactaggtcaaaatgtgtgaccattttaagactttgataaattgcccttcagaaatgtagaactgaatttcagctatcagtagcagtgggtgtactctcaggattggtactttcagggtgggaggatgttgctagacaaaggcaagagcgagaaggaatgagtagtctacttgggtggaaggtgagaggagcgcaagatgtttatggggcatggaaaatggcctgttgagtaaagtgtaggatatttttgaggaagtaggaaagacagaaaagttgagctgaaatccactgaaagccaatttagaatggtattggggagccattggcagatttttcagcagggatatgagagccagggctctgctctgagaagatggtggcatatacagcacagtctatactataccactcattccctgtacccttcatgccccttcctacctcatgcctttgcttgtactgttccctctgcctaaagaccctgttttccatattctgtcaaaactccactcatccatcagggaccacccccagatcctgct

SEQ ID NO: 75712 - DNA, 1034 bp, Homo sapiens
gttctaaatggaccatttatattgttcaacagacactagagaatactattcattttgcatgattctttggtcaaggacatactgtaagctgcgttagtgttctccttggttaatatctgaactgaccatgtcactccaactcttatagaccagaattcatttataaagcagaaagataagccaatatgagagaggttatgaagctgatgtttgatttctggtctcctgcgtggagcgatgggcctattgccaaccagagttggtcgggaaaaaggaaagatgactcctaccagtgtacttacgctttatgatcttgaatattttcagtgtttaaggaatctcttccttctttgatctccactgcatgaagaactctgttgcaggtgttaacaaggaagtttgaaatagaaagccagaacctgccccccaaagatctgacagtagtagaaggagatccattatgaagaaggtataatggcaacaaaagaataatcacaaattacctgtgtgtgtaatatgtgttgtgtggtgtgggtcaaggagatgaggaaggtggttagggaagactttatggaggaagtgagctgtcaacaggaattgaaggtgagaagaaaagttggggggaatccatgttaatgactgtctcagtcatcttaaactaggttatgctgtgatagcaaaaccccagtggttgcaacagcagaggcttattgcttgctgtgctgtgtgtctactgtgggtctgctatagttctgctccttcctgtcttctgtcctatacccaggaagggtggaggaggaaaggcaaacctggcaaaccattcataggctctaagcttatgcttggaaataacaggtgtcacttgtgcccacatttcattggccagtgcagatcacatggccacacctgagtttgcatataaggaggcatccttcttctgtagagactggtaccacaagtcatgtggccaaggctgaggtcatggggcaggcagatgacacatagtcctcttctagggaggggcagtgaatcat

SEQ ID NO: 75713 - DNA, 1015 bp, Homo sapiens
cagagtctcattctgttacccaggctggagtgcagtggtgcgatctcggctcactgcaacctccgcttcccgggttcaagcgattattttgcttcagcctcctgagtagctgggaccacaagcacgcaccactgcgcccagctatttttgtatttttttttagagacggggttttgccatgttggtcaggctggtctcgaactcctgaccttgtgatccgcccacctcagcctcccaaagtgctgggatgacaggcatgagtcaccgcgcccggcgcctgccacattttttatccattcatcattttatccattcatcattgatggacatttgggctgttgccagtttttggctcctgtgaataaagctgctataaatatccatatgtaagtttttgcatagatatatgttttaattcttgcaagtatatatgtaggagcggaattaactgggtcatatggtaacactgtgttgaacttttgagaaactttcagactgtttcaaaatgactgcaccattttacatctccaccagcaatgtatgagggttccagtttctccacgtctttgccaacacttgttcttattcaccccctaccaactgataagacaactgcttttaaagctgttctatatctcctgaagaactgaggacaaaataactcgggaattgtgtgtgcgtgagttgtcaaatagaaataaagtctccctgctaacaatttttaagttatttgggatatttacaaataaaacctaagttaagagtctgtttaatctctgctaaccatatattttatacctttcgagaatcaattcttttttactttttcctctccctctcacctctacctcctcccctctcccagtcttcctctgtgctctctgcctcagtcaaaataaagaaatataaccaatatgaataacactcacctattgaaataagattcagtaatattcttttctacaggtttttaaaagtcttaaattatctcagccaacctatccgaagagtccta

SEQ ID NO: 75714 - DNA, 1164 bp, Homo sapiens
ctctctttcaagaacaacaggcaatggggcctgtcagagggtgaagggtgggaggagggagaggatcagaaaaaataactgtgggtactaggtttaatagctgggtgatgaaatcatctgtacaacaaaccgtgtaatacaagtttacctatacaacaaacctgcacgtgtaccccgaacttaaaagttaaaaaaaaaatttatctagtaagacttgtcaactgaagttgtactagattataggtgtaaatactggaaatttgggtggatatttggagatgattctaacatgtttagaaaaaagcttattttagattaccggaaaactgttggtgatgcagactattaaaacttgaagtcactctaatgagtttctagtttaacggtaaaaaagctgaataaaaagcctatgtgtttagctgcagactttgtctagccaactgaatatagtctgcattgcttgctattaagagaaaaaaggaaatagtgtaaaaaacacttaaccattggtagtaagaaactagaaattatttctattagtcagcctttgcttgtggtgtttctcacttcttatttttatgtatcaaatgaaaacatgtctatcagacacagagaatattactgtgtaggtggtggtgagtcatattgtggtatttcatgtaatgactaagaatattggcagaaattttacaggctgaaaacctccaaggtttgttctctgtgtttaccaatcccttttagggcttaaagctctctcttgttttccatttatgtttttcctgactggttgggagcaggtaataattcactgaatgcacctctatggaaactgacaaaaatcttacctagctttcagatttctaaccaccatcatactaaaatattattctcagagtcattgcagttaaattttaagtgcttctttggcaattcatgattcccagatgagatggtcatttgctgtaatggggctggatgtttatatatttaatgaattatcatagcttaatagtacattttctccatgcattttataaaaatgttttctgtttatttgctgccaaagcatcacccttcaatctgccattagcttcttcctcttgatgttgtacttattatcaccatgtcatgtgtctttaggtcacagcttcttccccttgatgt

SEQ ID NO: 75715 - DNA, 1046 bp, Homo sapiens
tcaaggaccattaaaaagcaaaacaaaagaaaacaaaaaacaaaacccccaaacacaatcacatacaaatagcgagttgattggcaggctaacctcaagggcctgtcttagcttctttctctcgtttttcttagtcctcctgcccattcccccacctcaatcattatttgaatgtcctcagaccttatctaaatatatatttgtatgtatgtaaagagttagttaactcattagaaatagatatcctgaatttcttagtgacttctcttattagccaaaaacttgtattttatctcattgaaatctattgattaggtagattttcaaataataaatgctttagatattgctttagaggttttataaatgatcccatatttcagtttagctaaaatctctgaaaagagctttttcttccaaagtgttagtctttcaactcattcaagacccttattgtatattatttcaaaattccttcccttgctttatctagcaaatgaatccatttccttcgattgatttgtagcatgccaattgttttctgatttatgtaggtttctctacagaactgcctgcttattctacagtgtggaattggtaaggtttctttgtacagaatctcttagaagtggggcttaataatgcactttgttacggatgaagcctagaactttagttcccacagctgggcttccctcagaggtcctttcttcttaataataaaaaaaaatcttttctccaaaatattataaatatgtaaaatatataaatatataaaagtataattaatatcatctccaagaagaagagccttttaatctgttggttttagtttttgagaaactaaaactttctctggagaggcatgatgcttgatgcaaaggtttctccttttatctcttgcttaatcattttcctttgacttttaaaactctatccatagagaataacatgaaaaaaaaattctctgaccaatgaaaggagctcggccacccaagtctaagatgtagtaagatttagattctatactcaactagggtgcttcc

SEQ ID NO: 75716 - DNA, 1035 bp, Homo sapiens
tcagcagaagcagaagttatctacctgtgacagcaaaacatattaaaaccctttgctttgaatttctaggttttaggaatcacatgtttcttcacacctctgctcagttaacaaaaactgtgctgtagtgaagtaaaggatgcactcttaatagtacagttctctctcacacaaaccaaatgttacccccaaaactaagcaagttactattgaactgtttgaataattgacctgattgttgagaagtgatttatgtcaccattattttcccattcatcaatagttaagtgcaggtatgaataacaggaaattaaaaaggaagaaaaataattacttcacatatataatagctgtatgccaaaattctaacattttaaacatgttccctcataatggaattttctgtaaaaaatccctcattgcttctctggttgttcattgtgttgaaattcttaatagctagtttttgtggttagggagtaatactgtatgtgtgtgtttttgtgatgtaactgtttaccttgcccttgaaagtagcaattgatttgtgtttaaatgatgaaataacaacagtacagttgccacctctgtgtcaggcattactgcatgcttagttgatttgccaatcctcacaacagccttgcaagagaaatgatgtacctctcctggagatgaggatatagaggcttaaaaagatcatgaacttcccaaaggaactagcatattttaggccatgactaggcactggaggtgtgggtgttaacaagatactgtgtaaggtgataactagaagcaagcctggcaaactcagttgggattataaatggaagacatcaaagacaggccgatgagtggagaattaattttgcaggcaatgtggaactaataaagttttttgaactgggagctcaaaacagcacaggtgctccatttttaaggcagtggttctaaaatgtggtcttaggaccagcagcaacacctgggaacttactgaaaatgcagtgtcgtgtaccttttcctccctgttcaatccta

SEQ ID NO: 75717 - DNA, 1061 bp, Homo sapiens
ggaaaaggaggagacgagatgagacatcggtcttctagttcttcccaatatctttgtgagaaaaggggtaaactgggaagggaagcagtggctgggcactgggcctgaagatgtgagagggaagagaagttagatgtcttctttcttttactgtggttgattaaatatacagtaaagtgagcattggatttccagggacccactttgctaggtgttaagatttgggagagggaaccagtaaaagtaaaaaaactagacttcagtgacagtattactagacttcttcagaagtacctggtttagtcttctgcaattgagttttcaactccagtgatgggttcaaactggcatttctgctcttatgtgataagagcttacagaaagtggcagaagtagcaatgattagaaagaaatttgtctgcctttcctccctacctctctaaaggctatataagggaagcacagtagctgcaggacaaccagctttctagactctgcaggctctgaaattatctgtcttatctacatagtccctggcattgagagatgaggatttgtgtataagcccagattgaaacagtaagaaataacaagcttggagtatctggtgtttcactcaccaaagcaatgcagttggtgaagggcaaggcaagttagtgtgtgatttgtttgatgtgtattgagtatcttctctggggcagagaaaactagacagagaatctagactcttggttagattctgaggattaaaaaaataagccaaatttcttggagtggatggtcctggtaggagaagcagatagaatcaaatagtaatcaaatgttgtcataagctccataaaagggtaagcagacaggctctggggcacagaggaaggagaaaccaacctctaggagtgtgtgtgtttgactgagacaaccattcttttaccactttgacccaccattggttacagcagtgagagttgatgttgtgctttgatcccgtgatctagaaactggctcctttttcaacatttgagctgtgttcacatgcactgtacactttcctctttgatttc

SEQ ID NO: 75718 - DNA, 1046 bp, Homo sapiens
gtcctcagggacagttaaccttgcattagcacttttttctcattctgaggatgcatccctgaatggcatatgcctttatgtgcttactgttacccctgattctccttttagcttaattactcttttccaaagggtcctctcttgttatagccttgtgttaaacattatattgcaaatcataaacacactttgattgttttcccaagggctggttacagaacatcaaaacctactttatgacattctgaaaggtgggtctggtagctacaaatgtggtagcaagatgtgaggcagcaaaggccattgacaccactgattgaatttgcacgatacataagggtttagcgttgtgtgtccaaatatgttaatttacaaaccaactggaccacattgtacctgggtctttagcactccatggtgacatgtggatcaaagatttggctcttaacaagctatgtaggaataatttgttttatgtcattgcacactgttgtgtcataggcacagtgcctgcctgcaggggaatgtggggttgtatcatttctgaaactaataattggagaatatttctttttctttgccatgaaactgagggggagttgtcatataaattggtttcagatgttggagttgtactgcttgagaattttaggcttcagtcatatgccatgctgtgaagtgctttgccaaaataatgacttgttaaaataaataaagtaagtgtctcatagtttgggaagtggactgtaaaatctcagttcttagttctagctaagtgttgtggctgctttctcagatataccaggtgcacataaaatgtattcccccacatcccctctaaccaccccccaactccttgtaaagtcagctgaggcttgttcaggaaagaagagggtgttggagcagagggctcctgaacccttacagaaatgcggtgatattgttgctcttctctttgctgctcttccccacagggtgactaggtctctgtaaagtggcactcttttcttgcttttcttgcttttctgggtgtgtgattttgggga

SEQ ID NO: 75719 - DNA, 1026 bp, Homo sapiens
cctcagtcatgggacttgattttgttttagttttggaaatttgccctactttgggggaatggagagatctggcaccttctgcttcattttataggttcaaataccattgaatatcactgtgagttttggcttgttaaatacattggtaagagtggggttttgctaatactcccttttaagaggaaagaagggtttagcatttatactaccactatagctattttattaacatgttaaagtataaccaaggcctgtttttaaaaactcatcagatttcctaaacgttgtgaaactatgggagtgtaatccagtctaacttcaaagcctctgctgtagccttagtccccatcatctggcttcttcaatctccagatgaaattcacacaactgcctgagttgagatatcagttactgccagcttttaaggcactgtaagcaatagttactttgcccccttgttgtgactacttaaaaaatagttttgaaattgcatttcttttattccacctgtgtagacctgtctggaaagatttgcttacagaaagtgttttttcgaggcacagtataggactgaaattaaatgccccaccttgaaaccactctcctgagggttgggattctgacatcaggatatagagctctactaaaagagatgttaaaacctagtaggtagtcactgcttcattatgagacagtagctgtgtgtacatggcataacatcttctccactagggtgggatatccattgtcctcaggtggtctttgaatgtgaagctaaagaaccaaaattttccttttcaggtctgtttgatcacacaagtgactcacatagatgtgcaaatacgcatagaaatccctgaccacagtgccatcttctgctgggctcagtgttcaggtggagccagaggccacagccactgataactgattttttttttttttttgagatttggcttcaggttggcacagatctcccatccacagaagccctggggggcttaggggctggctccaggtcaccctgct

SEQ ID NO: 75720 - DNA, 1046 bp, Homo sapiens
caagtaggcagtctgatcatttatagccaacatttaaaaataaatacgtcataccttcgtgtcttctaaaggcttgagtgggtcattgtctgggtgctctggaagtcggatgtgtttctaggtgctgtgtgtatatgttgggtggtatgtcactttttttcccccctttttaggaccaggaagaaaacaagggagctacaagttggcctgaattctacattgatcagctcaattccatggctgctgtaagtagacttttatgttctttgacacactgtttaaaatgcaagtgtagtacaaagtacacagttgcacaataaattcgattgagtatgacctaccaaatgtcagtacctttccaaactccatcctaaacattcaatgctggggaaaggaaagagggtaggagggatacttggcaaagtgatttttccagtatgttttaaataaaatcagcacacactgcaatataattgagtttaatgttgtaagtgaaaatgtagtttgaaatctggcttgtgttcaactttaacttgcaattgctcttaccagtcactcggagcttggttatggcagcactattttaaaagttaataccattttaaaataatatgattaagcgatttctttactatatccctcccattctctttcttactgagaacttggttatttcctggcatcatgattttgcaggggaccaagtactctttactcatataatagatcaggaattcataaagcaagtggtttaatgaaaaggcgtcataataatagtgctgagatgtcctcggaaaatctttagtacatggattgttggttcagtaattgcttaatatgtattctcaatgcctaaaatatgaattctaatcacatggatgtctgtgatgtcagcattgccagcagcttgagggacacctattcatcacagctaaaattcacagcagaaaataagtcatcaacctttgagccttagtagcttaaatcccatccctgttgataagaattagaggttgcccatagtagaatgcagtctttgtctcagt

SEQ ID NO: 75721 - DNA, 1056 bp, Homo sapiens
aatccttcttattcaaggcatctcacacaatgccaaagatgagaaaagggtgatctcagcatttgtatgaatatgctaacagaatgtgagatttgtgatgaccaccagggattttctgtgcatctgcctaagcaataataatttggagccatttatatttcctgcatataaaggctattttctgaattcttgttcctggctgttaggaaaaaaagaattgtttctctttctaattaaatttgcatgtttgttatctaatgagaagttgcttatttgttaatgaattcccttctataaatggggaactactaagtactgtatggatttttcctttcttcaagtataggacagttagattaatttgtcctttagtgacttaatccctgccttgtctgaagtagacctggttcatttgtgtgctacagggtctgtgatgtgccaacatgtggcccttctttaagggcctcctctctcctccatccagctccttggacaattctttgccacattcttgagtgatctacattttaactgctgtgtgtttggttcccaatccaaaatccttcccaagagcaccacaagtctattaaattgtcagtgactttgctatactttttgtgtcaaacacctaagaaagctttctaatgttccttttaggactgagccaacatctttccagggtcaaaggtaaaaggcattaatagtccatgaattagtgaggcctcaaaattcctgcatacttcagggaataaggagatctgatgagaccagaaaccctatgctgagttttctgtttttctcaacattctgattgccaccaccgccttgcatagttctggctaatcactatgatgtctgtactggagaattcttgataacacacagcagaaatcctgagatattgtacctggagcagtggaaaggcacacaagttctccaaatcctttcatggcccagcagctagactctttggttgtctgcttagggcattcttgaaggagtgtttgtccacattgtcatcacccattgtctgcagaatcagcagcaactactaca

SEQ ID NO: 75722 - DNA, 1180 bp, Homo sapiens
gagttcaaggctgcagtgagctatgacagagcaagaccctgtctctcttaaagaaaaaaaaaaaaaggattggggtgggggcatgggaactgtatgctaaataacacaggaacagcagatggttttaatctaagacaagatatgtattccgagtattctcttgcttctaattttttatgaatatatgatctgttgtttggttctttgtacccattgagatatgtttatcacaaatggaggggttttttttcacacttttggttagaactgactattgggtctgtgccaaggaagaggcaaagaattaaaaagacttcatcaatgtaagccttttggcactttaggaactaaatctttctttcccctgccctctagacttttctgttaggggctattataaaacccaaaggcacttaagcatggtgcatttctcttcatgacaggtttgtaaccagattcatcgacttggatggcctatcatgtatcctcaactttctaaagaccatggactacgagacctcagagtctcgaatacatacttctctcattggctgtataaaggcgttaatgaacaactctcaaggccgggctcacgtcctggctcattctgagagtattaatgtaattgctcagagtctgagcacagagaacattaaaacgaaggtggccgtgctggaaatcttgggcgccgtgtgcctggttcccgggggccacaagaaggttctgcaggccatgctgcactaccagaagtatgccagcgaaaggacccgctttcaggtgggtgttcgctcagccttcttcactcaccccttctttaaagtctgctcaaacacgtgcttttcctgtccctgaaaggggaatgttacttgagatgtcctcttgtggtgattactcacagtgtgactttaaacattcccttcttcttaggtttaagaaccagagaatagagtatactttcaatagttgatgaatctgggcctttagatttgcagaacttgaaaatgtggtcttgcatcctatatgtcatatagcacacatcttttgaacccaccaaactgggtgttccctgaaaattttacagcttgccattcttgaattaggatcaatattaataatttttcatatttcactatattacttggatgtaaaaagcaagcagagataatgaagcaaaggcttt

SEQ ID NO: 75723 - DNA, 1031 bp, Homo sapiens
cgttactaaccttatgctcattttatgaatttttttatactcaaaagttaactttttttttttttcagacggagtcttgctctgttgcccaggctggagtgcggtggcatgatctcagctcacggcaacctccacctcccgggttcacgccattctcttgcctcagcctcccgagtagctgggactacaggcgcccaccatcacacccagctaattttttgtatttttagtagagacggggtttcactgtgttagccaggacagtctcgatctcctgaccttgcgatccgcctgcctcagcctcccaaagtgctgggattagaggtgtgagccaccaaaaagttaacttttaaaatcttacgtttagacaggattacactgacccatagaaagccaccctttttctccttaagaacagtcctaaaaactctaatttcaaaattcttacatcatacatacatgtatacaaaagcctttgcttcattatctctgcttgctttttacatccaagtaatatagtgaaatatgaaaaattattaatattgatcctaattcaagaatggcaagctgtaaaattttcagggaacacccagtttggtgggttcaaaagatgtgtgctatatgacatataggatgcaagaccacattttcaagttctgcaaatctaaaggcccagattcatcaactattgaaagtatactctattctctggttcttaaacctaagaagaagggaatgtttaaagtcacactgtgagtaatcaccacaagaggacatctcaagtaacattcccctttcagggacaggaaaagcacgtgtttgagcagactttaaagaaggggtgagtgaagaaggctgagcgaacacccacctgaaagcgggtcctttcgctggcatacttctggtagtgcagcatggcctgcagaaccttcttgtggcccccgggaaccaggcacacggcgcccaagatttccagcacggccaccttcgttttaatgttctctgtgctcagactctgagcaattacatta

SEQ ID NO: 75724 - DNA, 2182 bp, Homo sapiens
gtcctaatgggttctggctcctgcacagtgctgattacattgggtgcacaccagggattccaagccttggttttatgacagccaagtatgtgtgtctacatggcttaaagggtgttacaaaattttttaaatgaaacaaattaaaattttgattttaaaaataaaaaatatgccttacaacctgttcagaaaggggtagagggtacctctcaatcaaataaatgatcattgcatgtcaaaattccataactttgggaagcattggtgcagatgttataaacatctctggtttggtggctttaaagggtgaccaccattgacaaatattcatcctagcttagaaacaacttgaagattttttttcactattcttttcttttttagacaagaggagtggcaacactgttcagtactggctactactagatagaattatacagcagatagttatccagaatgacaaaggacaggaccctgactccacacctttggaaaactttaatattaagaatgtcgtacgaatgtaagtctcttcttattctgctgctgtgagataatggtgacaatgtaagatatttattttatcctacttcagagtaacagctgggagagctgaaatgttctaggggtcaaatatgagttactgtacacatgcactatagctaagtaacatctggtcttaaatgggtttcaagcatgcactgaggattttctctgcagtagactatttttgtacctggggagaatgcagttagcagtggaccttttatattttttgtaataaatgctccttgaactcttacacaggttggttaatgaaaatgaagttaagcagtggaaagaacaagcggaaaaaatgagaaaaggtaaataatgaggccctgataagaggctgtgttattggttattgggtgaccttgatttccatatattttggaaatttacattgatgtttcttgttagcttggtgcaggcagcctttctttttccatcttttaagggcattttgcactgagtttcttaaattgagctattttagttgtcatactgattctcaaatattttatccttttattataatcatgtaaatgttttgaaaagcttatagcatttgctgttcagtattccttaaatcaaattttcttaactactaataattcaaacccttcccctactccgtcatggctctttaaatcatactgggttttaagaaatgtaataagggacttgaggaattatccaaaattttaaaagagaagaacaggtcacttggtttcttttttttttttttttttttttttgagatggagtcttgctctgtcacccaggctggaatcagtggcgccatctcggctcactgcaagttccacctcctaagttcacgtcattctcctgcctcagcctcccgagtagctgggactaccggcgcccgccatcacatccggctaattttttgtatttttattagagatggggtttcactatgttagtcaggatggtctcaatctcctgacctcgtgatccacccgccttggctgcccaaagtgctgggattgcaggcgtgagccaccgcgcccggcctacttggtttcaataacccaattctgtccatgaccttgatttggtaccagttataaaaagagaagtcattcagaaaatcagtgaccattgctgagatatgtgttacgaaacattagctggccagctattagtgtgtatttgaatatgtctttgatattatctcttagtatcaaatgataggagagacatttatgtccatcagtgtaccagccatacagagaaatgtatgtaattttccttcctgttttaaaatattaacaaattgaagttggcctctttgtggaaataatcatactgccagctaccatgctctcaccatactggttaactgacttccttttccttgtccaagttattcactcacagccaatgaaatacaatagcattcaccccaatatttaatgtgctgaaaagcaggtcccagagatgcctaagcatttccttttctctcatcacatttccactgagcagaaaagcagggccataactgatatcagaaaataccaattgtgaactaactactgttatgttacgagttcctcatatgtattcagattgctcccaaataagtgacattgcacatgcattttaaaaaataaat

SEQ ID NO: 75725 - DNA, 1006 bp, Homo sapiens
atatttatttttttccttgtattgctaaaggaccattttaatgacaagattctgaatcaactaccaaacagttaccattctcctccacaagaagtcactcaaacttttgttctgtgtttagaactgtgagtgtaggctctcttcttcagtctcttacgtagttaataataacattgttcatccgaagcccactccaagcacaaacatcatttagcctttgagttgctccctttgatggagaagaggaataatatttacctaataaagatcctcataatctctgccatcatcctcagtcaattttcttttagagaaaatgcttcagctttgaagactctcctgttttcatgtccaattgttttctcgtgtagagcacaatgagctacaacagaaactggaaaagaaagaacgagaatgtgatgctaagactcaagagaaggaagagatgatgcagaccttaaataaaatgaaagagaaacttgaaaaggagactactgagcataagcaagtcaagcagcaggtggcggacctcacagcacagctccatgagctcagcagggtgaggtcttccgctcagctcacgggcagctgccaaggcctcactgaccctagagcccctcacccttaagtagagaacttcatactgggggaataaaatctgaaatggctcatgattcatcacaattaggagactcactccctctgctatcatgtaggcagcagaggctgtttgggggtgcatttttaaatactgtacaaatctaagagcaaaggaaattgcattagcttcttaaagtgaaaactgacttcatgaaaaccagactgtctgtgatggtgcaagaagtgagagagatatgaatgcatcccagacaagtacttgagtgtcaggtacaaaaggttgatgcactggagtccataaaggcccaaaagagtccattcgactttaccgatcctttaaacattctcagaagggtgaatttctctataataaacattttaggccaag

SEQ ID NO: 75726 - DNA, 1151 bp, Homo sapiens
agcaaaaacatgtgatttggtgcctgctggcactccacattgacaaggcatcactatgtgagccccagtcacatctgtgtggtacctcttgttcttcaagagggcatcgtgatacagcctcttaaagttagaccagaagagaacacagcaaggtggccaggtctggagagtttcagaagaaaaaagaaaaggtggagtaggatcccaaataatcaaagccttgagaagagaaaacttgagtccagtagtgtgagaagaaagattcttaagtatgactgaagaggtggaatgatggagagagcagagttcatcctaaacaggaacacacgaatgctgggcctcttacggggctttccttgggctttactgagaggcccttaactcccagatgaatcatgggtggagcatccttaaacaagcagcagacttcctagttggtttccttggcttagtccccaagaaagagtgtatcagaaaagaaatactgagcaccaaaagagtagatggactcaggctagggggagaaacaaaaactaagggtttcttgtttcattttgttttgtttttcaaaatggcctttgatacatctgaaatgggggggaaaagccaatatttaaatgaatatttttccttaagaaagggaaagcttttctgcaatgccttttatgctactttaataaaatacaaaaatagaggcggttgcctgccatagtgacatgaacccttaaaacaggagccctcagctgcccacccctactgtaagtagaaaggcaaacttgggcaatgctatacacaccaaataagggaagatgaaaaaaacacaatgaagataaggcattggccaatagaaagcaaaacaatttatccttcaaaggacaaaagttgtctttagagtcctcacgtggcagggactgtgaccagactcattcctgattggctgcaacatgctgcctctttctctgtctgctgtcctgagaaggtgtctccttggccttgacatggaatcttgatccattttagcaaatttcctgataattcaaataatcttctaacctggctacatgtcccattgctttcccacttcagttttgatcgctgatactgttccatgctggttgcctaatatgaagatttgagaacgtagagaagta

SEQ ID NO: 75727 - DNA, 1525 bp, Homo sapiens
tgtcagttacctcttcctcgttccctttttcattccaagtcttttctaaaaactatttccagaagagactgttgaccttgtatgcttgaacagtcctggggcagttaggacagggccacgaatggctgcacaacacacgtatcactgattttctcttaattgcatgttctttttcctcatacctacctgtagcacctacaggcattatttgcactttataggggtgctgagggttaatattactgacttgagttgttcaacctgtcttttctcaatccttccttataacacaagatgacaggagattattttcatcaaaaaaagtttatttatttatgtatttttggttttcctattaacagtaggaatagtttcctcaagttgatgggattgattttctcctgcttcaagtaaaatcatcatgttgaataaatggagccagtggtcatttcaaagaggatttattcctttcccagcttgggtctttctcaggtgttttaagccctgtcttttctgaatttgattttccaccattgaaaattgggtacagcaaatgtcatcgtctttctctaccctgaatgcttagtattgtgctcttcatggtattcagccaaattttctcatcttcatcaactctcattgatgatcccaggggcataaatcatctcttaccctacatcacttgtttccttgactgctttgactttcccccatttgttgctgtgacttctgaactgcatatatctgatttgccttttccatgcctctgccatggctgtaggatttctttgtgaacagtaactccaagcaggtaagtgagctactacctaaagcttgcttaatataactccttggctcactgtaagcttgaaatctcttcgttatccagggttttgtttttgtttttgtttttttacatagtgtaatctaatgcctaggtaactccactttggatttcaactcttaaatgagtatctagaggttcgcctgaaattttagcatgagacagttgacatttgatcacctagtgcctcacagtataaattccatattgcctttgttttctaaactgttacacagttctagagttctttggtttctttactttttttttaatgctaccgttattggtacaataatttatataattgtttttttcctcctaattcctgagtgggaaatatatgaaaaaggcttgatggtgtatataagacttggactattgtcttctgatagttatcaagtactttttatagattgcataggctgcagttgaatttagatgcttgatatgcttagtgtctgagcaagccagattgcagtcacgtcactacaaattcattttctttttaagctgcaaaaatttaaacagtagtacagactcatgttaaaaacagcagtctgatccaagattttgtagtttgtagaactgataatgttagatgttctccataaattcacgaggcttagtaggaaagtacgtagaatttttagaacttaaacagactttagaggtactacttta

SEQ ID NO: 75728 - DNA, 1023 bp, Homo sapiens
tctttgtgggccacattaagagaaaccaaaattgttttgaattagagctagtgtttagtccagacagcctctgggggttgaggagcataaatatatacaatttcaaaagcaagaagttctgtgctccatatggggagctaatgaaatgcaaatctgatacttcaagtattgttctcgctctgattttcaactccttttcttttaaatgcaaaacagaaggactcagcagaactacaccataaaatggtttcttcaactcggtgtgaaaaggacacagaactaattttttttttttcttacaagcagagctctcctcatgattatagatgttttcacagccagttggttttcattagtggcagtttcagccctccctattgttactgttccttggccttgcatggccacacaatggtgtttggacttaaattgactcaagggcctctagtgtcctggagtctaaggctacccagttgaggccctgatgctgcgagtcggtttttccctgttgtatactttacccatgccaacttagctaaattgttccatttaagtagggggaattttctaacgcgatattctgggaacatgttcatgaggcaatgattgtcccaagaatgacgaaaaccatctgaagaagtctgccaggacaagggctgctgtaacggcgtaggggttataatggcaacacagctcacataaggtgatagaacgggccttatttgtcagcttaaacaattttgcattttgtctagatgctttatttgggtttgagaacatgaaatagaagagaatggtatgagtacagtaggattcccaaattttttccttctcttccctacttaatggcacatgaaataacattcagtttaaatagcaaggtggatggttttaacataatcgggtcccaaatctagagaaaaagacaagccagaggcatccttggtggggtgcctcatccagcttcacctggggcttctcttctttgctgcctttgagtgcgcgctttcagttgttcagccc

SEQ ID NO: 75729 - DNA, 1022 bp, Homo sapiens
cctcttgtgtcataaatagcagtaaatttaaatgccaggggtagcaagaatgggatttacacccagtcagattacatctttgcccatggtatcttgttataatttttattatccatgaccaagcagccagtatttctatagcatttctttgtagcctctccaacgggatcatgggctgtttggcatctttgtctggttgtccccaaataacaatgttgttgatctcgcacatattctagggattttcacctgtctctgccccctgccccttggtctgggccttaacttttctgtgctctgtggtgatagtctctgaatgctataagatcgttccatccttctgtctcattgttttggggatgggctcacattttgagtggttttggtcaataagtccacgtttgttagagccaggtctacctaaggtcagctgtgggcacaagcaactatgattctagactgaactccaggttgcatctgtaggtgtgccctgttccaagagcagagaataagggtattttgtgttgttaacagtaatcctgagtggtgaagttgctctgggtagagtgcctgtctgtttgcacgtgtgttttccatggttctcactgatgtcctcgaaggtctcagacaccatgcagggaggaatgatgtttgcagagtcactccctaatggaccagccccgcccctgcaacctctgcggctggaatagtcctgggggaaatccctcacatttgccatggagaaactcttcatgctgtcctttaaaggttttatttaattatcaaaatagttaatgattatgttctcaagtctcttggggttctctgtgtatgaacggtttaaaagtatctcctgaacccaaaatttattttgagagcattttctagctccttcacgtacccttccctcccttgctgtagaccagtcacacagagtctttgctctgggacagtggaggtctaggcagtgctctgcccctcccaggtgaccctgccttcgagttgctgcacccaatgtggta

SEQ ID NO: 75730 - DNA, 1677 bp, Homo sapiens
ggccttgctactccctgcctttgcctaccctgccctgccctctcccactgatgttaccactgcccttccacctgcataagtgctgtgctgcccgttccagaccccggcacatagtatacactctgcctggaatgtattccagcctcacacaacacctgcctgtaattccaattccctctctctgctgatgacacccagactaactgccttttctgaggtccctcagttaaatccaacaaacatttgaaaacctactaaatggatcgtctaattccagcatcaaattctggggagagcctcaaagtcaagaaggtcaatgttttaaaaaaaaaaaaaagttaagggcatttgatctagaaaacagcatgagtccacaggtcttgcatacacatccaaaacgtgtgtaccttgaaaggaaatcagacacgtacagaagcactgtttcagttttaaatattttactatttcttccacatcccatgctcatttcttccttcaaaataaaatacgaaattaaaaacatcaaatcccactgtgttcctctcacccagctctgcatggaaggggaaaaaaaaagattgaattagataaaccagaaaaataagaaaatggaatggaaactacaaatggaattattcattccagcatgatgtaacagaaaaaggcacagagctgggagtcaagagacctaggttctatttctaatcactacccacacttgctttgtaatcctgggtgagtggcttactctccctggacctcagttgtatcatattctgatgagagcattgactccctaaggtccttctagtggtctgtgaaaaagaggttccagtagagaactcccacaattctgatttgagaggcagtagagaacagaaaggtgccaggaatgaatcttatacccatttaactacttccaagtaaaaatgaaaagatttaatcatttctattgtatcttaacctgtgagcagagcttatacactcaacaagagttaacattttatcttgggacagattaactgaaagggtgaaaaattactacatggatttaagtgataaacctcagttttaatattcgtgtgtacttttcagctcttgaaatttgttcctgaaaaaagtgacattgacctattggaggaacataaacacgaactggatcggatggccaaggctgataggttcctttttgagatgagccggtgagtttgaaaatgctgggaatgtgaagatgtcacttccctttctaagcttcatgaattttcaattcatgttgaattgtttgggccaattaacctggcttaacttgaaagctttttcattctaaaaatcttctcaagtctgagtgatgtggaatttgttctgtttatgtcacttcttgtctatggatgagccacggtgagggttttttcacaattatctctatttctgggcccctttggccttatcaagtaataacttttcttgattccagtcagtatcattctcctcaccagtctgatttcttgggatagtgtctcatacttccaagtagcttagcatggcaaggtggttgtaaaacaaaaaaaaaaaaaagaaaaaaaaatatatggacagactctgacaatgtcagcctcaagcccccataactgaacaaccagggtctagatgtcagatcatgacacatgcagacatcac

SEQ ID NO: 75731 - DNA, 1021 bp, Homo sapiens
tgactcacaccagacaagtaagtgtttgtaaagaaatcttggagatgggattgctattctagatattcctcagtgcttatgactgatgagtcagccaagaaaggcctgagaaaggataggattttgcagctgtctatgggtgttggtaacaacttgagttggctctccctgtccttgttctttgcttctggtgtaagcgttttgaaagtgctcttggtaacccaataactcagtcttacatcttcaatatctgttattaagtgtgtgaatttagaatgggtatcactgaaacatcttgatttcaaacaacgaaacacttggtaatcatgtttttatgtgttttgttttgaagcaattcgttctggctcagaagaggtgtttaggagtggtgccctcaagcagttgctggaggtggttttggcatttggaaattatatgaataaaggtcaaagagggaatgcatatggattcaagatatctagcctaaacaaaattgctgacacaaaatccagcatcgacaagtaagtatgagatcttccaacacttgggggagccaggtgtgtaggtccaggctcagatttatgcctctctggtcctcctcagccttcatgacactgcattcttcagttggaacttctctttctcactactttcttcccttctctgacattgactcttctctaaacctctctcatgaccgcaggcatctcccacattcctgttggaccaattatccttcatccatttttggtccactgggacatcatctgttctaagttttgctgttgtttttgttttgtcctgcctttttaaaaaattattttttgtaaactttttattataatatactaagaagaggtcagtcatcacaaatgctgggcttgataatttttcacaaattaaacacacctgcataaccagcgcccagatcaaggacagaatgttaccagcactcgacatctccccatgacccctctacagaaaactgtgttccacagaaaagaaaaaaaccgatagttgg

SEQ ID NO: 75732 - DNA, 1077 bp, Homo sapiens
ttaagaatagctgcccttttcggtggaataaacatccctcactctccaccccaccccactccactccacccaagcctactagttataaacctgcagggcacaccccattttagggtggatccactgggaaggtaaacttgagcttgtctccactggcagtggttcagattcacttagatcacccatcacattacccagattttgaaagatgctcattatgggccacaaatgtaattcttatcctctttttagaaattgtgtgctttttgacatatatctatgcaatccccatggaggctctcccattattcctgtctcttgagaatccctgccttacatgatcctccaaattttgaagttaatgcaggtaatatagcattattgtgggttctaccatttgagcatataaatcatatgcagatattaactattcatatatttatgtagtttaaatgaaaataatttgaatgtttaatactcttcccttcttcaattgtagaaacattacccttttgcactatctcatcactattgtggaaaataagtaccccagtgttctcaatctaaatgaagaattgcgagatattcctcaagctgcgaaagtaaagtaagtacttacagtgagtgttagtttcttaaatcacttggattgtgtgttagccattgaggtagtttgcactgcatgaagtcagtccttctatttgttttcccctgatcattgtatgaaataaagtttgaatctcatccaagtcactcaaatgtattacaaggttttgaatatatgtttgttctagcttctttggaatactgcatgcaatttttaactttcatacttttaaagggcaggtgttttaaatacaggtaggagcaccttagttaaataaagatgcatggctaagcaaatagaagacctaagtgtcagaacattgcaataattttcacatatgcacacatactcccagaaaccaaggcggctctttaatgggaagcattctttatgcaaatgaagaaactaaaaataaaatggaaagttgccaaacttttaccacaaacttcacaccacgtttcagagactga

SEQ ID NO: 75733 - DNA, 1885 bp, Homo sapiens
aaatcatttttgattgcaacttaagccattaccttgtaatagtcatattattggggccttagtgaaaagcagaacactgattatacagagtacaatgtgaacatgattgcagatgaacttgttttctttctgttttcaaagggagccaagtatggcaagagatttatttctacatgaagtaatttgctgaagtgagatttttttgagtttgaaacataaaatatttttgtacagatggaagatatttctattctatttttaacctgtaaaatatacctgctggctacagaaaacaaacataattttatacctacatttcatgagtttaaaatactgttgtctttctttgagatctgagcatggaagggaattttaaacatttaaattaaaataggatggacttccaagcgtgaaatatttaaacccatcttatatttaatatgtgtaagtcacatgttgattgctaaaacattgctatttacaacagcatgactgagctggacaaagaaataagtaccttgagaagtggcttgaaagcagtagagacagtgagtatttttttgttgttgttctaattcctggtctcttcactatctctagtgctggtggttttcagcagatgggttgtgttggcatgtggtatgcccgggataaacatttattgattaaaaaataagaaccaccaccacaagaagcaaaggcaggttatgttcagcctggcaacttgattgcaggcagcaggggtcgtggataagtcactgcagcaggaactggaaactggacctagtgtgccaccaatttatctgtaaggcaggattcatcaggatgagtgggctgggctagatgatcttcagggacgctctcagtttccaagtgctgctaatatatggtgttcactttcggtagagcagtagaacttctctgtagaacttctcagttgtttttgacttggtcctttggggagtatttactaagcagacagtgtagtacatgctctagctgagggtcacgatgactcagaatccttgtcctccaggtgttgcaataatcggagcagccacttccctcagcctggccgcatccagataagcagagtgattacggaggtgccttaaggaagcagcgggttgagggtgctttggaggcatgaggaacaattggcccctattggaggaagcttctcttttggaaaagaagttgtttgagctatggcttaagagggtagggtaaacttaggtgcatagagggaggttatcccaggcatacaagacaacctgggcccaggcctctgaggaaggaaaaccagtcaggctggcagactggacctggtaggatgaaacgtgcctgttggcacagtgccctgcgggtactctgcagatgcagctgccagcgagagagggggcagggatgagaacaggctggcagagtagcgtccctggtgtctgtgctcaaagcagccatagcttgggcctgctctgggtgaaggagacggatttgcaggcagcttggaaaggtgcctctcataagtatccttcagatcatttatcagtaatgctgtgaggactctcccttcttttcgtttttgaatcacaaaactgccatagaaagtagttgaattaattaaagacatacctctaataaaaattaaagtcacaatgtctaatttttttttcaataaattaaggagcatgtgaggtttttttcctttttttttttttttaatgtagggagtagggggcagtattaaaaaaaaaattctactgattgaactttttctcccagccccagagggtccatggtcattatgatggccctaaagcctggctctgacccctgcttctgagccaggtcagagcaaggcctggggtggaggcttctggggaaa

SEQ ID NO: 75734 - DNA, 1041 bp, Homo sapiens
tctgatgttgaagaccttctagcagaagctaaagacctggtaagtttcccccttgtgcactgagtgttgtttgaccgggctgggcttcagtgtgatactttcagttattattctgtacgggaaatagcaggagtgagatccaaacttcgtggtgcaggaaataaagtagtagataattactttccagattccattgttttgcatgacataggtgtattttcatttccaagactgtgattaatctgaacacaccctttttgtctgactggcctatgttgcctttaggttagcaagaccttgaaggctctgaatggtataagaccagcaaatactttgacagttttctcttggttgaaactggcttgaagtacttatctctgggaaccagaaaagagtagatgatgaaaaccaggggcagcatcaaatgtgcaatcaggtgttactaaagccatgtgcctaaattacctctatgttgtaatatgctcatctgagatacagccttggaggacaggatactacctgtataaatctccagcagaactcgctaaaagagatgcattttaattcacagtctcattacaagaggtttttttttttttcagtaagacatttatttttatgatttctgctatttcacattttgtgttcccttggaagagaaatttttgttggttaataaccaccacctcttagctccctcagcttcacctcactcctctctatctcaggttgtttcctcttccaaaatgcattcacattcatatacaagacaggtacacagtctctcattttctatcctcttctcattctttataaatgatattaacactcttccccaccccattggttcttttactctacccatctctcagttgccacaacactctgagtcttttgtttcgaaacttctgtaaatggatgttatttttctctggtcacctgtttggttgtagatatggatgattgtttatgtaaatgtacacacataccagttaaagttcaaaagtaggctgttcacatgcattagctaatctcagcatt

SEQ ID NO: 75735 - DNA, 1046 bp, Homo sapiens
tataaaataaatggcaatatatgttcaaatggctgctgtcagaggtccaacctctgatatcccacagtggaaatcagtcaactcatgtcagcaaccaccattcagacctccactgtgaaagcccccatccatgttttatgtatgcctcaccactttagagtttgtgcttcataaaggaagagactccccctgttctgatatcccacctgagcaatatagcacctacttcatcaaggggctcaaacatttttgtgtgtgaactggctgttgtcagcttgttcatcacagtagccagcatcgcgcttctctgatgttgaagatcttctagcagaacataaagacctggtaaattttccccttgcacactgactggggtgtgtgtgtgtagggggtggaactttaatctgggcctggttttctttagatttctaagattttgatatacatgacgtcatgatcactagaattccttgataaaaagatcactcaggatggcttgaagtatgtgaacttgaatgttttagaaatccagttgtagactggctattgctattttgttcataccagaacttttataagttagcatataaaaccatggagcaagctagaacactatatatggcgtctgaagaatgttatgtttttgcccaaagaactcttttctaatagaatatttccaaataagtaaacattgaaaacaactcctcagtgaagacagaaatggtaaaaaggacacttttgttacaagtttaaagatatgaaatagtaactgtaaaatatatataaatataagccaatacttgttttatttaaaaataaatgttgaaaatatttaaggtagatggtattactgagatatcagaagaatctaacaatataacaaaggcaagtaaagcaataaaaaaaccaattataagctgtttgggggcactgcataaacacagcatggtctaaatatgaagaaaacttaaaatctggaaaatgttaagtagttgattgggcgtagggaaaaatgtatttgactttgaagctaggaacactatcct

SEQ ID NO: 75736 - DNA, 1798 bp, Homo sapiens
gaaaggggttctaaagcaaagaatttggaataaaattgtattctcagtcatacactttgggttgcattaaagattccatactcagttgctgttttctcactgagaccctgaaaatatcttaacaatagcagcattatttgtgattgggaaaagcagctaagaggcactggctcccatttgctttctatattgaccatatggcaccagtaaatgatattaaactacttcaaagacaagttaaaagtacaagtttccctccccctgctgagtttgctattagttttatgtctagggtgctataccctacaatattttgtttttactactgtttagttaataaaaagtcataggaggtcatcatacatgttaagctcaaatgaggtagacaggaataaatggtttcaaaagctgaggagtattacaatttttactttagaaatgattaatagacatgttcagcagctgaagataaatataggctcactaaaatccatcagttatatttgactcagccgggtgcagcggcacatgcctatagtcccagctactcgtgaggcttaagaggaaggattgcccaggagtttttggctgtattttgctgtgatcatacctctgaatagccactaaactccaacctgggtaacatgtaagaccccatctattaaaaaaaaaaaaaactaataacatatgcattccagcctgggcaacatgtaagaccccatctcttaaaacaaaacaacaaaaaaaaactgccgggtgtggtggctgaaacctgtaatcccagcactttgggaggccaaggtgggcagatcacctgaggtcagaagttgagaccagcccggccaacatggcaaaatcctgactctactaaaaatacaaaaattagccaggcatggtggtttgtgcctgtaatcccagctacttgggaggttgaggctggagaatcgcttgaacccgagagacagaggttgcagtgagctgggatcatgccactgcactccagcctgggtgatggcgaaactccatctccaaaagaaagaaagaaataaaaataaatgagcaaacaaaacttacgtttgactcaatctgggctttggtctttctcaagttatttatatttgattgtggaattctcatgaaacattgacttcttaaaaccatctttttcctagtttactaaagcagtgaagcactttggggaagaggctggcaaaatacaaccagatgagttctttggcatttttgatcaatttcttcaagctgtgtcagaagccaaacaagaaaacgaaaatatgagaaagaaaaaggaggaagaagaacgtcgagctcgcatggaagctcaggtgagaggatgattaattgaccaattccacctcctagaagttctatgactgcagcccagtcaaaggtatttagagagcactctgacctggcaggaaggaaggcttcaatgtactctctagaatgctgtgggactttacattggtgttgtttctcttgggctatttaacagtgtatattcaaagccttaaaaaaaaaatctatccacatcctttgctctggaattccatttcttagcaattattttaaagaaataatcataaatttacacaaaaaagggcagcattctttataatagcaccaagctaaagacaacctaaatgtttaccaaaaggggatgagttctaaatgatataacagccatataatggaatatttatgcagtccttgaaagacatgtattcaaagaataatgatacagaaaaagatttctacatgaaatctttttctgttttgt

SEQ ID NO: 75737 - DNA, 1620 bp, Homo sapiens
gtccattgctcctgcaatggagaccccatgttccaattccccctttcttgtgatatccaaagggggttataggatgagcatagcttggtgtctggagcattaccatatttcaaggaattgacctctactgcaaacaaaatgcaacattttgacatgtctcaaagaggttatttctttctatttgcagctcaaagaacaacgtgaaagggaacgtaaaatgagaaaagctaaagagaatagtgaagaaagcggagagtttgatgaccttgtttcagctttacgctcaggagaagtgtttgacaaagacctttctaaattgaaacggaatcgcaaacgtattaccaaccagatgactgacagcagcagagagagaccaatcacaaaacttaatttctaattttccatgaatacttttttttagaaagctcattagcagccctctaaagtgactagaacgtttcattacactgccttgcaatccaaacagtggcaattttttccttcatctgtgagtgaatgtgtgaacgtgtgtatgtaaatgtatgtgtgtatatattaaaaaatgtatatagatgtctgagtgttgtctggagacctatacgtatggttaaaaagatttatgttaatgtatgtgctccaaaacctttcgtgtatgcattcacattgagtgtggctcattttctttccccgaacgccatgactgttcagaagcacaatactatctcctgaaagagataagagacattccctagattcaaaggcaaaacagaagaaacaaacaaacaaacaaaaaaagcttgcaaaatattttatggtttccaagcttgatatcctttaaaattattttcattgatggaactggagttgttggaaaaacatagatttaaaatgatttttgatagctgacattgtgatgttgatgtatcacatcagtaataggaccagctttgaatttctgacattggtgtggggatacagtctgtaaatgtttattgagaacatcttgcacacaatttgaattatgtagaatgtcaatcaagtttttgtatatttaaaagttggacatcaattttttcccctgatttcatcaagttatctctgccaagtgctcttgataatttcttcagatttttggaaaaaaacactatataaatgcaatccatgctttttttaaagaacaacattgccagagtatgcttgttctaacaatatagatatataaaccttaaaaataataaaatatctcacccaagacttaaaggaagaattctctgaagggataaagattactaaaaaaaaaaaaaaaaaaaaaaaattaatggggtgcctttttgttatagtttctattttctgttttgtaggacaagctgcattttctgtaaatataggtctggactaaaggatacataaagaatgcacaaaatgtcaacatcagcagagatgcccagatctatttatctctaagtatatttgaagtgattgctgtttatatgttgtcattttaaaattgtgtgtcagtaaagctacctgtaaaatttcagtccaaaaaaataaagctctcagggagacatgaataaaatcaatgaacattagaaaataaaatatagatgcttaccatta

SEQ ID NO: 75738 - DNA, 2154 bp, Homo sapiens
taacaaatatttattaagttcctactatgtaccaggcatagtagggctacaatggtaagcaagacagagtccctgcccccaaagagcttatattctaatggggatattaagggatgaatagaataccaatgtgtgcactgtacaggaatcatactatttaaaaataatttgtataaactataatgcttagcacagatggcgagttatctgtgctatgtgaaagctgtgaaatagtgctctaagagttgtcaagagctgtggttttacatcttttcctcattgcaaatttagtgactttctacacactatatggaaataaatgactagcaaataaaacagtcataaatacaaagcagaggttgcactcccccaatcccgagttaacccaggtctgcaataacaccatgttaaaggtgcagatagagacttggctcaaaaaggcttggagatgaggaagattggaatataatgatggttttgtctgttccttaactaaagtgcctctatgtatattcttttctatttgtagcaggataaatttggtctggctcagttttggaactgtattttgaaaatggctttgtcttacagtttaaggaatagacaggtggagggaaagtcacataaaggagcaagtttgtgtagctgtccctcttgccccttttaatcatcctcctttgatatggccatcctggtgggcctcctttgccatttccatttttggtttctttccctgaaaactgtgtgcaggtaattccatgtgccattgttgaaaagaaaaaaaaaaaacaaaaaaaaaacctactttttagattggtgctggtgtaagtagccacttttctctcttgggtgtgtattttaaactttttttgtttttttaaattaatgccaaaaagaaaatgcataatttgtaaacttaattatatgtcttatatcttattagcttagtagttggaaccacttagtctttaggtgcaagactgttgttagatagtactgagaaaaaaaaagtatgtgttatgagactgtacatgtttttttaaaaatagcaatatgcaataaagagatgaattcattgggtgtacatatatgctttctatgaattattaaaacagtgtcatcaaactgctttgcagtttccaccattgaatttcaattttgcaaattgttcactgaatcggaaatatatacctgtttttaaacttgtacttactggacctagaagaatatagttttctattatggcagcattcagtatgttcaggttatcatatgccacctctttctatacttggtttatgtatgagttatacaatttcttgttataactcatgtatggtagggctactggtgaaattattcaactagagtagagaaaataatctctagtctctagaatcaaagcctttttgttttgaggcatgtttttcttattaaaaattaacttgatatgggtcagtatgggaaatggcacccatacagatcaagaaatttgtttatcagtatcctctgaaagttgaagctttccctttgtcctacatcacatttgctgcctagccacccttagctcaatttaagttcacgttggaaacaaactgccccagtgactgataaaatacccaagcagtccaaacactaattcttatcatctttggaatgaactcatgatgttcttgtaatagctgaccatcttgttttttatcacctcactgcatggcttcatagtaacaacgttctgtggagctgacactcagataggagagacccttctgcatgttagacaaatgttatattcccacccacaaactcagccactgcctatttgtatatttgggtatggaattatgtacagaaccacctagatcctcagttgaccttggtgtattaatagaaaggggggagaatgtgaaattttcagatcatatgcttcattgtcttcagtttccccaaaacaatgatcactgaaggaaatgtgcttctgacagaggggtgaagttatgtgatccatccagaactttgccccttttctataacctaatgtgcattttttttgttagtcaagggataacctttattaaaatactgtgctttcgacacaattacagtcatgtgtcatttaacaaggacacattctgagaaattgtgccaaaagct

SEQ ID NO: 75739 - DNA, 1233 bp, Homo sapiens
atgagaacctagttgtcttctgttaagccagacatgaaacaggtttgcaaaaatatcaaacaatgccacttttctcataattttttttgttttggcaaacagttattttcacaaaaatgtgttattcatatgttaatgtataatgggttatttttaaaatgaagtaatgaacagatatatccaattcctaatacagtaaatattgatagatataacttatataaagaaaaactctttggggtcctcaaatcttaaggtataaaagggtcctaagaccaaaaggtttgagaaccattaggatttggggtttttttttgtttttttgttttattttataatagtgttttatttgatataataggatgtgaaagccctgaaaagttgtggaacatcaaatttttgtaatggaataaaattttaaatgtgctaacagctaagtaatgaatcttatctcagtagtaaatgaaatctactacagaatgatctacattcagtaaattattctactcataaagagtcctttaacatagcaaacaatctatcctaatatagctgtttttaagatttggtgtttctgaatattagagtttccttaaggatctctacatcatatagtgatctgaaacatgtgaaaccatttatgttgtatgcaaaaatttggaacatactgtcttcaaaatctgaaatggaacataaaaataacaacatacatttattggatacttcactgtgcatcagtttccaagctaagcacttgatacatgccatctcatttaatcctcacaagaatcctacaaggtcagtactgtgctgttattatcgtttttcaatagatgataaaacggagaattggagaagttaggtaatttaccagaggttagttagtgagtagcagatccaggtcatgaaggtgggtctctgaacagaccacatgctgttaagcattatattatattgctgtcagacaaagcaaaaggtcaatgaggctttatattataggagctgttatgagaagaatctgggattgcaatgtccccccaaatagagagggagccgagagaccaaagaatgactcagacaagtccaggttggcaagtagatgcatttattagaacttccatataaggcactcctgggaagcagctgaacaactgtggagacccatcctgcctcctgactctaagctgcttttaagctaattttctggctctttgcctactgtgtatgtgtgat

SEQ ID NO: 75740 - DNA, 1062 bp, Homo sapiens
ggcgcatgtagcgccgcttggccagcagggtgggcccagacacctccggacaccccgccagcacgatacgcaagggctcgccgcccgtgtgcatgtccaccaccgacagcaccggcgtccctggatcatgcgggggcagccggggcaccgccagcgcgctctccatggtctgcgtcgggggagacgagtacggtcccgcagctatggcttcaagcccgaccctcacccactgactccgcgggaggagggcgggacgctaaccagccacgtccggggggcggggtctcggagcctaaacccggaagcgagggaggaacttcggagctgtcgcccgggttaccgggaggcggagccgccgagctcgctgtggcccggatgttcggtgcagctgccagatccgctgatctagtgcttctcgaaaaaaaccttcaggcggcccatgggtgagtggtcgccaagatcccgggaagcgtttctggtagtcccgactactttcctacacggctggcctcgggctcggctctttgtaggcggccttcggttggcggcgcaggctcgccccttgaccccgcccgccctcgggccgggctccgcactcctgcggggttggggtggtctgtccgcaacgggctactaggggaggcgcgctgtctgcggcgaaatgccaggtctttgttgtttggtccgaaatgtctcttcagtcccttagtttaatgtcgagggaacacttgcttgagggttgacttcggaattgaaaacgcgggtgatagtgcagaaaaaacagtaaagcagaagcaagttgctgcataatttgtctactgcttcaacctcaaacgtagatttatagcgcccgtcacaaagggcaggaccgctgcaaaaaaatggaatcttaaaactttagccatcgttcgctaaaggaaatgaaaggagaaattcaacagtcgcttggagcctgggttttgcttagtaagtgataggctgtttatttcagttcagtttatcatactggttttcaggccttggattttgagaaactttagattattgatattcacgtgtatt

SEQ ID NO: 75741 - DNA, 2084 bp, Homo sapiens
gttctgttatgaacataggtgataatgataattgtgtgtctacatgtgggtgcttaatgtcctgactgggcaaaatacaaggtggtgaccctctactggtgctctaatttaaaaatatatgtatatttgaactttataatcagttaaactcagaagtatcctctaatcataccgggttaggctttgagtcctggagatagatcctgctctgctggttgaggaccttaatcataaggcacggtattaacagcaaggttccaggataactgtctgcagtgtcacagtgtaaaaggagaaatgtaaatttaaaaatgcttcaagacttttgtctaatacatattattcaaaaatttgaaactgttatttttgccaaatgcttcagctattattgcaattattttttataatcacaaaagatgttactatactggcatttgtttttaaaaagctgtcgatattcaaccagcatgccttggactttattgtgggaagaccctattatttaaaaatggctcaactgaaatatatggagaatgtggggtaagtcttatgtttgtatcttatttcattttgtaaaatctatttgcttttgaaatattttcacatacaacattttttgttattatactcattaatttataaaagaatatggaggaccaggcgcagtggctcatgcctgtaatcccagcactttgggaagcctaggtgggtagatcacttgaggtcaggagttcgagaccagcctgaccaatatggtgaaaccccatctctgctaaaaatagaaaaaaattagctgggcatagttgtgtgcgcctgtagtcccagctactcgggaggctgagacaggagaattgcttgaacctaggaggtggaggttgcagtgagccaagattgcaccactgcattccagcgtgggcaacagagggagactctgtctcaaaaaaaaaataaaataaggaaatataaaagaatatggaggcattaatatagtcattgttcatgttggcattttgatgtctatattattttttaaaacatttaataattttataataatttctaatttatgatttggtaccgtgtcttgtacagtaagttgaacatcatgaatccagaacatttatctgcagttattcttatataatgttaataactaggtttttcattgaatgttagtcaactattttagtaacttagtaaaaggaatcttctaagagcattgtacaaatatagcacatacaatatagatttctttttattttacttatgccctcttttttatttctaaaagctgcacatgtaaacttaaatatttaaactgaaatgggatgtcttatagaatgatttgggggggtgttaatgttgtaaaataatatctgtacacaaaatattggttttatatattataggtatgcccaagaggacagagaacgaatgcacagaaatattgtcagccttgcacagaatctcctgaactttatgattggctctatcttggatttatggcaatgcttcctctggttttacattggttcttcattgaatggtactcggggaaaaagaggttagcacatttctatgaacatatctggctggactaatgttggaataattatcactcagaagaccttattaagtaattatgcttcttctgttttaaaagtggtaaacatgtttttctttatcttcagattattcttaactgtgacaagaaaacttaacaatagggcatgacttagtaatttttaagggaactgtccttagtctgttttactctcagtgatcttgaaggaatacttttacttctcaactataatccttattggttttctacacaaaattggttatgattacaagctatttattgttatggaacacattctttgtaatttaatttaatactaataatctagtatgatgtagttaaaaatgatatagctgtaacctaatacaaaaactcatattaacatattaaatcagcacacatttactaagcactgcattttatgtttggaagatcagggaaggagatataaaaataactgacatggcttatagtcataatcttgtggagaaaacaagtg

SEQ ID NO: 75742 - DNA, 1036 bp, Homo sapiens
gtaaaagcagtttggtacatggttgcctctaagggagagacagaggtatggatggggaggaacaaagatgtagttacaaattgttgacagtgttctagttattgggtaggagatgagcttataatattataattactatactttctaacaaacacgttacataccatcttttatgtgcatattaagattaaaatgatacacagataactaagaaatttttagcaacaatttggcaagatactaaagatgcagggtagatataatttctgcttttctgttacacatttagataatactgctacagtgttatttatcccttttgagaaaaaaaggttatactcgagtagtttttgacttttcttatagatttagaaatctgtatcttgacacatgtacatgttttattaaagccatttaaatattgcaatttttctagtaatcatgcctcttttccttctctagttccagcgcacttttccaacacatcactgcattatttgaatgcagcatggcagctattatcaccttacttgtgagtgatccagttggtgttctttatattcgttcatgtcgagtattgatgctttctgactggtacacgatgctttacaacccaagtccagattacgttaccacagtacactgtactcatgaagccgtctacccactgtaagtgtttatttcgacttaagatcattgtttttttttaaatctctgaggattattatagattttatggcgtttggagacaaaaacaggtgtgggtttgagttctgggtctgccagcggctttattaccttgaacatgtaaacagcctcttgtaacttcagttttctctttggtaaaatgggaataatgatccttataaggtgtcgtgaggattaaattaatccacacattctagataccatataacttacatataggaggcactttatagtaaatggcattattacagtgtttggattagtgttttttctttttttctccccaaataagtgtaatttctgttagaatgttttgttttcaaaatat

SEQ ID NO: 75743 - DNA, 1050 bp, Homo sapiens
actggtactattctagaatgcagaggagagaagttaattatttacattcactggatgccttaataaggcaaggttcttcaaagctggcccaaggatagtttttacaattttttatggttaaaaaatcaaaagacttatatttctagatgtgagtatgaaacgtatgttttattgtccataaagtttttattggaacacagccgtgcccattcatgtatgtattctctatggctgctttcccactacaactgcagagctgggtaatcgagacagagaaatgcagggctgaaactatttactatcttgccctttccagaaaaagcttgctggccactgcctcagaaccttaggttgtaagtctcacagaactggttgagaaaggatttgactctaaggaaaattactatttgaatttatttgatggtttattgagaaaatttgtttcatttccaacataataccaatgcttatctttcagattacgccttcccatacattatattagtgttatctttggttactctggctgtgtacatgtctgcttctgaaatagaggtaggaagtctttttttcctttgttaaagactttttgataaatttgacaattcaatatcagaatagtccatatgatatgatatagtacaactaattgttttagtaatctttggctgattgatgccacttggtagcttttggcttgttaactttatgaaaagttgtgtactggactatatatttccctgggaaattagcaaaatagtgaagtagtcaggcccaactatccagcatgaaggagaaatgtcatttcacataattttcccatgtagcaaacatataattattgaaatgttgaaacttattaacagtattttgagaaaaaccataaaaatgttttatatttagaactaattttaaactttattttacaatggcaacattaatagtcatcagtaattgtgcattccatatccttctgtgttttatcacaaattttattttcctgattatggatgtttacttttaccccataatgtttgggggatttggagc

SEQ ID NO: 75744 - DNA, 1050 bp, Homo sapiens
attaaggattaaaagaaaatcagagtgttcatgtgtcatttctgcccccttactattcatgcagcaggctccaggaatgttagaggttaaggaggttgggtttctgtacctcctatttcccacctgtagatccatagcaacagtggatcagggcaggaagcaagcacataaagtggagtttcccttctagttcgtatctttgagaagaaactatagtgtttccaggagtgaatgatggcatagactaggacttaagagacatgatgacgtagctttcgtctgggtgcctctactgagtgcttatatgaccttaggagcctcactttcctcatctataaagtggagtggctagactgagtgatttcttaagtcttttttagctcaaacattttatgattctgagattataaataatacattttatattaagttatattaaattacccagctgacttagcctgataatctgtatttctcttttctttcttttacaaaattatatagaactgctatgatcttctggtcagaaagaaaagacttattgttctcttcagccactggttacttcatgcctatggaataatctccatttccagagtggataaacttgagcaagatttgccccttttggctttggtacctacaccagcccttttttacttgttcactgcaaaatttaccgaaccttcaaggatactctcagaaggagccaatggacactgagtgtagacatgtgaaatgccaaaaacctgagaagtgctcctaataaaaaagtaaatcaatcttaacagtgtatgagaactattctatcatatatgggaacaagattgtcagtatatcttaatgtttgggtttgtctttgttttgtttatggttagacttacagacttggaaaatgcaaaactctgtaatactctgttacacagggtaatattatctgctacactggaaggccgctaggaagcccttgcttctctcaacagttcagctgttctttagggcaaaatcatgtttctgtgtacctagcaatgtgttcccattttattaaga

SEQ ID NO: 75745 - DNA, 1050 bp, Homo sapiens
tgggaggctgaggtggacctcatgaggccaggagttcacgaccaccctgaccaacatggtgaaaccccatctctactaaaaatacaaaaattggccaggcatggtggcgcacacctgtaatcccagctactcaggaggctgaggcaggagaatcgcttgaacccaggaggtggaggttgcagtgagcagagattgtaccattgcactccagcctggacaacagagtgagactccatctcaaaaaaagaaagaaagaaagcaaaaaagaaagagacagagagagagagaaagaaagaaaaggaaaggaaaggaagggaaggggaggggagaggaggggaggggaggggagggaagggaaaagaaaagaaaattgggaataagagacatatgtattgtaagtctgggtaaaagtgataagaggccaagaaaacctacttaagttgactaaatgaaaacctgacaagaaagtggaaaatcatctgaggagtgggtaccaggccaattacccatgtattattattataacattcttacatttttaaaaatccaccctccttggcaataatcactattcacttctgaatatttttttattctacatttgaacatattggggttccatatgaatgtcccattttgacacaggcgattttaattcctatccccatatttgtctttgctaaccagtagacaatttttgttcccattgtagtcctttctgtaacttttggtcctggccttctgattcccatgtctcttctttcatcatctagaagatacaaattctggaagttgttcctgcttaaagacctgggcggattccttagataatgaccctctactcaccaaatgcaatacaagactcaaaacccaaaaagatgattctgggccaggcacagcactttgggaggccaaggcagaaggatctcctaagcccaggagtttgagattagcctgggcaacatagtgagaccctgtgtgtttttggttttgtttaaaaaaaaaaaaagattctggatatataaactttggaccttgggcacagggttg

SEQ ID NO: 75746 - DNA, 1155 bp, Homo sapiens
cacagaatgtaagcaaacaaaccatgttgaacaaaatggtttagtccacatgtcagctccaggggctctctctctctttttttttttttttaagacagagtctaaccctgtcacccaggctggagtgcagtggagtgaagtggtacttcacagagtcctctatattttcaagtttgtttcaaagtcacataattcaggccactgtatggatggtgtagcccacagagctacacccatcgcgatatggtcaatggagattcaatagtcttttcttatatgtgaatttgtgaattatcctcaagggtggaaaagattcttccaaaccaaagtggaatgacagtaagtgcccttggcacagccatctgtctgctcacttgtgtttaggaatccagatgccaggtgagaacccacagcaaccacagcttggtggagtgagccacagcggctcatgtggcggcactgcgggagctcagctgggtgtgtttggtgtctcctgcagctattgacctgttgtattggcgggacatcaagcagacgggcatcgtgtttgggagtttcctgctgctgctcttctccctgacccagttcagcgtggtgagcgtcgtggcctacctggccctggccgcactctcagccaccatcagtttccgcatctacaagtctgttttacaagcagtgcagaaaaccgacgaaggccaccctttcaagtgagtgcctcagctgaggagccctcacccactgaccaggggcttttaccctcacctgtatttcagctcacagatgcacttgagtcatgtttctctgagacccaacagacctcttagagtctcccctaacaccctgtctttgaatatctaacatttctggtgaatttctgaaacaaactcgattattcttattccaatacttattgctttgttgagttttcatatgtatttactattaacagtaatcataatccaacaattacttaatcctctcagcaatatcagaaaggcacagcaggcatttttgtccctatttacaggtgggaacactgaggttctgagaagtgacatgacatgctcaaggccaggtggccagtaaatagcacgaaaccaggactagggtatttgggtctttatttccatgctttctctagaagtttaacaccaa

SEQ ID NO: 75747 - DNA, 1010 bp, Homo sapiens
gacagcttggaaagaatgggaatgttctagtcctagtggttagacctagcaaacaggaatcacattcatttctaaccaaggaaaatgttaagccctccataaggataaagtagtttttgccttcagtccagcccgaggaggagtcattcgggaatagtataattccttttgtctctcgtggaagaaaagcagcagaaattgctgttggctgtggctttgacactgaaatccttcattttcctttgttccaccaaagctcatttaaagtggtggattaaatgctatgctcttttactatctatagaaagcaccaggcttaatgtgtctttcctttcaaaacatccacagaattatttaagagtctagaaatagtgttggcatttttctcttgacagtcatataggttgtagttaggaggtgtgagggaagggctggaaaatgaaatcaaaggtgtcttatcagcagaagtccgtgccagcagttttccctctgggctcagggctcctagattaccatgtgaaccttcaactgatgtgggatactatcttggtaaatgaaactcatgactagaagatgtcatctttgaaggtctctatgtttacatctacttctgttttctttctccagtttaatgtcaaacgagggaagattaaagtaggaaaaattacttctattttttcttgttaacattttgtggtgatattttgtttccttcatgaaaatcagtcagaaaaaaactggctcttaatcacctctttggacactgggttggaaacaactgaggtttgtctagccttcttactctgtccacaaagtagtcaattattgtagttaaatcattggaagcttgctaaaaagtaaataaatttcaacagcatatcatttttcaacagtccttttgttgaaatgctgatattatcaatgaacaggaacttgtcacattttctcacttggcatttacttatttatttatttagagatggagtgttgctccgttgcccaggctggag

SEQ ID NO: 75748 - DNA, 1020 bp, Homo sapiens
catctcagcactcactgcctatcttactaacactaagttagagaaagtgaactctcatctacctcatctgagatattttcacagacattctaacctttacaaatacaacaaaatttagcagcaaggccatgatcttgaccaatttataccatggttgtcactgtcatcaccaccatcatcaattcatcattctaaattctccgtaaatattagctacgtgccaggtgctgtcctaagttcttgttacatacctgctttaattaagcctccgtgagactttttttattactctcatgttataaaggaggtaactaagggatttaagaatgagaggggcagcagtttgccccaggacgtaactgggttctgaacacagaacattatgatcatgaagcctattcttttaacacttcgactgtactacccaaatccgaatggtgttgtactaggggaacaaagtttgattagaaccatgcatccacatgattctgtttgttctctaaagatcattttttctccccagatctcactgtactcaacaaattcacctggcaggatgcttagtagtatggttgattgatacatgtgtgcctggggctagaggtcacctcccactttactctgcgtggcagcattttgtagttacagattgccagaatgtaagttattgatggaagatgaaacactttccagagagcataacctaaaggcaatctttttttataaaatattttgaaacttttatgctggtctacagtgttcgtggaaacacttcaggatagtctgttctgaaaggagctagtctgaaacattaaagagctaagcattccagaatacaccgaggaaataatctgttttagccacagtaattgaaaaaaagcatgcctttgggaatagtatttgggaaagacattttacacatatacataaaggcagactaatatcaccttttatgaaaatcagcattttatttagacccattattattaaagtattatacaaatattacaatgtaaatat

SEQ ID NO: 75749 - DNA, 1044 bp, Homo sapiens
attctgagagatgtataggacaggaggaccaggaaagggacagcaataaattcaggttgccagggagttccagagaggaatcatggcccgagctaaggagttgtactgtgatcagaggctgagacagaggacaggctggcctagagggagggctaagaagcaatccaagtgaccatgtaaagctgccaattctagattgtcgattctgttccattaacctgtatgtatatgtgcccctgacaagagtccctggccaagatggcaagtgaagcttgactccggctcactctgttcaccaagccttgtgttgagatgcagcactgcagccacctggaggaggaatcttattccaatttttttcttccatatttctttttaattaacatacaatttatataccataaaacatacccttttaaaagttcagtagtttttagcatattcacaaagttatgcagttatgtgatttcaaaacattttcattaccccccaaagaaaccctgtaaccattagcagtcatttctcattccccccacctcccagctcctagtctgctttccatctttataaacttgccttgtcttgacatttcatataagtggaatcatacaacatgcaacctgtatatccagcttctttctcctagcataatgttttcaaggttcattcattcaaaatacttccttcctttttatggctgaaaaatattccattgtatggatatactccatttttttgtccattcattaactgatggatattttagttgttttcaatttgtgactgtcatgaacaatgcttctgtgaatgttcgtatccaagtttttgtgtgggtcttgaagattatgcctttgttttctttgaagaattttctagttttatgtcttatatttggtctttcatctattttgagttaatttttgtgtatggtgtaaggcagaggtccaaatttgttcttgttcatatccagtcgtcccaggactgttgttgaaaatacactgctgttgaaaatacagaaaattctctcccccactgaatggtctt

SEQ ID NO: 75750 - DNA, 1029 bp, Homo sapiens
aaaaaagaaagaaagagggagaggagaggagaggaggaaagaaaaaggaacgaaggaaggaaggaagggagggagggagggaaataaaattaaaaaggaaggtgttcagccctatggttattttttatgggaagctaactttgaacaatgagaaaatttaggaatatttgaagtagtatttgggggtgaggttcagttatgttcttcccgtgataaacatggaattgcctctttagagtagatagacaaatccctcttacataaaatgcttcagatgactgccatttctcttaaaaagctctcccatttttgttatatgctttcaattatctgaactgggaagtaagctttggtgtacttctaattcagggcaattttttgtctgcctggacccccataggcaggcggactggcaccacaaggcagggggcaagattctccttataaggaggtttcttgtaacaacttgtttgtttggtgcattgtgcttcatctattttatccaccattgacgtgctttctaaagtagttgtgcatccgctcactctagaaatccatacaatgtatttcacaagtactaagaactgtcatccataaaatagaatatattttaattatcctttaaagaagacaaggtaaggttgtcccttcaaatacctaactctcatctgtgatttgaaatgagtattcatagctccattttttgagacattttaaatagattattatgcaaagatgcataccttgagcaaacaaaatagtattatgaactttcatatatagataaacaaaatttaacaattattatcattttgtcatatttgttttgtctacttttgggaaaagcattttaaaattaagtcacagccaccaagacatttcacccctacaagcttcagtgtacatctctaaaaataggacattttcttatataactagttaggctcattattacatctaacaaaacaaatacttaacatcatctaatgcctagttcatatgcagattctcccaagaatcctccaaatg

SEQ ID NO: 75751 - DNA, 1058 bp, Homo sapiens
gggttggatggagctactactgacaatgtttgaaagttggggtcagaattttgtatatatgagttggggatttgggctgaggctttgctgaacatgatttttgatagtagcacaatagtgagtatatattggtataacaactcttaaaagagtctaaaggaataaaggaaaaagaatgtgtatctgggtagctttttgttctcatcactctgtgtgtgtgtgtgtgtgtgtgtgtgtgtgtgtgtggtgtgtgcctgtaattgacaaggtaatagaatttttatgaattctctgataaaattctctctggcgtagagaatgaaacacacacatacacatacttacacacagtaattagtcttttactagatttctatgattacaaattggatatttttgttgccattgctcttgttttgattttactttggaatggagtctggtgcttctgtacttaagaaaaaaaggttgcatttagaattcatccccaccttttattctaaggacagctaaaagtaaaggtggagaccatagttcacatgtcctgagtcacctgcctgtgcctaggatagaactctgcttctgtcccgggatgaataccactgggtaatcagtttctagaaaaaagtgttagttttgtctggaacaaagtaaaattctacatattgaattcaaaatgtgtacttgatgttaattagtaaaagcagctatgtgaatgccaggtcactgtttctctgtagaatatgatgtatgttcttcagattttgctagtttcagtaatttgttcataaggttgttatggtttgaccttggggcccgagtatattaattgctcaaaacaatatttttagagcctttaaaaaatatcaggctaagtttgtcacatgatttcagggaagttttcattgttgtattaccttgctattggcacatgaagtaatatagatcatttcaactcagcatgacacaatgaaaaacaagtttttttgttcattctgagggccgcaaacacaaaaaattgctttttaataattcccttcactaagaaaaatatttac

SEQ ID NO: 75752 - DNA, 1063 bp, Homo sapiens
tattatcttttgtaaagtgagaaaccattgcggttcaattcaacttagtagacttatgttaaatgcctcctttgtgtaaggatctgtgctaaacacaggtcagtcatgacttcctaaaacatgtgcacctttctgattcacagtatttaatttagccaaatagttccttttgtgttatttttcattttcttcattcccaagttattgctggaagcttgactagaagggaattataataatctaaccccatgggcacaagggtatgagttagttttctgagatcaacacaggataagtaaatatgagcacagcttgctcagactgtgaaagacaaaatctgtctttttgtctagctgtgaaaaacaaaatctttctctccctttatttctatcatctatctcattctctacatcttcaaagaaataactggctaaatgttacatcaagatctttggattagttagttgtgattttattcaacaattagattatttcagtggtgactaagggagttttgaaaacgatgctggaaaatttagagggcagtgaaaataaaagacatttcaagagacaaacgtatctacataggaatgctctaggctaaagtcattgtaaagaacatggtccaaaaatgaaagacaaccagttttgtttggttaaataatatttgagggcaaagagaacagtgagaagagtgtgagccagagaggcccactgtttgtggaagatgctgtagtgatagggtatgagaaaagggagggaagggcttctcaattcttatttgagctccctaatttaaaatggacagtgattcttaagttggaaaattgaaacatacagaaagagatactgggatcccaggataagtaaacagaaggtaaaatcttgtattactactttgatgagatcagttcttcacatccaactactttacatctcatggaattgaatgagtgtgctgagcagctttaaattcattcccagtatctttggagaataagactagggctagaaaagctgaaattgataagtgattttcaaaaaggggaaaatggtggattct

SEQ ID NO: 75753 - DNA, 1076 bp, Homo sapiens
aaacataaatatgccatacatcaggtaatttttcagaaaattattataaacttgaaatatttcataattattaaatataatttgaaggattatgaaaacattttagtcttaatttaaagagtcccacaaaattgtgtgtgcattaggattataaagtgcttacattgttataatcataaccatatgatcataatcatttctatatgattataatcataaccatatagaaatatgatatgtgatatatatgattacaattataaccatatataaatagatatagggttgatcaaaatttaaagagaacatgcaaaattgaaaatagttgtatttaaatggaaaacatggaatatatttttttcttttaaaacagttcattttgctggatattgattttgcaataaaatatgatatttaaaagaaaatatacttagaaacctacttcattggaaggattaatagcaaaacataaactaacattattcagtctccttttcttttacagaaaattgaaggtcttcaagaatgtagaaatttggaaaaactatatttatattttaataaaatttccaaaatagaaaatttagagaaattaatcaaattgaaggttctttggctgaaccacaatacaattaaaaatattgaggtaagataataatttcaattatctatatgtaaagccagttactactgtagagtttaaaccacaatgttcaagatcatattgtggttaaaggccaaactattcttgactagtacaattattgttgtcaaaaagaactaacatgtatatagcattttataaggtacagagggcattgtgtacattactttctttactctttacaaggctaagaggtagggcattgttattctttctttgaaggtttaaaaataaaaagaggtttagataagttacataacttgcctaagattataaatatactctgtgtgatgtattctttttcctcctactcctccttttttcctctctactccgcttcctgttccctcctccaataattctgagttccagtatagagaacaaaggtggcttcttggaggcactcatttcc

SEQ ID NO: 75754 - DNA, 1029 bp, Homo sapiens
cctatagtcccagctactcaggaggctaaggtgggaggatcactttgagcttgggaggtcaaggctgcagtgagctgtgatcacagtacactccagcttgggtgacagagtgataccctctctcaaaaaataaaataactgagcatattggttttgtttataaaaactagcaacttagtgtcaagtatgtgccagaaaggggtctgagaagtacagttataaatcctacccttgaaggaagtgaggagatgaaatagtaatgtgaggtttttcctcataggttttaaatgacattttcaaacagtgactttttttaatttttattttttagaaactgctgtgttacagaaaagcatgtgactttcagaataatcccgagtgaggatgagtccagatgtgcctctactgaatgattacaagcaggacttctttctgaagcgctttccacagactgttcttggaggccctcgattcaaattaggctattgtgcccctccttacatatatgttaatcaaattattctttttctaatgccatgggtttggggtggagtcggaacacttttataccagttaggcatcctgaaagactattatacagcagcactttcaggtggattaatgctttttactgcatttgtcatccagttcacaagtttatacgccaaaaacaaatcaacaacagtagaaagaatactaaccacggatatcttagcagaggaggatgagcatgaatttaccagttgtactggtgctgagactgtcaaatttctcattcctggcaagaaatatgtagccaatacagtttttcattctattcttgctggattagcgtgtggtcttggaacatggtatctgctcccaaatagaataaccttgctgtatggcagtacaggaggcactgctctactattcttctttggatggatgacactatgtatagcagaatattctttaattgtaaacacagctacagagactgcgactttccaaacacaggatacttatgaaattattcctcttatgaga

SEQ ID NO: 75755 - DNA, 1693 bp, Homo sapiens
taagatagcctggctaaaacctgtgtaaggagatggaactttcctgtggggggaaagaagaaattaaaatttatacatataaatattatatacagattgaatgaatttaagacaaatacaaaatttatttctaattttatgatagcaacaatagtagaagtaatattgattttttaaaaaccaacttgttacagaagaaaagtagaaaatagtttttttaacagacataattgttcacaaaattgtttgataaccccttttacttgccttttcaagtttgacttttctttctccgtctccgtagattgcagctttcttttcttaggttagtgtccaggtagaaatgttcagcatgttatggactgaatatttgtgtctctccagaattcatatattacagtcttaaaccccaatgtgatggtattttgagatgaggcctttgggaggtaattaggtcatgaaggtgggtccttggtatgatgggactagtccccttatgagaagaggtaccagagagcttgatttgtccctctctgtgccatctaaggacacagcaaaaatgtggccacctgcaagtcaaagaagagagctctcatcaaaacctgaccatactggcagcctgatcatggtctttcggccttcagaagtgtgagaaagtaaattgatgttgtttaagccactcagcttatggcatttttttatggcagcccatgctgattaagattttgctaccaagaagtgggatgcctttgtaccaaatacctaaaaatgtggaaatggctttgtaactgttggtaatgggtagaggctgaaagaggtttttttgtttgtttctttgttttgttttgtttgagatggagtcttcactctcttgcccaggctggagtgcagtggcacaatcttggcccactgcaacgtccgcctcctggcttcaagtgatactcctccctgagcctcctgagtagctggaattacagacatgcgccaccatgcccggctaatttttatatttttaatagagacagggtttcgccatgttggccaggctggtcccaaagtcctgacctcaagtgatccacccgcctcggcctcccaaagttctgggattacaggcttgagccatcacacccagccaagggttttgatgtgcatgctagaaatatggacattaagggtgattctgatgaagtctgaagtcccctgaacccagaggaaaggcagtccttgttacaaagcgtcaaagaacttagctgaactgtgtcctagtgttttgtggagccatgaagttggatacctacgtaaggagagttcaaagcagtgttgaaaggagcagttggcttctcctgtttctagtaaaatgtgaaaggagagagatggattgaagaagggattgttaagcaagagaaggaaccagaacttgaagatttggaaaattttcagcctggattatccatattgtaaaacatgagaaagcatattctgaagagaacaccaaaagtgtggggctggactgtccctcagtaaagagcttttggcattatgtgagtagaaacactgccagtttgaattgaagtggttggagacaggaagtaatgaaggccgacagttgaacttcttggatttgacaggatgtaatgatagaactgttcagctacaaaagtgcagtattcttcaagaaaaggggaaaattatg

SEQ ID NO: 75756 - DNA, 1053 bp, Homo sapiens
gatttgataattacaaagagttttttgtttttgtttatctgtaactaaaaagacaaagccagtccccacatctatttttaaagaagaaaatgactagtttatccagaaaaatcacctccagtttcacttttgattaagaaaataatagaattgagatcatctctagacaataggtgtgatactgctgccaaatgatgtatgaaatgcatggactcttcaaatttggacagttgtcagataaattgtttcttaattttatttcagaagatatgaaagggagcagaagaggcgaaccccgcagtgtagtaatattttccttccccattctttacctagtacagttgtataataatacttttaaatgacttcttctgtgcattttaatttttatcaaagacagacattaaatctacaatgcttagctcagacactcaggaattgtttgaatgaatgatacacatttatatcatcttagccactgtagaaaaaatcttttttcttggcatgtggatcttagtgagtgtgcaaaatttgaaacatttttatagctgttaggttccaaactaagttttcatcttaaaaactgagatttttttttaccttagaaaatttctattacattatcataagtattagaatttaaattatcagaagtattataatttaagtgtttttccatattaaagaattaaccacaataatgatccatttggagctaagtcctatatacaggagaataatcacaatgtttgattacttcaattatgttatccttgtatacgaatactttactttgccattgcttattgttaaaggaccaaaagagatttaggggtagaatctagttttgataaaagattttatgagcatacattatttttacacaaattatcctatccttgatagaggagtgttgtcttgggggaaaaaaaagtgtaccaatctacatgttttccttgaccttcctgcggcttactatttatgtgtggtttgattttcttgattttctgttacttgaatggtttctactcagaatgaaatgaattttatttt

SEQ ID NO: 75757 - DNA, 1072 bp, Homo sapiens
ctttccaaagttacttgaaattttaaattataaaattttaaaactctgaagaatcattggtagaatttcagccaatgtagtagtttagacatttaggggagaaatgtttttgctctggcctcagttgttcagttttacaaattcctgtattcaattttcttactactcagtgatggcttttaattacttcctcctcctttgcacatttgaattaacatattctctaaatgctaagcttgtacacaattgtataggggtagttgctgatgtagaaggacacttgtcacaatttgtatgtattgatcatttgtaagttgggactaagacttttctgtggtgtgtgtgtgtggtttttttttggaagggagtgtgttgttattctgtgttgctttgctttttcttaaaagatcctcttctatatatttcgtgtgatttaaatgttctttttttttatataggtttgtggtaaatatgccagctctagaacacatgaatcagattttacacatcttgtttgtatttttaccctttctgtgggcacttgggactctgcccccacccgatgcacttctcttatgggcaatggagcaggttttagagttcggccttggaggctcatctatgtcaacccacttacggtatttatttttaaatattgatgttatatgtaatattcttaaagaacatttttcttttcaagtaaatatttttttcttttttttttctgtacaggttattagtaatgttcatcatgtctgctggaacagctatagcatcatatttcattccaagcactgttggtgtggttcttttcatgactggatttggtttcttgctgagtctgaacttaagtgatatgggtcacaaaattggaaccaaatctaaggatttacccagtggtccggaaaaacatttttcatggaaggaatgccttttctacatcattatattagtcttggctcttttagaaactagcttgcttcatcactttgctggcttctcacagatttctaaaagcaattcccaggctattgtgggctatggtttgatgatattacttataatactgtgg

SEQ ID NO: 75758 - DNA, 1354 bp, Homo sapiens
ccctgactagtattagtaatatttcctgagaacttgttagaagtggaaattcttgggccctaccctgaacctactaagttagaaactctaggggtgggatcagcaacctgtatttcaaacagcgctccgagtgatgctgactcacctacagattgagaacctctgctctagtctaacccataccagaagacaaaaaatattgaggacattttgattacttaattttattctatttaaaaatgatatggtttaataatacctaataatgttgattgatcctttgtgctctgtgacatatgtggtttaaaaatatactttttggtgttactctttttttctgtctgtctttttttgacacaagctgggttaggccatgccatctattaacaattatattaatactttaaaatttacaaaacatgcaaccttcacaaccatatacactaggattattttcctttgaaacaggaaaaaggaatctcagagagggtaggtgacctgctcaagttcttgccagcacctggtggagctgtgactgaaaaacaagttctgaaggcactgacacctttgtaaaaatatataaataagcaatatttaaataagcagtagcaattataatagtaaatagtgacctgatacctccttttcaagtgattccttctaaggaggtaatcaaaaggtgtttaaaatttatgtaaggatatattgatgatattcactcagcatatatttgttgcatacccactgtgtaccagatactggtttaggcactactgacatagcagtaaccaaagtaatcaaagaagtaaatctgcattctgatgttataaatctggaacaggagactgataaattctggcacatccatacactgaataatgctattagtctcataaagtgggatggaaagcatataatactactgtatatactgtataattctaattttgctttttttctcctccaggattataatttaaaagtttttattgtgtggctcactcttaactatcattatagtcttttaaaattatattcatacctactaaatttgctcaatttctagtagaatttccataatattttaaaaaataatagtagcattatttttaatctctatccagaatcaaatgtgttaagtgccattaactttaagtcaggatgttgctcttgagttaaagaaattgtttttgtcattttccatatttttgtgatgagaatctatgggcatttacatgactagttgctgtatattatgtaataaatgattataaactcaagtactttttatttcttctttaggggttagaattgcaggaaacatcctgtcatactgcagaagctcgcagagttg

SEQ ID NO: 75759 - DNA, 1102 bp, Homo sapiens
cttactttatatacggtatttttaaaataactcaaaaatacatcaaagacctaaacataagagccataaaaaacttagaaggaaacataagggtaaatcttcatgaccttaaacttggcaatagattcttagatatgacaccaaaagcatgagaaacaaaagaaaaatagataaatatgacttcatcaaaagtaaaaacttctgttcctcaaaggacaccatcaaaaaagtaaaaagacaactcacagaatgggaaaaatatttgcccatatctgataagggactgttactagaatatataaaaaaaaaacttacaactctataataaaaagataaatagattttaatgtggacaaaggatctatatagacatttctttaaagaggatgtacaagttgccaataagtacatgagaagtgctccgtataattagtcatcagggaagtgcaaatcaaaactacaataaaataacacttcacacacacaggatggctaaaatcaaaaggtctgaaaataagtgttaacaagatgtggagaaattggaaccctcttctgctcttgggaatgtaaaatggtacagccactttggaaaacattctggcagtttctcaaatagttaagcatagagttgacatgtgacctagcagttctatccctaagtatgtatacctaagagaaataaaaacataaatccacatgaaaccttgtacatgaatgtttatagcaacattattcttaattgctgtaaggtggaaacaaaccaactgtacatcaattgctgaaaacaaattttattatatccatatgatggaatattattctgccataaaaaggaatacggtactgatacatgctacaacatagatgaaccttgaaaatatgctaagtgaaagaaatcggtcacaaaagaccacatattatgtgattcatttcaagtgaaatttacagaacaggccagtctataaagatagaaagtatgttagtggttgcttagggaatggtcagtgaggagataggatggtgataactaaagagtacaaggatgcttcttgaggttatgatgttttaaaacttaactgtggtgatggttgcacgtatctgt

SEQ ID NO: 75760 - DNA, 1032 bp, Homo sapiens
ctcctcctcctaccctttttactttaaagggaatttacactgggagagtgcttagccttcaagaattattgatccaagtgggaaagttaaatcctgaagctgttagaggtcagtgggccaatctttcatgggaattactttatgccacaaacgatgatgaagaacgttatagtatacaagctcatccactacttttaagaaatcttacggtacaagcagcagaacctcccctgggatatccgatttattcttcaaaacctctccacatacatttgtattagagctcattttgactgtaatgtcatcaaatgcaatgtttttattttttcatcctaaaaaagtaactgtgattcttgtaacttgaggacttctccacacccccattcagatgcctgagaacagctaagctccgtaaagttggttctcttagccatcttaatggttctaaaaaacagcaaaaacatctttatgtctaagataaaagaactatttggccaatatttgtgccctctggactttagtaggctttggtaaatgtgagaaaacttttgtagaattatcatataatgaattttgtaatgctttcttaaatgtgttataggtgaattgccatacaaagttaacagctatgtaatttttacatacttaagagataaacatatcagtgttctaagtagtgataatggatcctgttgaaggttaacataatgtgtatatatttgtttgaaatataatttatagtattttcaaatgtgctgatttattttgacatctaatatctgaatgtttttgtatcaagtagtttgttttcatagacttcaattcataaactttaaaaaacttttaataaaatattttccttccttttcaaatatccttctaatatatgtgaaaggagcggggttcatcccattcatcatgtgaatattcacaggaagagcaatgttagggtaatctgcatatgactactaaagcatatatctgactcattatgtatttctttcaactgaatttactgcttctgaaaaatga

SEQ ID NO: 75761 - DNA, 1996 bp, Homo sapiens
tgagcttcttactgattttaagcacaagtagttgttttgtgtgtagaagagcaactcatctttgtgagcctatcacaaaacaaaggtacctctgtacttctaaagaaattgctctaaaatatttgctcttttctagtttgtagtataatcttgatttctatcagaaatcaaattgtaaagttagactgcatattcaagttgccattctacttcctgtgaggccagccagctttttgtctgatataaccactagtcctcttcctgaccaccgagaggaactttcacagggccacccagaaatgagtttgttgccaagtcctgttgcagggtgggtgttagtgggagtagcaaggagcttgactgaactatggcatgacttccacacaaatttttgtctttatttagagaatggcaatttaaaagaaaaagatatacttgttttgccccttgacctgaccgacactggttcccatgaagcggctaccaaagctgttctccaggagtttggtagagtaagtagcatcttatattgatatagtcttgctttgaagtaactgcagaagagattcccatccgtggtgctgtcatacaaagggctttaggcaagtggggtccatgcagtgagatcgggcccatgagttgggccccttaatctctgagcctttgtcattatggaattagtacttttcatgtcttaacaagtacaaattcctccatgtagaacaaaagaagctaaaaattcacggctgcttttatttatttatttatgtattttgagacaaagtcttgctctgtcgcccaggctggagtgcagtggtgtgatatcggttcactgcaatctccgcctcccaggtttaagggattctcctgcctcagcctcctgagtagctgggattacaggcatgcaccatcacgcccagctaatttttatattttttagtagagatggggtttcaccatgttggtcaggctggtcttgaactcctgacctcatggtccaccctcctcagcctcccaaagtgcagggattacaggctactgtgcccagctggctgcttttatttattttaatgacaattattaactttcacaaaaagtcacctaaaacgggaatttaattccacaggtaaattcagggctttattttatctttttaattgctgacttctggaaatataccattgttccattgattctttaagttaacaaaataaccaaccatccataggaattccatcaatctatccacaagacatcccccaaacaccccttttctgattttatttaactagatcgacattctggtcaacaatggtggaatgtcccagcgttctctgtgcatggataccagcttggatgtctacagaaagctaatagagcttaactacttagggacggtgtccttgacaaaatgtgttctgcctcacatgatcgagaggaagcaaggaaagattgttactgtgaatagcatcctgggtatcatatctgtacctctttccattggatactgtgctagcaagcatgctctccgggtaaggctgctcaaactcaactctgatagaactgacttaaatgtgtatatgggggatatggccatcactgtgtgaggtccttggaactggaagtgatgtggggagacagagagacccaaggagacttttggtagaggacacccccagtagatgctaaaaaagacttgatccacacatgcctctaacttgttgaacaaataaatatgtatcaagcactgcattgtgccatgtactacaacagaccctggggatataaagataataagatgtggtctctgccctcaaaaagtgtatcatctatttaacatgttactcttcaccttatccttattcctactaaatcttcatggaaaattgggggtccacttctcctttcttctacatacacttcaggatgtactttttcctccccatttctgtgacttcttttccttgccccttgtagttggtgtttattttgcctg

SEQ ID NO: 75762 - DNA, 1045 bp, Homo sapiens
actttttcacagcatgatggttattttcttgtatatcttactaagcctataataaaagacagggctaaacccacaaatcagagcaaatttgataaaacattcatcttaagtttcataaatatgtgctattctaaattaagtttccaatacatttgcacattctcatagactaacataatacacaaacttatggaagtttcctgttatgctatgaatgttgcctacatctgacattagcttcataaatattcaatgaaaccacaaacaaaggtactatcacttttgaaatctgtccaacatataaagaaaggtcagcagcaattccataaaacagaagggcttcaattctgtattttcttttgctttttgtgtcagttgtttgaaaaacactagaagctgacatgaaattttctgtgtattgtctaagaaacttggttttctgattttagcttgagattttcttccgtaaccgcatctcctctgacagggagatcttgaagtgtatgttggggttccaacacttgattaataagctgtgtttttccctccaattccaaatgattttcagcatcaactgcatccatgtcaatatttgtcgtcttgggtaacaaacttttgggccttggatacaaaatccttgatgaatgtttgaggtgctgggagaggaagggatggggaggatgcctcaggctggacacttggacccaccgacaccagaagtttgatttcttctttgtcaaaccacaaggcaggattactgcccactgctactggttgatagcatttaaaagcttatcatatcagtataaaaaagatccctggaatgattagactttcccaaaaaaggagctgaagccttcagagataattagcttcctcatcctgtgagggaattagagatgggtcaagggcttgagaagagaattctcaaactggagtgggggttgaactatcactttcctttcaactcttaagaatctactttcaggggctcttaaagggaggccattatgtataccagattctgtggaatcgggaaacaaac

SEQ ID NO: 75763 - DNA, 1066 bp, Homo sapiens
cccctgggagggaggcggggagacttcctttgaaccgggcttagcctcgaaaaacctaattctgtagaaattgcttaaggttttacagggggcagggctgagagactccttcagaactcaagtcagtgagtgatgcctctagttcattcattattaaggcatcgaacaaatccattgaagtaaattccgatttcttatccttttaactacgtaaatcgggtaaaacttcttgatgttagagcttggttgaggtatggttctgttctgcttgtagattttaaataaacttggagccttttcttgaaagacagctggctgtggagagccttctaccaactgcagttttagatacgttttgaaaatttcatcacctgaggtatttttcttctctcctgaaacaccacatggtacaaatccacaaaagtcatgcttcagttgtccaagccatgggatctgtgtgctagccccacctccccgcaagtttcctgctcattggaataatgagctgaatgtgttttaagaagtggttggaagagtatgagagataggtatcattttctcaaaggaaatgattttgacattattgagagaaattagacattttaacaattgttttgtaaaacagtcttttcaaacttgcacgttggggttttaaacacaaccactttacatgtgttgcgctccgaaaagtggagggatttgttgaaacactactctgctgagacttagggttccagagcacttgggaatttagcatagcttggtccccaactctctttgaaacactttacttttatacttttatcttgctacatattgggccttttccaaagattgtatttctgtaactccttattttacaaatgagaaaattgaaaataaggagattctctattcttagatgctgcttttactgacttaatgctttctttaccaataaataatttgaagcacaaagtaacatttcctagtgttatagttttgttcttgttatgtgtaacttatatgtatctgattaaactttcagtcatgtaaggatgattacttttaacctggaagtttacag

SEQ ID NO: 75764 - DNA, 1422 bp, Homo sapiens
taccaggcttttcttttgctgaggcaggtcagagctagagaaagtaagcaattgagagaggcaagtttctgtatacctgtatctaaaatgtaatagactttataatttttgtaaggaactgaggaaaggtacaggcttttaatgtgtatcagtaaactagactcttatacagtttttataatattagagatgttttaagcttccttgagtaaatatgtgataaaggggggatcttgagtttttataattcttaatatgtttatttggaatccattgaccaagtgtatgtagtatccatatttaagatctggattaaaagtgattagtttctgtggctgatacgatttagaattaagatcttttgagactaaactacttctagatacagaagaacgtcatgaaagccgtactttcttggccatttatttgtgttaggctttaattttttgccataaccctctaaaatatgtgatgttatcttcattttataaataaggaaatacagggtcagagaacctaaataacgtgccaggatcagatctgggtagatataaaagtatttttcaagatattactgagtggatttttcccaattagatgaacctccttattaccaggaaccaaaatttcaaaagctaaacattaacacttacgattcatagattcctagagttaagcaagtccatgttagtttatgtaaagtcttccaatgcaagactaatgttttcttctaaaacattcagaaaagatttaagaaattaagttcattttctcattcccaaagtttcagaagttaacaaagctaaacattttatgtcttcaagtaccattgtttaggttaaggaatggaatccatgttaattctcaagtggttgatatccttaatgaaggatctagggaaatgtttctgaacagatgtaatcagtagagccacattgaagggccccgtggtggacatggtgataaaactaacctttgaaagaaaggacagtttgagtccctgttctcctatttcgtagccaggtgttcctgggtaagctacttgatttcttaaacctgtttttttttatgtcaagtggaaatacttttgtcgtaaggttatcttgaagatttaatgaaataattatataaagcatttgagatcttttctaccatgaagaaagtgccaaataaatggtagctgttattattgagtatatgaaatcttgagatacttaggggtatagagacttgcttagtatgagagggttgtctttcagtatagcttttgcagtgtgcctggaagccaaactagagattgagtagagaatttagaagacattgtaaactctgtgagtttagagagcttgcatttgaatagactaaaagttatagaagaaagagaaagttgagtatgagtagctttatttggctctgcaaagc

SEQ ID NO: 75765 - DNA, 2152 bp, Homo sapiens
ggaatttgtgtctttccttctccagctttggttttctcttttagcaaagctcatttctaatatttcttcttccacaaagtcatctctgacccccagagtgtttaatctctcctttctctgtacttaaagcaatgtctgtgtattatttctatcatatgttttttttttttttgttttgttttgtttttgagacagagtctcgctctgtcgcccaggctggagtgcagtggcgcgatctcggctcactgcaagctccgcctcccgggttcacgccattctcctgcctcagcctcccgagtagctgggactacaggcgcccgctaccacgcccggctaattttttgtatttttagtagagacggggtttcaccgtgttagccaggatggtctcgatctcctgacctcgtgatccgcccgcctcggcctcccaaagtgctgggattacaggcgtgagccaccgcgcccggcctatcatatgttttacctttagatatttgtgtctaaattataattgcattcagttaattctaaagggaaaaataaatttttactttacacaaaggctagcggctagcacagtgctttatggatagtagacattcagatatttggtaagtattaagcaaaatctacctggagtgaaagtgattgttgtaggaggaggtagtagaagtagttacaagctttatcgtagcagacgtttctgactctcttcctgaatgttattttttctgaacctggatatttaagtgtgaagattatacaaatctgaagtgtggcagtgttcttatattgatgtagaagactaggttgactgatcctggacctacaagcttcattttaacttcctacattttggctttgagggttaacaggacatttataatcacatatctcttttcagagtattttacatttgcaaatattatcatgaactttgtgtccttttaaccagagaggaattgtggaatcacaggaattagatgatgtgttaaagaagagagataactatcagctgatttaatttgaacccaacaagtatctaataatatgcatactctgtgttcaaataaacctctaagctagactttcaagcttatcaaaatgctagactattttcagtgtttagaaaataccagccaggtgtggtggcttatgcctgtaatcccagcactttgggaggctgaggcaggtgaatcacaaggtcaggagatggagaccatcctggccaacatggtgaaactttgtctctactaaaatacaaaaaattagccaggcgtggtggcacgggcatggtggccacccgcctgtagtcccagctacccaggaggctgagcaggggaattgcttgaacccgggaggcacaggttgcagtgagccaagattgcatcactgcattctagcctggcaacagagcaagacatcgtctaaaaaaaaagaagaagaaaaaagaaaatacatagtaaaatttattggctttttaaatggataatttcatatagtcagtcagtgccggcttagatccatttgttagagaacaatgctaatgagacctcttgatactttgtgttcctcttatgttttcctagccttgacgttagcaactaacaatgataactaacattattgagctcttatgtgccagggactattacaatagattttcaattattatctcattaaatcttcatagcagccctatgagctagatactgttactacctatatcttaacagatgaggaaatttgaaacagagcagttatttgccaagagtttcagagctattaacagaagcctaatacatgttcttggactttgcagaaataatttgttgatccatgcggtttcattgctactgcggaaagtaagtctcttggccattgtgatgggtcaaaatctttgtacatgaagggtatgactgttgttccattgtatccagagagtgaatcttgtgattgagttgggatttgaggtggcagtgtatactaagtttgaaaagtatattatcatatgttagctccctttagaaattttccccaagaagagctattacattttttaatattaaaaaagcataagatatggccataatacaattagttccacaagccatacacacttttttcttatggcttaaaattttattcatgt

SEQ ID NO: 75766 - DNA, 1803 bp, Homo sapiens
gttgacaagggagaagccaaggtataatggctgttattcatctgtctcatgtattcgtcaagtgtcatgtgttaaatatgaacaaaaaagacataatctctttcctcctggatcttaaaatctaaagtgagagataattcaccagataaatgctgcgataagggaaatagaggattctatgagcttatgactaaggatagatctgtttcctcagatgtggaactaagaagtggcagtagttgagaagttcattttgggccatgcgatttgaggtgtggctattcaagtataggaggtaggtggttacacattttttaagctattaaatagaactttcacttgaaaaggtttttttctctctttcctcagcatctatctccctacatacacaaaaaaattgcatgtcacaattcatgaactcagtgagtgactctattttgaaaaatgttagattatatcaactgaagtctgttagaggcaaatgcttttggtcatttttttcagcagggacatttcatatgtgtaaaatatttagaatccccatgtatttatatataaatgaatcttttaccatcttaaatgtttaataagttatatttttcctttctttcaacttaagtatacaaggttatcagcaaacatttgtagatgctctatgtgaggtgttttgtttattagttttaaggaagagaaaaaaggatggattggatcaggaagtcagttattgttttctgggttagtttgagtccaaatcctcaaatatgcggcgatttataagtagcaaactaggaatttaatccacttcagttttggataacttggataagacactttctgtctatagatctgtctatagataacttggataagacaagttatccaaaactgataaatctgaattagttaacagatgaggcaaattgagattgtaaatgctaaaagattattagaaaactttataaactaaatagttctatgccatgtctttttagtattttgcttgtactataattgtagtgaaaataggtcagtatctaatttttatagtcactagagctctccaactaaatttagcttagatgtttttctagcaattatatacttacaaagtttacttttaaaaattgtgtaatacatgcctttatagaaatttaagaaaacgacttatggattatgtacttcagatcacagcacaactagaagatgttgatacattacataaaaaatcaggaaacctatgaagaacatcaaaagtggcaaggtgtgttcacttgcactttgtgagattgaaactgctgccattatctgtgcaaactatggtttgagtacttttaatttagcaaagactaattattttttaaaaattttggggtaaaaaaaatggtctttagcgtagaagagctttacccgacttactttagttggttcaattggttgattttggtttgctttttgaaattttgtattgtcttaatttggggcacattgaactcaataacagttcagttgcattataattcatttgggtaaagtttattgttggaggagggtaagtaaatatttaactgaaaaagtgaagtaaatatttatttaaggctataagttgaaatatttgtcagctgagaaattttcaggtaacttttttaacctttgaaaaaaatttactatagcatgagtattttttatactgctatgtataatccatagtcacgttttttaacctttttatataaaatactgatacagaaaaccatacaatcatagtaatcttttaaaattgctttataattcacatagcgtaac

SEQ ID NO: 75767 - DNA, 1025 bp, Homo sapiens
ggagtgttatagttgaatgcttctgtgagcagtcaattagaggagggctaaaaatgtcccttagattaagtgacttggaggaacttgatttagtaaaatggccagacagccttttggagcatcaacattttttttaagaagtttaactgtaaagagaagagaggcacatgggtagctcgaggggaataagtcacatgaaaagttatttttaatgggtaacatgggtgacacttgtggctttaaaagtcacactccaactgagaaatgttgataaaaaggagaaaaaggaaaatagtgtaacattcctgaaaaaactgtcatttaagactcctttgaaacatgggcaccaaagctagtctagtagaggatttattatcagtgagaggacagagtcctattacagcagaaaagtaggaggggagggttatgaaagaattcattgaaatggttcactcatttattgatcttttttttctgtagtatccaatctgccattcattgtctctattgcaattttcagttcagtaaattgcttctcatttccatgaaactattttcagagtacctcttttttaattgacagtctgcaattgttttattcattcaatgtcatttcatatcttggttagtttctaattttgagctaatgaatactgagtctccctcttttcaacttctgaattaaaaaaaaagtcatcttatttttctctgttcatttttacactttatttagcctaagtatctgaaattggctttgctagaaattacaattagttcactgttgttttctttcagtcccagacaaaaaagaaaaattttagatttctttcttttctcttcttccttttttttttttttaaggtcatttatctttggcagttttagagatttagaaaagaaaatatatagacttgtaggcagaagaagatatggcactgagggaagttttagttttgttctgtgacagtcttccttatcttgtatgttgtctttaaaaagcctacacatttagattttcattacct

SEQ ID NO: 75768 - DNA, 1092 bp, Homo sapiens
taatattttattatttttatttttttagagacagagtcttactctattgcccaggctggagtgcagtggcaccattataggtcactgcagcttcaaattcgtgggcccaagcagtcctccttcctcagcctcctgagtagctaggactacaggcatgcaccactatgccccgctaatcatttttacagagtcacgctattttgcccaggctggtcttgaactgccctcaagtggtcctcccacctcagtctcccaaagcactgggattacaggcatgtgccaccatgtgtggctctaatcatttttaaagcaacaatcagtgggaaatttcagctccaaatgggagaaaaatttccaaagattagccttttttttttttttttttttacagatttgctacagttttgttaatgtgcttatttctcattaccatagataactttgagatggctgccttggattacaaactagaatttattactatttcacatagcttgggaaattaagtgtagtttgtgtagcctaaattatcctttatagagatgtagctgcaagggttagcatttcttctttgaaccccaggtatgcagtatattgcttaatactctattgttccataaatatgcattccagaagtcagctgaccatttgtccttatctttgaggacaaagcccgtacatatgtaagcattagtgagcaatgtagaatataaagatttggtagcagtagagagtttacgctctacatcccactgcaagtaatttgaatattgccatattatccactgtgacctgtgctgtttgttaacgttccttttccccaccttccccgaggagcttgtagtctctcactatatatttttttctctttggatttcccttcagcctttagatttcttatctctaatgcaagtctactctagatttttctcccaaatgtttaaaaccaaacctattatctcagtggtcatcaaaggtcctctagttaccagtatccacccttcttggaatgcctgtttagcaatgttcttttgttatatgagtaagaataactctggtatttgctaagagaatataattttctccacattg

SEQ ID NO: 75769 - DNA, 1018 bp, Homo sapiens
gatgactgtgtaaacatagtatttgcaagtaagtactttttggtattatatttatataatcagctcttgtatccatgtagcttatagttggctgcttcaccaggactctacaaattgctcagaacccaaggaggtaagatttttatattgcctgttttcagtatgtaaaagtccagccacaaaactattaatttacccttgactatatttttacagttgctgtggagctgaacctaaaattttgttagatggttacttggtttgttacatttttatatactaatttatatactataataatatactgtatatattttttaaagtctggggtttgtttttagaaagtatattctatcttcaaagaattatttggtagtttcatgtgtgtatctggaaaataactactgtacttctttataaaagtgagagtgaggtccctgctagttgaggctggaatctagacgtggctgtttatgtaggagttagtaattaaacagtgcctgtttgctgactgcctcatttttgccaggctctgtatgggtgccttgcaaggcattgcctcatttaaaccttgcagcagcattcagaggaaagtattaatatgcccactgtacagatgaggaagttgaggaatgctttattagtaggtgtgaagtgtcttaagcataatacctccctcctcaaccttgctccctcatcctagttaagggaattgagacacagagataaggcaatttgctattgaccttcagcagatgacttaacctcaccgtggcttagtttcttcatgagtaaaacagggtacctatcttttaggattggtgtgaagattaaagaagttaatacatatacaaaactttagaacagtgcttggctagtagtaatctctccataaatgttagatgttattattaagcctgtgactacctgttatctcatgtagttgttcagagataaaaatgtaggctataggaaagaataaggaggaaagccaggctcctaatctgtctaagataga

SEQ ID NO: 75770 - DNA, 1452 bp, Homo sapiens
taagaattatgtgcacctcagcttagtaaatacaaatatacacttgggacaaaaacttcaagaaacagtatttacttacttttatcacctgggatgcactctattttgttctgttttgttttcttgagacgttgtttcgctcttgctgcccgggctagagtgcaatggcatgatcttggctcactgcaacctccacctcccaggttcaaacaattctcctgcctcagcctcctgagtagttgggattacaggcgccagccaccacacccggctaattttttgtattaatagagacagggtttcaccatgttggccagtctggtctcgaactcctgacctcaattaatccacccacctcagcctcccaaagtgctgagattacaggcgtgagccactgcgctcggcctattttatctttttcaaatgcagtttacacacaacccagctgattgggttgtgtgtaacccatactgattaaactgatttatcacccgtgttcattatttttaaaacgttgttttgagatctataattagaagtggaattgctgagtagttgcttaagtgtatcttcaacttcttcaactagctgttgccagttgcaattcagagtggttgaaccaatttaaactcctatcggcactctaggggagttcctgtttctccacattctgaccaactcttgatattgccagatggatgagaaatggcatttgttttaaatgtgccttcccctatttactaatgaagtgtttaaagtgtcttttaaaatatatcacatagaagtttaatttaatggtaatcagagctggcggcaaggaggaaatattattgtgattgactgcctcctctggcagaaaaaatggtgtaaaaattatataataatatctatattatattgagtatttataatttgctagacactatactttgtgcactgtatacattattttatttaatcgtcataagaatcttgtaaggttagtgccttcttatatacttttttttttgagacggagtctcgctctatcgcccaggctggagtgcagtgatgtgatctcagcttggctcagtgcaacctctgcctccaggttcaagccattcttctgcctcagcctcccaagtagccgggattacgggcatgcgccaccatgcctggctaatttttgtatttttagtagagacggggtttcaccatattggccaggctggtctagaactcctgacctcatgatccacccacctcggcctcctaaagtgctgggattacaggcgtgagccaccacacctggctgccttcttatatgcttatacaggaacagatggagaaagagattcggaaaggttcagtagtcacactattactaagtagtagagccagaatttaaacccacattggtctaatttcataacttattttctttagtacttcatgctattggtgaattcgtag

SEQ ID NO: 75771 - DNA, 1993 bp, Homo sapiens
cagcaacacaatgaatgtctgcttatcgcgagttgtgaattcccgcatatctctttcacttattaaaaagattgtttggtacatattttgtttataagacagttattgactttcctgtttctcttcctttgcagacctagaggatcaagacataatgggagcatttttagacaagccaaagatggaaaagcataatgcccaggggcagggtaatgggttgcgatatgggctaagcagcatgcaaggctggcgtgttgaaatggaggatgcacatacggctgtgatcggtttgccaagtggacttgaatcgtggtcattctttgctgtgtatgatgggcatgctggttctcaggttgccaaatactgctgtgagcatttgttagatcacatcaccaataaccaggattttaaagggtctgcaggagcaccttctgtggaaaatgtaaagaatggaatcagaacaggttttctggagattgatgaacacatgagagttatgtcagagaagaaacatggtgcagatagaagtgggtcaacagctgtaggtgtcttaatttctccccaacatacttatttcattaactgtggagactcaagaggtttactttgtaggaacaggaaagttcatttcttcacacaagatcacaaaccaagtaatccgctggagaaagaacgaattcagaatgcaggtggctctgtaatgattcagcgtgtgaatggctctctggctgtatcgagggcccttggggattttgattacaaatgtgtccatggaaaaggtcctactgagcagcttgtctcaccagagcctgaagtccatgatattgaaagatctgaagaagatgatcagttcattatccttgcatgtgatggtatctgggatgttatgggaaatgaagagctctgtgattttgtaagatccagacttgaagtcactgatgaccttgagaaagtttgcaatgaagtagtcgacacctgtttgtataaggtagctagactttttttaaaaacataaaatgattttatgccatattaatcactactctagtatttaatcatcttagaatctgtaattctgaaaccagtttttggcacaactgtaggatactgttcaccaattatgaaaatatatcataggaccactatgtagaaataaattacccaattaccatctctgcaagagttataagctgaatgtttagtcttactacttgagctttgtaataatgtggaagattatcaaaggtaaaaagattttatcagagtgcatgttttgaaagaaagagggtggggagggttaggcctcagtgtctataaatgaaaagcattttagagttttaatatttgaccatgtgatatctcagtacatttatgatatcctaatcctttgaaactaaggtttaatggtctgtagcacttgaaagaggaatgtagtgatcattagacgtgatgtaatagaaatagccttgtacatggagtcagaagaacttgctctgagactgtgtatggttttaggtaagctatttaaactctaatcagtttttttcatcataaaaaggataagacattattatcttgtctcatggcgttgtcaggaggatcaaatgggataatatacacaggtgagctagctcagcccctttattttacagatgaggaagctgaagccagagaaggttctacaaacttaagagtcagacagacctgagaccaaggcttacctctattagttttgtactctacattcctgaacgaattgttcaacctctctcagctttaaaatggagataatagtatcttataagactgttgccgggcgcggtggctcacgcctgtaatcccagcactttgggaggccgaggtgggcggatcacgaggtcaggagatcgagaccatcctggctaacacagtgaaaccccgtctctactaaaaaacacaaaaaattagccgggtgtggtggcgggcgcctgtagtcccagctacgcgggaggct

SEQ ID NO: 75772 - DNA, 1555 bp, Homo sapiens
cccacaatttataatttattttaaaggtaattttatcaggtacatataactacaggtcaaatcctattgtaaacaatgccactaaaattttctgtcatgttgtatggaaggagtgtgtgtacacatgtatatttgtattaggtatcacttcaaattaagtcaccagtaaatgtttagaaatagtattgttttatagaattataaaaaattattattacagtgagattaacctgtaatgtttctctcctgtcttttggagtattggttatactgtattctctctatactgttcgggggagggggagtcattgcacacacacacgcacgcatgcgtgcacatatgtatttttttctccctgaaagtaacattttcactagaacaagtataactgtaattggcacagctgtaaaggttctcaaggctttgaagagcaaaaagaaaactaaaatattctcaaatttttttcttcccagggaagtcgagacaacatgagtgtgattttgatctgttttccaaatgcacccaaagtatcgccagaagcagtgaagaaggaggcagagttggacaagtacctggaatgcagagtagaaggtggatcatttaacaaaaaataagtagctttattaaagaaaaatcttcaacacaatcaaactttaacattttagcttttagatttttatgtgtctttgacagctagtgtctagtgtatgaaagtggaaaaggacatttctgtagtagctgttaagatgtatgcagttgtcctatcacagttatattagaaataacaactagtgtggaaagtaacccacattctgttcaggatacttttgttttaaaaggctaaaatgtttgtgtgctttaaaattcttaatgaattcactggcatgagtaattttatgccgggaaaatctgatttgtggtctatttaattacaaagagattgtgatggtgataatttgaataccatctttctatgaaaagctgtgtatattaattttaatctctagggccttttttcaataacttgaaaatcacagcctcatcattagcaactttatatacacagctttaaaaaatttgctttaaactgtttcagagcttcttccctaagccataaactgtctcacctaaacaagatagacctcaataaaagacataatatttctccacctggcagaaaagtaactgccaagtaagattaagaaataagttgagcatttctggagtatatttctcataattctgcagagacttccagtttattgcatatatgcagtaaagtgtatatattatgcagtttctctaagtggaaaaacttgacatgactttaatagtgttaaaacatgaaaatgctggtgagctgaggtagaaaaaaaacaagaaaaaaattttaaaaatagcgttaaaatgcattttaggctcctaatgtcgttaatttgcacgttaaagacctctaatcgcatgcaagcattgacctaccacacctacatcccactgtgcctgcattattgaaattactactcactttaattttttttcccctttttactgttt

SEQ ID NO: 75773 - DNA, 2208 bp, Homo sapiens
ataagtattttaatatttttactatgaaatgggatccaattttagaaatgaattgctacttttctctttagtgtgtacactttaagttttagatggaattatgaaatattcactttacgttattttgttacaataataagttttatatttcttattatcaagcaagagttgccacctggacagagtttacattgatactcaatatttttgatatgttaaagtgttattatacttgtaccattcaattggagattgtcataaattaaatatggtattttttactcagatttgatgagactgcaactagagaataaatattacattaaaattgctgctattttaaaacatagaatgtaactgtttgtattgtaaaagttgtgtgtcctcagtgaaaaatactgccttcagcttccaaagcaggcacctgaatgcctttttcttttctctctctcttctttctttaaatacatgccttcactagattgctgtgacctactaaacctcattttatttgcttggaacatttttggcttctctgtccacaccatagaaaaggacaaaggccttccagctctccttttctcttatttgttcccttctaaatacttgactctctgggggtgtgaaaagattcagctcataatttatactactattaattttgtggtccttctaagccaatttaaaattatacttttgtgtatatattttcaaaatctttgctactgactaccttagctttaaagttgctaatttggagatgactgatagaatccctgaaacttggtggaggggagtggaaaggagcagaatgtgtttgtgtatatgtatgtgaaacatggatcttctatatataaatattctttagaaaaagcgttcagtctttttacaattctaagtaaaacgtataggtcaacagaaattaaaggaatatttcttaaaattcatttatttttcttttttgaaagcagacagaagcaaggctagtatagtatgaatggtcaggtagtttaaatgcgttgtcccacgtggaacaggagatattaactgtttttaaagctttacattatttttttacaagaatttgttttcctgtaattttcttcacagttaaaatatcctaatttatattttaacaaaagagatgtaagatacatcaaatatagatgattcaaggtaatgttttttagacctgaaactattgattcaatttatcatcagtgtttatttctattgtatctagttatctatccaaataattgtattggcttagcggagactgtatgttaagtgtattagttttagattgtgaaattgtgcagtttaggtaaacatcaaatccctttatttttgtacagcagatttccagcattagaaccatgtagaacaaatatactagatgttaaagattacacaataaaggaacttggcaaaccaaatctgagatccttgctttttgttcagatttaagactgtttttttttttaaggcaaaaaataatagatggtaaaaatttggcctttattctaaaaggacagtttgaaccatttaaagaaatattatgggtagccatgtctttaaaaattttgaggcctgatcaaaggacgaatctttatacacattgttattttcaaaggtatttacaaattgagaagcagaatgatgatttcttgccccactaatgacaaataaaataccatttcttaccataaacattgaaaaacaaactgaacaaaacttgaccatataacttacaaatacttttgacttgaatttgcatgtggagtatgtgtgctaaaactgcaagtgaagactttttatacttagaggaatagttgtagagttctttgtaaggttctttgttcataattttttatattttgtgatgtgaataatagtatgcatctgcatgacaacactgcagatcatattgctgtgcccttttaataactggatattttaaaattattttaaatgcagttgtatggtttatcaaatggttctctttttaaacattttataaggaaatttagaccttttctattcaaggctttgttgaagtaatcagtgaaggaaatggtattatatatctatacagtatattgtttaaaggtactttagagaagaattaaactgagacagtgatgttcaagtacataatctgtgcatgctatttaagtatcattttgcaaatataaatatatacat

SEQ ID NO: 75774 - DNA, 1064 bp, Homo sapiens
tcataaatcttcaaaggtcaacctgattttttttttttttaaatgataccagattagaaaaatctcagatgtggtaaatgccatctttaaaaagctaggttatctttgtttcggttttcttttcaattaaatttggataacacttacaaaaaaagtacttctgattcccagaaatcataaagaagcagggggaaggcgtccccgacttagtccatgtgatgcgcacattagcgagtgagaacatccccagcctcccaccagggggtgaattggcaagcaagtaagttacattctgtacactcttatgctttatgtcagtgtatgaaaatgttaggtattcattgataaaatgtttgtttgcctaatttctgaactgatgcagttatctgtgttttaacctgtgatttcaatttttttttagtattagaatatctagagtttgtttagacataggtatcagtatcattgtaactaattgcagtgagggttgtctttattggaagcttggttggcattgatttcctcatagagcataaacgagataatatactgaaagaactttttaaactaaattacatagcactacataaaaatttacaaaattctaagtgtcgttgttagtagtagtataatttgatttggtcaatccctgagtaacttaacaccctgaaaattccccttcctcatatggaccatgtttctatgcctgattttcccagtatttttggttgttgattgctggttagttggttttaggtgtcagggaagaagatagaatatatttcttgtcttttccctttccactttagttcatagaattggactactttgtgttaaatattaagcttacacctttacataataaagtggaaaattcaagcaattccaagggttaaaacatttttacctcaaatatccatataattgacttacaaacataaaacttgcaaatacctttagcttgaatttggatatagagtaaatgtgctaaaactacaagtgaagacttcttgtacttacagtgaagatatattattgactaattttctcgattctctactgtg

SEQ ID NO: 75775 - DNA, 1831 bp, Homo sapiens
tccagttaagtgttctgttgcaattctgttgtatgatgtttatagaaaagtgataacttaaagatcatgtgggcacagctctgaaatattttatgtattgcattatgaagcttcctcacatattgagttcttaatcttttctgatgcattaaaggtttataaaagtggtattctaaaactgtattggatttcattaaaaaattctttttagtagatttattgattgagtaatacatttggacagcctcatcataaaaccgcatttcaaatattttccaaaacaaaacaaaggattaacaattctttgaacagattaaacattgctatttcatatgtacacatatatacttatatactttaaaaaacatttatattctaaaagtcatctttacagaacattatctttctccattatccagaaagtatggtgtattttggcaccgctaaattttaacgttgttccttattttgcttccttttacaaaggactctacatcaacagatgatatgtggtaaaactgctcatctagccatggagtttaccttcacctccaaaggagagtacagctcaactttgttgaaacttttaacatccatcctcaactttaaggaaggggatatgacatgggtgagaatgattacatcagagaacttcagcagtacaacagctagcccagaactgatttttttttttttttttgtaaatttgagacttatgtaagcgtgatttcaaaccataattcgtgttgtaaatcagactccagcaatttttgttgtatgattttgtttttttgtaaagtgtaattgtccttgtacaaaatgctcatatttaattatgaactgctttaaatcactatcaaagttacaagaaatgtttggcttattgtgtgatgcaacagatatatagccctttcaagtcatgttgtgtttggacttggggttggaacagggagagcagcagccatgtcagctacacgctcaaatgtgcagatgattatggaaaataacctcaaaatcttacaaagctgaacatccaaggagttattgaaaactatcttaaatgttcttggtaggggagttggcattgttgataaagccagtcccttcatttaactgtctttcaggatgttccttcgttgtttccatgagtattgcaggtaataatacagtgtattcataagaatctcaatcttggggctaaatgccttgtttctttgcacctcttttcaagtccttacatttaattactaattgataagcagcagcttcctacatatagtaggaaactgccacatttttgctatcatgattggctgggcctgctgctgttcctagtaagatattctgaattccattttatcaataaagcttgatttaacaaacaagaaacttaatcatgtatgtgtaattcctcttttaccctggccttttaaaacactgtgccgttgtaatgagacgtttctcatagggaaagatgttagtctcttttaattggacaacactgtcactcaaggcatagatgaaactttccttccattagaaagactaaaagatttaattcttggttgtaccttaatctattttttaaataggtttctttcaggctgcttatttttcattaagatgtgtatcagcttggatttgcctactgtttaattaaaatatttattgtcaaagtttgacaatctaacactctatggtaggggtgtgtgtgtgtgtgtttgtgagtgtgtgtttgcctgtgatttttaattggcccatgtctttagaatccaagtggttaagatgtatttgtgatttgaaatatagcatgttgataatatttagctgt

SEQ ID NO: 75776 - DNA, 2089 bp, Homo sapiens
ttaatgtctaaatctgtggtagagtgcgaagtatgataatgttctaagttatggctttgcaagcatctaaatgtgcatttaatgaataccagtgcttctagtatagactaattaccagacatactggtactgaaagctaaatccctattataacaaaccagttccttaatattttaagtagactgacaactttagttccagaaattgcaaaactttgaactggactgtgtaatcttttgagatgcaaaacttaagtcacaagtagagtatgtgatggaaagctgtatttcaaaccataacagcatatttagagccttttttttttgagtctttaaacaagagaaaattaaaatattcctgtcaaaattattagtattgaaattaggcttggacacgagagagaaccgtatttgagtgatgtgagaagactaaatcttttccacatgagtcagcactgccatactaataatttttttactataaaaatacaggaaggaagtatacattataacagcagactgtgtgtgttcctgattcctggaggtaatagtggggggaaaccaaccatactttttaaaggcacttttgcacctctattgtgcacttcattcttgtaccacttaaattcttcacccccatcccctttttttgtgctaattagcatctcagggcaatgcctcaaaaatgtttgatgtgttctgttctttggagggaaaaagttcttatgtgatgataatatagtactcaaaatatacttttatcatttaaatgtcttatttgctgctatgaataggaaataacattttgtatagcaggctctgttttaccctaacattaaaaaatttcactgatctttctttcattaacagggtagaatctcctaatttccactttcttgggaatatacttttatagacaatagaagcagttctcaatattagcatatactttaaaaaatcaaagtgataacttaattcagctttggaagtatctcaaacatatttttactttatagtgcattaacttgcttctagagtacttaatgcaactgctctagccacttaattttttatactaatctcaacattaagaaatttggattaagtaataaattagttatgtaattcaagtaatctgaattacagcagtacttttagtgatcattcataggactatatattaacccagctaataactcagtttttttacaaaatgtttcgagtattattggtaaaacactgttctaggctaagcacattgggactgtaaagaaatgagtagatccttggcttcaagtttacatctggacaatttataatctagtgtatgttagtattataactggatcactcatcaaaaaatatatatatatatctattgcccacctgctatctaccaggtacttagctgatcaaggcaggcccctgccctaaagaccttgtttatacttcctttactcacctgaaaactgttctccagtttattttcttctctctaaagttaaagagtaattcagaagaaaattttgcttagcataagaataaaattggactgaagaggcttaagcccattcagtatccttgattgcatttatccaacggcctttattcttcctgctgacagcagtaactcagaggaataggtagtagatttctgaaaattatccagccatggaaatgtaggtggggtttgagtttaaggcatttaaaaatgtaaatatctctagctaaatttatcttaagtagaactctgtgtttttgtaacacactgccagtgttaatatcaaattttagccaaattattactatgtgttttaatattttaaaataatttcactgcccatctttactggacaaactcatttggagttcaacttgtgatttctgaaagaactgatgaaattgggtactgctttttttctccatttttcgttttgttttaattttgaatttcatggtatatacttttagttcaaactcagctgtttgtacagtattgtattaggatttggtattagaaaagatgtgtaaatatcttagtatataattgtttctcatttgaggtttttcttctaagggaccttaaagag

SEQ ID NO: 75777 - DNA, 1038 bp, Homo sapiens
ttaaagtttgagaagaattgatgtagttttttaaaaaccacaaatacctttgctcagacatctatatatgtttagtaagcagccgagttgattcttataagttgagttgtcaagtttggaggtcactggtctttgaggctcaaggttcagatgacttttatgctgatgacatgaaccaaatttattaaatcagtggaactctctctgaaagtttggtacaggtgagtttatctgtttagtcatccatgaattacaagaaagcttattaattatttagttaaataatgacacatttagtcctccaattaggaaagctcaacactaggaaggaggattttctccttatgtaactggctcattcactcccagactgagtgtaggcatgaggaaatcttttgcttggccatcaaagccgcccccacccccttcgaatgttctgactttctttataacagtacctttcattcagaagaatacaaacatcccttgtgctgctgttcagtgatgttgagggctgtactggaggactgtgtctagttctggacctcacaataaaagagggatgtggggaccttggcaaaggttcagaagatatttgtaaaggttattttttaaattcagaatgaatcttcacattgtgtggcattatctataaaatggacatgaaatgaactttgactgtagcttgagatttttactttaagagaaaagcaattgtagaaataagtggaggaagaagaaagaatgtctcttgagcacaagttctcaccttgtgcattagttacaatgacctggagaaattttttaaaaccccaatgccagttaagttgggggagtctttgtggttgggacctgagcatcaatagtttttcaagtactccaggtgattccaatgcacagctcctgagcagtgctgctgcaactttaatgtcattggcaccacctgggaagtttgttaaaatgcagattgtggccggtgcagtggctcacacctgtaatccaagcattctgggaggccaagatgggcagatcacttga

SEQ ID NO: 75778 - DNA, 1223 bp, Homo sapiens
ataatattacagcttatttaacatccatatatcaactatagtattatataacagctatggatatatctatattacatacaacatatatcaatatcatataattatgttctatattatatatattacatatattaaatttaacaatatagctcaatataaaatagtgatacaagatatagcaaatgatacttttttcatgaaaaaaattcaagtagatatttcatcttggaaaacaataatcaagcatttctcaagctactagattaacatttactgaagttaatatcactttttaaacaggtatataataatctgaaaaatacattatttgacttccaaatccttggtaatagtgatccactatgttctaaaatgtcttaccctataacagtttgcacagttgaatcataatttaaaaaaaaaaacattttggaggtacctagtgtctgagcggcacagacgagatctcgatcgaaggcgagatggcggacgtgctagatcttcacgaggctgggggcgaagatttcgccatggatgaggatggggacgagagcattcacaaactgaaagaaaaagcgaagaaacagaagggtcgcggctttggctccgaagaggggtcccgagcgcggatgcgtgaggattatgacagcgtggagcaggatggcgatgaacccggaccacaacgctctgttgaaggctggattctctttgtagctggagtccatgaggaagccacctaagaagacatacacgacaaattcgcagaatatggggaaattaaaaacattcacctcaacctcaacaggcgaacaggatatctgaaggggtatactctagttgaatatgaaacatacaaggaagcccaggctgctatggagggactcaatggccaggatttgatgggacggcccatcagcattgactggtgttttgttcggggtccaccaaaaggcaagaggagaggtggccgaagacgcagcagaagtccagaccggagacgtcgctgacaggtcctctgttgtccaggtgttctcttcaagattccatttgaccatgcagccttggacaaataggactggggtggaacttgctgtgtttatatttaatctcttaccctatatgcgtagtatttgagttgcgaataaatgttccatttttgttttctacatttaatgttactttcctgtcctaaaattgaaagttctaaagcatagcaaggctgt

SEQ ID NO: 75779 - DNA, 1062 bp, Homo sapiens
atttattgtatgcagtatgctataattcagtaggttataaaaattttatataatatgaagagcatgatattgtaatgtttatcttccttaggaaacttacttgagaagccagaaggagaagatggctttacattttcttttccatcagacacttcaactcatacatttggagctggaaaagatgattttagttttccattttcatttggacagggtcaaaattcaataccttcttcttctttaaaaggtttttcatcttcctcacaaaatacaacacagtttacttttttttgagctagtcattaattccttaaattattttactgttctgtgttcatgagggcataaatttacattattgcttaaaacatgaagactgctttcttttattgattaaagcagtaatgtttacattatttgattatatttattgaaatattgaaatactgaatattttgggttttgtgtgtgctattaactaatcattatttattttggttttgattttgcgagccgtggtcaggtagaacttttattaatcttaatagaatttgatgcttttttcattactctttatttaaatattaagcctgcttctccttggaacctaaggtttttttctggaagtattgttggtactttgataagaacaagaactgcagtagtaactccagagttagtgctgaagcgtactttagctactaaaaatttctattaaaattattgggtttcacttctgcttcactatgtagtatacagagtggtactgtaataataatttcaaataatttatgttaataacaaaatctgtgttattttcttctaatataacacatggtacaattctaattttatgagttatgctaatgctttcaatggctaaaaattaaatgtaaagggcaagagtaatttctgaaaattggattgttgtatcagtggtgatcctgttaatattcttttttgcttaaatattttttgaagaacatttacaattttgtctccttcaataacaaaaatttcttctttatgttttgtgttcagtatttgtcaattaattatata

SEQ ID NO: 75780 - DNA, 1013 bp, Homo sapiens
tttttataaatggtatttaatgctatgagatcagaatgaatctaccaattgtatttattaaatgtctgccatctaaaaatttaaatctatttacatcctctttttttttgagacagagtttcgctcttgttgcccaggctggagtgcaatagcactatctcggctcacggcaacctccgcctcctgggttcaagcaattctcctgcctcagcctcccgagtagctgggattacaggcgcccagcaccatgcccagctaattttttgtatttttagtagagacggggtctcactatgttggccaggctggtctcaaattcctgacctcaggtgatccacccgcctcggcctcccaaagtgctgggatcacaggcgtgagccaccgtacccagcccacatcctcttttttgacattctcattcatttgacactcattcacttcagtgttttcaaatataatacatacagataatgaacaaatttatatcttgctgcactgacttctaaactctaggaccttatttctgattgtacagtttaaatctctttagacatcttttgacattaaaaactcagtgtagctgaaatgaaacttgctctccttctgacgtccctgatggtatctccattattctggcttttaaggtttggagcatggtaacaattttaacttctctctgtgactgtgactacattcaactagtcattaagttttatcagttctctctcttaaatatttatttttattttctattttcattgaaaccattatatttcagtcttactgttcacctggactgttacaatatcatcctaattggtgttttccatttttcagcttacctatagatcacagcttaattaatcttcagtgcccataatgttggccatgtcactgccctaatcagttaccttcagtgactcccccactgactatcaaattatgcttctacttttctaatttagctccaactacctgtttcattttttattggtatatagttgtacatattt

SEQ ID NO: 75781 - DNA, 1034 bp, Homo sapiens
actgtggctgagctggtacctagtgtgcaagataaaatgccctttactttttcctctgcttttcttaaacagatggggtcttttaccatagccaccatagctgggaatgtgctgggtcacaactgaagccagcacctctcagagcccaaggcccacagcatactacctgagtatcactcctggttattcagggcccaagggctctttagtcagtgggtgattaattctgccaggactgggtccttcccttcaaggcagtggattcccttttaggaaggattttaaactgcattaggaaaatccagcctatcaaaaattatgggatgttgcaaaagccagagcaaaaaatagctttaaataatttagctaataattacataataaaaagaagaaaggcctaaaatcagtgacctaagatttcattttgagaatctagagaaagaagaactaagcaaacctgaagtaaaatgaagaaacaaaataagagaaatcagtgaaatggaaaaacaaacaatagaggaaattaacaaagtcaaagttgattatttgaaaataattgacaaaattgacaaaatccttatattaggaatgaaagagaggatgtaattataaatcctaaatattatgaaacagattggtgagggaaacttactttctaaatattcaaacatcctataaggttagagtaataaagggcatgataacggttttaaggactgattgatcaatggtatgggctagaaaatcttgaaaccaaagattttataatgtgataatgatagactacaaattaataggagtaaattacgcattcatcttacactgtacgtcaatagaagttacagatgcattaaattatataagaaaatgttaacaatatatttctgaagaaatataggtgaatatttaccaaatcttaggaggaaggattctctaagcatgaaaacggtggaagaagaagcaaaagaaaataattgggtttgattacatacaaaatctaaacttctttttttaaattatgctttaagttctag

SEQ ID NO: 75782 - DNA, 1092 bp, Homo sapiens
tttctatatttagaaattaaagctgaaaattgagacatgctttattcaaaaagtagaaacattacagtgtagtggttaaaactagactctgaagccagactacttaggtgtgtaccagatgtgggattttgggtaagtggcttggtttccttatctgtaaaatgaaataataactattatcatagggtttgtgagtattagagtttatacacataaagcacttagaaaagtaccaaccacttaataatcctacataagttttaatgtgatatgagtaatattgttattgctcatttaagttaattacatttagccaattttatgtggattagaatattttatttgcatatatctgacattaaattgttgaaattacaaatttattgatggatgatatagtactatacatgttatagtattttacatcttcaacttttgtctcattttttatttaaatgcttattttaaaaacaagtaattcctaggagtatgctaggcatgaaagtagactatagttacttaattctcatttacaataataacatgaatgcaaaatgcatgtatataaatgtaataggaaacatgtacactttgaataaggaaaactacaaaactactgaaaaaagttaatgaatacataaacacatgcaatacttgcataggaaaaaatattgtaaagataaatttcttcccaatataatttataaatatagtccaattcaaatctaattataatcctggcaagtttgtatttaattttttgttttgtttttatggtggtgggattggggaaggagattggcaaaataattaataactgtcctgggggaaagtggtcaagaactatcaggaaaatattgaaaaataagattgatgataaattaaaacgaaattctaaaaaattcaaccccacaaggtagaaaagaaacaataaaaaaatacacacagtaaaaaaatcataaaacaaataaactttacaccaaataatgtgctttttaataattatattttgtgaatgggctaacactcattaaaagacaaagattgtaagaatggaaaaaaaaaaagcaagacccaaatataagctatcta

SEQ ID NO: 75783 - DNA, 2407 bp, Homo sapiens
attgcttaaaagtacatcatttttcactttcaaggagatagcctatgtaattgttcacccaaagagcatattgtggaaattttaaaagaaaaatcattcctagtcttttttttcatcaattccaatatgttctggctgtcatttactttttcaggtagaagtggaagatggaactggaaagaaaagaaaaaattggataaatatttatttttctatattttgatatatgttttagtattactttcaccagttattcttatttcagttattttgtctgtgcaatgttaacatcatggattaataaggtattttccacctcatgcatttttatgtatgtcattaatgcagcagcatttgttttatagttttctgttactttgaatttgcaggctatatatactgaacattttgggaagtcagtagaaaatgatagtgatgaagtagaagagagagctgagaattttccacgaacgtctgaaattcctatatttttaggaactcccaaagctgtgaaagcacctgagtcattggagaaaataaaattccctaaaacccccccgttcgaaatgtaggattttaattaataactattgttaaattatttgtatgttgaattacataaataactgataggaatagtaaaatgcttagtacctttaacaagtttttattatgtagtatttcagacatgcaaagaagagaaagactaatataacacacctccatttacccatcaccctgttttaacaattattaatacctgttttaacaattattaatactctgctgttcctgtttcatagaccctcttccccatttttcctgcaacatttagctgaagatggcataaatcccacgtacttataaagcaatagtgtgtagatttgagatttttccaaaggataaagaaaatttaaaatgtcaagctaagcctagcatagtggcatgtgcctgtagtcccagctatttgggaggctaagggaggaggatcccttgagcccaggaatttgaatccagcctgagcaacatagtgagactctattaaaaaaaaaaaaaaagtcaagctaaaaagctgttgtcacatatggtagattgtagacttatcatcaattaatattccatcagtcatttcttcatatgttgtagtgtctgaagcaagacttgccatttttattaagcaagctctttaggcataaatatctctaacatgattattaaattttggaaaccacgtatttgtagtttgcagccaagaaaatagtgctgcacttaacctttatgtttagtccattatcttccttaacaaccctgaggtttctctaaaacatatgtcaagcagaattcactgcatcagggttgttttgcatcagacctgtactctacttccgtattttaaattgctaataagagttatggatttgaatgtcatgctgttgactcaagcacagcacattcgaaatggaactcatcatcaaacctgagaactgtaaaataatgtgagctcatacgctaagacctctccccatggatgagaaaactatcatctgtaaagttaagtgactcatttatggtaatagagatagttatggcagtatcatcagatttctattaaatttaacaaacaacaaactgtgcaaggcactgctctagacattttataaatactgctcatttaatattcacaacagccttattaggtgtaggtacattattatccttattttacagaagaggaaacagaatcacaggtgatacaactaatcaacattagaatagaaatttaagcccaggccgttctggctctagaatccatgcttttaaccactggtataaactgtcttgtctaattatttttcccaaatcatattataatttaacttccttatacatcactgtaatggctggcttctcatcaacactaaaatcttgtaactggcattcaaaatcttgaagacagtatagtgtcaaggttaagagcttggactttgaatcgtgattgctgcattcacctgccacctttggcacttattattcttttaagcaaatcatttaacctttctatgcttcaaaattccctactgtaaaatggaaatgatagtaatagtacctatttcatagggttcttgtgaagaataagtaagttatgccttatttaactttatttaacattagtctccacctcatacaatcctttctcgataggattgtcacttcaataactacttcctacatttccctactatgctaattctcacctctatgctgttgcttatgatgcttaccagtattcagtgtttaataatagatttttaacattttgataatttcttatttctcagtaacagaaatagaaatgcagtacctgaagttcaaacagaaaaggaatcccctggactttcttttctta

SEQ ID NO: 75784 - DNA, 1050 bp, Homo sapiens
atatgggtggtataaattttaaaaggtttatcttaaatacagaaatactactacaaatcattactatacttgtcaaaaacattaatttcttaaacttttttgtttctcaatattcaacttaatgttttgtatgtagtggtttcagttaatgtgtgtagttgttgatgttgataatgatggtaatgatggaaaggatgaaatactaatgaaatgagagttctgagttgctaacgacaagcaaaaaatttttattgctttgtgtagccaagtcagatgcttaatttctttctttcagatatttaatgactctgctgtggataaccattcaaaatgttcacatattacgactatcacaagttcacaaaagtttatgcaagtcaggtaactttttaaaataagaaaatgctttaatctctgaaataatttatagatatcaactcagaaaaaatacaaaaattatatttattccattttagattgttaaccccacagaaacaatcaaattccaatcagtggtcggaaaaaggggataaaggtatttgccgtttatatttttcttctaagaagtcggggtaacaaattatatcaggtttttacattagtcaaataaattgtttcgattatttgcatctctggttaactgaccatgcacgcctggctttaaaatacatcttccctaaatatagaacaaatacattttattgtagaatatttggaaaacaaagatataaagaaaacaaaaatatcactactcagacataactgaacatcataaatactggtgcataccatttttttctatgcatttttattctttttccctccaagtttgaatcatatacataattttttattcttttttcccacttgatatactgttgaggttatttctctatgtcagtaaataggttttatttgtaatgactgtataatgttccattgtgtggatatgccataatttacttagtcattctttcatgtggaatattttggttttttttcagttcttttactattataaataatgcctctatattcttttacattaat

SEQ ID NO: 75785 - DNA, 1620 bp, Homo sapiens
tcctactttttttggatgtgttattttcttgattcctccactcccatgtaccacattcagtgcaagtgtgtctttaattttataatgaagttaattgaaaaaataggtaaatagacagaattttactttattgaccgcctttaagaaaaattccatgtattgacagaaacatataaatatttagtcatttttaactcaatatatattctgacactgtttattctatttcttcaatttagataaaatttagtgaaaactattctttcagtaaaaaacttaaaagacccatttatgattataatactgttttaacaatttctgtattcatgttggttgatttatttctgaatatgtctttttaaagtttaaagtaccatgaaatctgaagcatgctatttgtagttacaagttttggcttaaaatgtttttgacatgtgtaggaagtcttttgcaatgattatattttaaaaataagagtggactatattgagaagagcattgaacttaatcaggggaagtgtgtttttgctctgacaccactactaagtaattcagtcattttgggcaagtctattaaattctttggaactcagttttattatctgcaaaacgaggggttttattatatagtatctaaatatgcctcctagctttaaaatatgttaattttaacttatctaatatttaatgtaattcacctttctctttagaatttttggaaaagatgagcatgtacttacattgaataaaactcaaagcagtcaattatttcttccttatgaatctcagaaattagtaagaccaataaagatgcattcttcagaaccaagagttgcaggtataatatctgtttgttattcaaaaacatcattttttttgcaaacacacagaagaaatagaaggaagcaattttatttatcatttggtgtaagtaaaaacaatactggagacctataaactcaagagagtactgctttgaatctttctgagagcaaacaaaatatgtcttctatacgtaacttttttctctttgagaaaggaattattcacacaataaatttcaaaaaaagtgttctggcctggttgcacagctgttagaggaggaggaaaaattacatatttttcatttgaggagttgattatcaatatgtgtgacttaggcaggtaaaagacttatgctaatagtatctataacttagtcactgagatatttgaatcaagtttcattcagtggctctgcagattaaattaactattaggttggtgcaaaagtaatcatggtttttgccattgcgtttaattaaaatttaatggcatttaccattacataatggttttggcattaaaagtaatggcaaaaatcatgattacttttgcaccaacctaatacattatattagattaactacattggctggtttctttgtcttctcaaccactctgtcttctttggtaacccattataaaggtacagttttgtcagttggccttttgtcatttcatcttcatagttattgtaaagctattatatagtaaggaattaagagttttaaaataatttcataattccgtattttaatttaaattaaaaattcatgtagacttgattttctaaattac

SEQ ID NO: 75786 - DNA, 4126 bp, Homo sapiens
agggaagatagaggttccacaaggagtaagtgatcagaagaaccaggttctgcagtgtcaattaggatgagtgctaaaaagagatcattcagttggacaaatttgatcattggtgaccttgggaagaatagcgtcattaaaatagtgggagtaggagttaaaatgaatagaattaagaagtgaatcactcaggtaatgaagaaaaagagtcaagttgagaagtgtggtggagttaaggaaagtctaaagggcagacaatattgagggaagcaagaataagaagacatttgatttgccttttatgtttagtagactttaacagtgtattcacaaagtttttagatctgttgttgttatataaacatcatttcttttaattttaacagagaaatgtatcatgattatatatgtcagtataaagaagttttgaagcagtaccaactaaaatactcagaaacacccttttcacgtgaatattatgagaagaaaagagaacatgaagaaattcaaagcagagtgttggcatgtactgaacaattaaaaatgaatgaaacaatttttatgaaatttcgaggtattaatatttttgttatattgttttaattatgatatctttgtaatgaaaagaatataataatcagcttatgctgtgactttatttttcagtgcctgctccctttccatcacttactaaatggactttaaacatgtatccacaatagtatttgtacttataatttttattagataagcattattttgtattttaattgttactgtgtttcctttgtgagaataacatggatttgttttgtgtttaattaaaatatttaaaaagtaattttaaaggtcatcttggattcattttcatgtatattcatgtgatcagaagcaagcaactttggtgagaataaaatggcatatgtatttgggtttaagtggcgtgtcttaggaaccaaaccaatgaaaatgttatattggtctgtcttaccaaagaaaattccagttaaattgcttattacttgttagaatggaaggtgcaaaggaggtgagttacatttattcattcatcactggaaacctaccttatgccaggcaatactgaagacgatacagagctctcttccaaggagctctgggtttagtagggaagactgacatgtaaataaataattctaatacagtaccactgtaatagatgcctaagtaattcttaattggtctaagtctcacctgtttgtcagagagatcttccctgatgatgaacttgaaactttaatcctctttcaacctccacaatccttcatatgctttcctatcagattataactccactgtttgtactaagtcttctttatccccacatcctaccttgctttctgtctgcttcattctaaaccatccttttaactcttctgctgctagctttttccatgttttggttttagtctcttctgttttttgttgttcatttgctgcccatttgcgctttaacttctcagtgggaaggggccaaagttagtagacgctggtatagcaagggtttagggagttggatgtggaatgggatgacatataaggttgcatgacaaacaggaagaggtgaatggaggtaggaagatttgaagattaggatttaattatctgtacctaacattttaatggaaacttgataataatagacttataaatcatgattcacttgaaattttatattctagcatataaatcatgcatattttaaggcagaataggaaagccctgattaatcttctctggaattcttgttaactgtcactattctatcattttcaaattctcctaaatggattataatttaggacattgtattagctaataaccacgtggaatgtattaatagctgaggattttttacttgaaattgggcacaaatccagttcaagtagaaagtccaagtcgaagatctgcctgtcttttgagttctgtagggtacactgatgagccttacagagcaagaaaagggaaatttggtcgattttgtttttctccagcatactgttgttggcttgaaatgggtatactttaaatattgtctttgaacaaataaataatggaagcataagaagttaaatttgggcctgaattatgttttattagttatgccaagtgacacaatgaactttgatttaaaaagcaaaaaaaaaaaaaaaaaaactaccctgtgaaaatacttaactgaaataatcctaacaaatattttgtatgaaatgtttttttaagctcagtatataacataaacaataaattatctgttagtctgccaaatgtttatattattctcctgttttcagatactgtttttaatattgcttactgtttatatgaaacatacatataaatgatgtcacataatattaatcatttctgatatggcacatatattataaatataaaatttacttatatgacatagttccttaacataaaaagtgttaatttgagatgtgaaacacaagatattcttaaacatgccagcaatcttaccaaaagttcatccgaattgaagaaagaagtagatgaaatggaaatagaaattaattatttaaaccaggtatatattttgttatatatttctaatatgtgtattaatgtataagtataatggtatgttagttgacagttttagaagagctatttttaagagagcctaatgtggagaaaggtttaagataatttagattacctttggagccaaaaggtattttaggtactgaatatattaatttatattttttattaattttattaatatattttatattaatttgtatataatttaatatatatatttaggtactgaatatattttggggaatagtttagctttctttgaggtctgaggagagaacatgaggaaggaataagatgcaacatagtaacaggattttaaaggcattaaaagatctacgccagtgttttttaaaaaggtagtaaataaagaatttaaacttgaaaaatatatgactataatctttagcgagctaggctagaactagtttagcctttaaacttttcttggaaacatttggatgtcatccatgaaattgtggcttttatttacatagctatgataacccatcaaagtcgcttccaaattctgagaaaaatttgactatgatacctgattttctaaatttttgaaaattatgttaaatactgtatacttatctttcattaagtatgaggtaccaaataacagtaatatcattttagtaaacagaagaaagtagatgccatttcctttaaaatatatggtaactgtccttaatgtaaggaatcaatgtctactttgcttataattatctgtttttaaaaagatgggagtttgttaaaatctacatttgccaatggaattgtaaggaaaagttaaacgggtgtgatttattgttaattttgtttttgttttaataactgtaaatagaagatagtaaatgctatcaaaaatatgaatcttatgattatatagaaaaaacataagataaagcatatctttttttactgctttgcaagtaattattttgttttgtgttcccaattgtctttttagcagatatctaggcataatgaaactaaggctctttcagaaactctggaagaaaagaacaaaaatacagaaaacagaaaagaactgaaagaaaggtataggtaacctttaaaattaaattttatgtgaacagatattttgcatctaaaagtttgattctatattccatcccaaaccactaatatttacacagtatctgtaaattttgttgtgcaggctattttctattaatttcttatgaaaaatattattaaatattatgagctaatactaaaatctgcttgttatttagtaaggctgaggataatgtgtaaagagaaatagagtagcagcagcacatctgctgttctagaacctgtcagttgtataattcatccagtgttttccatgatgggccagcaataggagtaaaacagaaacaatggtgggaatagcaaggtatttacttttttatcaccctgtccaccttgaccagttcttcctttgctatagagtgaagatgagtcaaagcatgctactaaatgtgtggcatcatatttc

SEQ ID NO: 75787 - DNA, 1415 bp, Homo sapiens
cctaatataagacattgaaatgtttttatttttaatataattggatgagaacagtatctatttttatattgtaactaaaacgtgcaaaatctagaatgcaatactctatatattcaaagacaagtcttaagaaaaggtagggactaaagttatagatatagacttcattttgaaatcatggaaatacatgagattgcccatggaaatgtatggagcaaaaagaggagaaagctggagtacgccatcatctagagggtaggcagagggtgggatcagtgaaggagacttgtcttgtcatttatacatcctgcttcatttaaaaaagaattttagatgatttgactaaataatcatcttgaaaggatagtgtttaaagaaactagattaaaaatcaaggctgcagggaagtaaggaaaatataggaagttgaagcctttgatgaagttagaaattcatactatgtatcccgcacatttgttagatataggcacgaattaagctttcaaattcctagtagtcaaggcattgtggaaatataatcagtgtgggattcataatattcatttaaaaaaacaggtcaattgcttaggataagtagaggcttttcctgaggtttgagagaaatttctcctctgggtcctctaaaggggaaattgtgcagtgtgcttcagtgacctcccccagccccaaacacagtatatataactgcttcttatagcatctgtcaatgtaagtcatgactataaaacattaattcttaaaaatgattctgtgagaggctaaagcaaaccagttaaaatatgtacttctctaacagtgtttgttatagaggacttctgtgagctaactgaaggtattaaagtgaaaacagttgtctgtttctttcttaaaccagctacatagcttaattgaattgatgcttcaataccaggcatttataaatggaaaataactcatttgttggtttcatggataatggaggaagtagaggcaccaattacttgtttctcctaatctcccatccctgttcaagtcattcatgaaaaacagtattgctggcttagatgagataataatggctcttgtttaactatgacttagctatgctaggctctgccagagtttctatatggagtatgttagaagagtgagcatgaatatacagtatgaatagggtggatgtggcatagtcatctcacctggaactggtgacccaggcttaattttcttataggtatttcttccctggaccatttttcccaagcgattaaatagtaagtgggtcttaattagcaaatatgcgtttagaggaataggagcttgtttggggctcaactgcttttccttgctaaaggggacagtttagtaatattcagaaattaaaactttcttaagattcagacccgctgactagc

SEQ ID NO: 75788 - DNA, 1008 bp, Homo sapiens
taattcatttgctctggtttctcttttttttgtaattcaggatgatgtgacacctgttttctaagtgttaaaggagcaaaaaaacctctctttagcccttattctagttctttgaatgcttactccaaaagaatttttttgaccaaaatcttagaaatgtaatgagaaagaaaggctgatattggagtgttacagagtgtataatagaaatgcaatagcaatacacaatccagccatgtcacatttgctccttccctagtaatggttcaaaaacaagtttaatataaaaattcatgaatattgatattcgagcataatagtccttgaatggaggtagtgggagtgatatgagatggaaatacttttcttgatgtaagcttgttttctccaggaagagaaagattcgtttctctttaaataattatgttcttttttttattatctctatcaatttgtttatcattctgagttgctaattacaaatatatttttttctatagctggaagccaacatgtgatgtttttcgtaaacatgaagattatatgcaggaccaatttactgtttatcaaggaactgttgaaaaagacaagtatagtacttatatgaagtttatcaattctataagtttgtattattaggacatggtgtgtaagaatgtcagttgaaaaatgtagacattttgtactcaaggagtttctttttttttttttgagatggagtctcgctctgtcccccaggctggagtgcagtggcatgatcttggctcactgcaagctctgcctcccgggttcacgccattcttttgcctcagcctcccaagtagctgggactacaggcgcccgccaccgcacccggctaattttgtgtatttttagtagagacggggtttcaccatgttagccaggatggtctcgatctcctgacctcgtgatctgcccgcctcggccttccaaagtgctgggattacaggcatgacccaccatgcccagccaggagtttttgttttt

SEQ ID NO: 75789 - DNA, 1358 bp, Homo sapiens
ctagtaacagaaataagtgagttgaaagtgcgtttaataattgacatagaattgatgaatagaaatttcacatttgtcaaaaacagaaggcttctattagtgtcattaacgaataaatgtttgcaagaattcatagcatcttaagatacgattgaccttagatatcactgaatctagcccttttatgttaaagatgaggtacaagggacatttattttttcatcattcccaaactgaaaatcttcttagcttctggctctaggatcaggcctggccctggttctctgcattttagtatacggtcccacccatctcaagcctcgtttcctctccattctctggctctcttccttttaggtaagctgccatacccattttttttctctatttgtttattttgaacttattatttctacattaagaaaataaacattttctctttgtagaatgctgtgaagatattaaggaaaacaaagtaactatttgtaggatacacgaaactataaatgcaacagatgaggaaattgatcattactgtaaacatagtgaggagattaaagacaactgtagaaagtgagtatttgaaagaatcaattttcattgcattcttttatttagggtttttgagtttacagttgaagatacttccttcaaagtagtattctgtattagctaatgaatcaagtcttaatgtgccttgttatgccactatgtaaagggattataggaggatcagaagagaaatagaactaaacagctataagagctcactaattcagatccacttaatctaactataaacttttgaataagctcagtatataaaattcctattaaatatatttgaaacaatttccatttttgaattttcaagatcttatttttgtgtgagggaatacggcctgaagtttttcaaaataaaaatatttaatacgttaagaattctttcaacatggcttcaggttctggattctactagttaactctagacattttgaaacaaatacataaaaacaacaaagacttattacaaatataaattttctgtacttagttttatatggacattgtagtaagtactgtattttaggatcatatttgttttgaaatattttgttattcaaaattttaataagccttttttgtttttcccccattagttttttcccactggttttaagaaattataaaagtaacatataccaaatacaaatgttcaagcaatatacacatatatggtgcaaatagtttttccctgcttgcagttcccgtcccctaccctgtcatcctctgcataggtaatgactcacatccttttagatcttgaagagtcaacatcattattatgcacaccacac

SEQ ID NO: 75790 - DNA, 1025 bp, Homo sapiens
aatttctttctatatttttagtagaatcatatcttagagatctgctaaagagtacaccagctgcctgaatgccttactgtattcagcatgttggcaaagataatttattaagagtgtaacttgtacataataaataacatcctttattgcagttgtctaacctgtggtttgtcatcttcttgttaagagttcagggtggctagaaaaaaaaacatttaaggttctagataacccatcagaacaggctgagtttactgcattgtggttgccttttaaggttcttggcagaagttcactgccacctttgatgcccactcaaaacacctcagtatttatcctttaaaaaacattttctggtgttatttccagaagcagtaattatgctctcaataaaccccttctagtcttgttcagaaagggtttagaggggcaagtatcatttcgagtttagcacattagttaaacctcaaggggtctaggacttgggctaaaatctggaaaatatctcatggattttcaaattgtccatactttagataggatcagcttgtgatgatttagagactttgtcttggtcaacttcagaaggtagcattatcattcctttttctttcttcctcccctcaacaagaaaaccttgactctgatgatttataaagaacctagacatgtagttttcttttctgaatattgaataaatgtctctggagtgttctcaggttgccagatgtcatcctgatattagaggctgactgtcctttgtttaaagttcccaggtaagagatttctagtaagacctgatccatatggagcacctgaggagagtctgatcggttttatatttttccaaacttttgttcttggacattcccctactcctgtttattactgaacctaatttccctttgtgttctttattttctcgtccataattctgtctaagttttaaggcatagatggcatctgagggaagataaatagaggaagaagatgggtatctatcatatgagagggtgcactttatt

SEQ ID NO: 75791 - DNA, 1097 bp, Homo sapiens
tgggcatgtgtggcagcctgccctgctacatgctagacaagtgtgctttagtacatagccacaagttcttcattctttaaaatgttttgacagatcatctcataataaaaataattcaggaaaactatggggaaatagttacatttcacaaaagatattttaaactctttgtaaaacttagataatagagcctagcagttactttgtatctaattgatacattttatgttaatttaccaccatacattttattaatcaaaattgtatagcatgtgactcttttggctttcagagttctcaaaaatattattttgttgcatgtactgtatgtttagaggcaaccaattatatactcaatatggttttactgtgccttacacaaagagaaactctatacagaatgtatatcatggggtggggtaacagagtctttactgcactgttaggtgatggcacacagagcatgtcccagaacatttctgtgcttaattacccaaccaaagagatctgaagtatgtatgtcgtactgtaatgggggtttatgcctggacaattaagtgttttatttgttttctgaaatgatgtgaacttatttttctaaacactatgctaaataaactttatatttatacataccttgcattgaaaattatttgggaaatattgtgtttttttaaatatgaatgactcatcttactagaaaagaaaaaagaaataatgttggttttatttatctctggaaaagggaagaagaggaagggaaaaaacaaacattccaaaagctggcaaatggttataaggccaattggagtgattttggaaaaataatctttgtcagtcgttgtgcagaattatgcaattaactgtactacatagaggtaaattattagattgcatcctccttaaaaggaagaagtgtaccttccccttcccagcattttttgttttttgttttttgtttttttgtccctagagatgagtgtgatgtttggcacacggcagttactctgtagggtttaatggaattaaattgaagggtccaaagacctcctattttcaaccttattgaaagagttcaatatcacccatccctaggg

SEQ ID NO: 75792 - DNA, 1047 bp, Homo sapiens
gcctcccgagtagctgggactacaggcacctgccaccatgcccggctaaatttttgtatttttagtagagacggggtttcaccgtgttagccaggatggtcttgatctcctgacctcgtgatctgcccgcctcggcctcccaaagtgctgggattataggcatgagccactgtgcctggccacatcttgcttttttttttatgatcagaacaaagggcccactctagttctctacatgtcaatcaatcaagcatgttgaataagggacatagaggatttaacttttgttatcataaatggaacttgcaggcatatatcaagaaccctatgaagaattcctctcccatcattttgataaagaactacatcatttttgatagaattggtgaatgttcctaaactgctgaagctacatgttttttgttttgttttacaaagtcaggtgtttgagagttcttttccactctactactactcatagagcttgttttttctttgggtgtgtgctgatcctgttactgagattaattacatggctctgcagtgtagtttacataaaaatgatgttttccacttgattgctgcagatatcaagagtttgttattttcaaatacccatccaacaagagagatggggaggtttttagttatatatgctatatatatatatataactggaaatgttttatatgttttccgaaaatacaataagcctctcttttattcagtgttcttcctcttttctcccttatgaaaaagaaaagatagcacaaaacttaagacttacctaggaaacccattcatattcccaccatgatgtaattataaccctacaattacttcaggtagctacacaatataccaggtaagaatcaatgcacagtataaagaacttattgttcttttctattctttcagttgaataagggccagttggtatgcagcccatgtatatgtgaatggagtaagataaaccccatgatctccttgcacagaattgcaaatgtcttttgccataccaagggccagactcagaacccttggagt

SEQ ID NO: 75793 - DNA, 2598 bp, Homo sapiens
acacctgcgactcaggaacgcaagtagtttttttggctgtgttgttgttggggttaaacataaaagatgtctccatacaaaatatatctatatatatatttacttggagaggtaaaaacagatgttctaagatgtactaagttacactttcaaggagtagagcctgggaatctgtagttttaggtgcccaaggtaattctgaaccagaattgggctaaatgattgtatggaagtgttgcttctttatagatactgtacctgagaaaaaaacgtgtgtgtaactttttttctttccctctcacttccatcagtgataatcagtactttattttttttaggtaatatctcagtaagctcaagcacttcagatggaagcacatttacaagtgagtctaccacagtccagcaaggaaaggttttcttgagctctcttgctcccagtgcagtggtatacacggttcctaatacaggccagactataggatctgtgaaacaggaaggcttggaaaggagcctggtattttctcagttgatgcctgtcaatcagaatgcacaagtaaatgcaaacctgtcttctgaaaacatctcggggagtggcctgcatccactggcctcctcattagttaatgtatctccaactcacaatttttctctcagtccctctacactactaaatcccactgagctaaaccgcgacattgccgatagccaaccaatgtctgcaccggtggcaagcaaatctactgtgacatctgtcagcaacactaactatgcaactcttcagaactgctcccttattactggtcaagacctattgtcagtccctatgactcaggctgcccttggggaaatagttcctacagctgaagatcaggtaggtcacccctccccagcagtacatcaggattttgtccaagaacatcgtttggttctgcaatcggtagctaacatgaaagagaatttcttatcaaattctgagagcaaagcaacaagtagcttaatgatgctggactctaaatccaagtatgtcttagatggcatggttgatactgtctgtgaagacctggaaacagacaaaaaagagcttgccaagctccagactgtccagctggatgaagatatgcaagacttatgaactttatttcctcctcacctctttttggcatcagcggcaaatcttttcatgaagccccaaggacacaaaacattttcccatttaaaggaaaacactctagttttgcaagtatatgcatacaagagactttagattgatctgcatgaagatcacagttaagtatacaggagtagaactgcattattgcagcctttttgttcacttataaatttctcttttaaatagatggagacaaaggacaaggtgaaatgtatcaagtcaaagtgaatcatttagttgactctataattctaaggtcaaaatggaacttgatagttttttaaattaaaaaatgtatacacctaacatagaaaattaaagatagctgcagaccattagaaataatacaattgtttttgtttacttttactccatgggcattgaaaaggttaagaaacataaatggtacatatttttaaagttaagtagcatgcatatatatatgcacacacacctctttttcagcattttttgagaaagtcttgggtctcaaacacatttgtctcaacacatttccaaatgtgatttctaatagctcagtgtggctgagaaagtgcggaactccactaaaaactctgaaacttcagtataaatgtaaatatatcagttctataagcaggatttgagtaattacagtgaattttatttttaatgtatatgtttctcttcaggcgctatgaactgaaaaatatgttttcttactgtttaatttatttttattgtttgaacaggaagtgaacatagtcgtttccaacaaagttttactttttgtaggattttaaaaataatgatttttaccaggaatctattaaggtcaatattaataacactgaaacaggaaatctaactcccaatattggaattttggtactttttttcacatccttgttctttatttagcaactctgattcatttaaatatgttttttatagaattctatgtgcctttttacctcgtggcctttttattggtagtaaggtacagaagtgtcaacagaagcactgatggttcttttctactatctaacagggttaatttcaccacaaaattgctttaaatctgaagaacttaagtttcactaaataatatatatgacatttatcacacaaatggataaacaactaattattgttgatacttttcattacaaggaaaataagttataaataccatgtcaaattgattatacaggctatgaaaaccattttaaaggaaagaaaatatgtaaattctattgagcaaaattctgtcctgttgaaacttagttctaaaggttttgaatcagttgttacactctgacacatgactgttgtttgcactatattatcatgtcttctttaaaagtaaatatttttggtttctgtaagaagcttgtttaataatgttgtaagccgtggctatagttttatcaagactctgaaca

SEQ ID NO: 75794 - DNA, 1047 bp, Homo sapiens
tataaagcacaggctattaaatggtccaaaagaaagtaagtacaccgctcataaatctttgaaatcatgggaatgtttccagacagaacaagatggaatttatcttcctaattgtgacacagtaccttgaaaaatgcaactgggtgcgtggagataaggctttgtataatttgccattttaaaagttcccctgtcaaattcaaggtattaagttgctttatggaaggctaagaccaagccctagatgcaagaccgggggaactgactgccggaacgtttgtgttgcagcgcctcgccccttgccggtgctctttcgcgaagggaccgtctctgccaagcgcctgttggtaggaacctgcttggtcgcgtctgagggggcttgtaggtggctctggctgaaacaggcgcctgcgagagtctgtaggagggaaaccgccatggacgatcagggttgccctcggtgtaagaccaccaaatatcggaacccctccttgaagctgatggtgaatgtgtgcggacacactctgtgagttgggcggcagtggattccctgggggagagacgcgctgggtgggaggagaggaccgggagatgctaggcctcgtcttgggagcaaagggcgttgttagtttcaacactggggaggaaaatgggaaaagaaggcgttgtgactttaaatagactgtagccgctagccccgagcggctctggcctgctttgaactgcgggttctcagtgtggcatccagcagtttgtcaggttcccccttccatagccaatgagtatcccgactgtatttccaggctttgtgttgtttactgggctctggacatcgctgattaaaagcgtgggggattggagtgtttatttcatatgaaatgtttttattgaaaaagtgcgaaagtgctatgaaaacttaaaatttgcttgagtatatactgctgctatttattgtatgagttaattaaaaaaccctgtgtgtatgcccacttgtcctgatggagttcggttagactcccatcactaaaatgaagaaaacccggactg

SEQ ID NO: 75795 - DNA, 2022 bp, Homo sapiens
ccaaagtgctgggattacaggcgtgagccactgcgcccagcctttttttttttttttttttttttgaaacaaggaggaaaaggaaagtttatagttatagaaatattctttgtagttaagatgtgaaagtgggctttattgttaaataagctattttttaaaaaaattactatttgctaaagaaacataaatctgaaatcttgcagcctgattttagctgttctgctgatttaggaaaaggtcctttggggaagcaaatcattttggttggttgggtacaggttttgcaaagttagcatcaggggaacaaaaatgtctgggtgataccaaatatacaaatgttgtacgtggttccaaatatggaaatggttttgtctaaagcagccactgaagagaaattatctaaatattagcccctttaggaaagtggaatgtgttgtctgatttggctctcaggcttagtatgaaagtttgtgcaaaagtacagcttacaaaatgctatttgttttattaaaaggattgataggaagttgacatacttagttaatttaaatttggaaggagctcagcaaacatctttctagttgtattttatgtctccctccaccttcttttttttttttaatcaaatggggaaactgaagcctaagaaaggatatatggttgcatagcccacctggacagctccagtctctttttttgtgtgtaaatcccattcagaaattaaatttcaaaattaattttcaattacattttgattacctgttgactaaatacatttttttttactgtaatgcaactgggttgtaactcaaactcatgcataagatgaaaaaactacaatattaaaaatcattttgatctacttagaacaattttctctttatattttattttctagggtgctagcttacgataaaaagcatctttgaatattcaataatgatatttttcctgatattgtatttgccacatctttattttttattgatgatatataagcaatgacatagtatttggtttttgaggtataatcagatgtcaactaggaagcctaaatgaattgtattgttgatgcagtgaaatgatttgtaggataacttattttatagtatttttatttttcatatttatttttaaagaaatatagattatttacatgtacaaacaaatatatatattctctacaaaaagataagaaaatttaaaatttaacagactttatcagaaatgtttggagtgttaggttttcttttcatttactaagttggaatatgtaaaaaaaaaaagaattttgagatgaggacaagtgattgtatacctcactcagtttttttagaacacaaatatgatagtggttatatcattgaaaatcaatgaagcctccatcaatatggtgcagtgcctctgcaccactgatttatatatatttaatgaacttgctgttctaatttcaggtaactgaagcaaactgcatctagcactaactggtttacttataaacaattcagctcattaaaatataaatatcttgaaatttaccaatattagatataatttctttataaatagttctactgtgtttacttcctggtgttaactgacatgtttctaaaaaaatcatcatattttggtactgtttcagataatgttaccaaaatatgttgttttatttgatcttatttcttgctactgatctagaatggatttggaatagaagatatgggacaaaaaagctttcaaaagtgatgggatttatgaagtatgacatgccagatgctgtatttttgagatctattggagcataagtgaggaccagttaaggatctatttctatattctttgggattaggaatatagtttttaatatttgcattttttaaaaaatgtattttaaaatagatttattttaagcatgtctattatgttttattgaaaaaatgccacaagataatattaaaaaatgttttgacaaaagaaaaaaattatacataatactttcacagaggagttcttttaatt

SEQ ID NO: 75796 - DNA, 1432 bp, Homo sapiens
tgagtcacagagattccctttctgtccttaactagaacatatgtagaataggaaataggagaaaactgttcatgcatttccgtgcttttaggtttttttctgctcttggcagtgtattgattctgatgctttacttattttgtaatttttattttatgacttcctgtgtacaaggagttgatgatgcaaagttgaatcagaggtaatttttgccctgaggtctcattgctaagtatggaagatagacaaacaaaatgttacaatacactacaataattgttatgatgagtgttgttggaaccatctaaggagcataatttagatggtagagggcagtgggaccaacaaatataccagatattcaaataagaaatctgaggtcatactatatgtactaggcttatttctaagccctacgaagttgtgcccataactgtctccttaataacttccaaattacagattttatcctattccccttgtagtctatgtcttccttatctctacttggacttttttttttttttctttttgaggtagggttttgctttgttgcccaggtgagagtgcagtggcaagatcatggcttcttgcagccttgacttcagggctcaagcaatcctctcatgtcagcctcctcagtagcaggaactacaagtgtgtgccactacacctggctaatttatctttttgtagagacagagtcttactgtgttgcccaggttggtctcgaactcctgggctcaagtgatcctcccacctcagcctcccaaagtgctgggattacaggtgtgagccacgttgcctggtccacttggactatttcaactgtctcctggccgaggactgcttcaagcttaattaacatggatactgcttactaccgcccactcctcccaaccctccaaaaaaaaacccccaaattcagaaaacaaaacaaaaaatagtcttccccttttaaccatgatacttcctgcttaaacttctttggtggtttcttgtgtcttccaccaatgcttctcacattttaaaaagtaacattaacaatggaggaaaacaaatttgtacccctagtttgtctggaggtgcaactagaagtgtcgctttgaaagcccctttgaagttttggttgaccttaaaaatgcatgtaagattttaattttttaatattttctgttagtattaaaacaaaaagtatatgccttcctaattttttatctcatacccctaacctttgcataaaattgatgttttaggaagacgcaccacgttttcctctggctttatgtaatccctgacacacagaccccacatcatcctgtagttcagtattttcaaactgtgttgcctgagagatttcaaactgaaactctgagagattgtttgaggcagctgctcattgtcatcccttaaactagagcagtctccattt

SEQ ID NO: 75797 - DNA, 1023 bp, Homo sapiens
ctttcttctctctctcctcagcttccagcacctttcctagagattgaaacttgaaacctgagggtgaaattaattttgtttggccctggagtgttggcttgcacagcatttaaattaaaacaaaacaaaaaatgaattagttgccaacatgtaaaaatgaggagacatcatgtaaaaatttggatctctcagttttgttgaaaaactgctagatctggtaacattttggctccatattctcaacagcatggagttgatgagtagccatcattaacatgagatgcattctttagttggccagtttgatgaatgttggaaattgttgatgctttgaatagaaggtataccaataaccttctcaaaaggagacttttcctgttgttgtttaaaaagtaactttctacatgccatactatttattgcaggtatactgtacttaatctttgctttgtaagtgttagttaggcctaagttaaagaaattagacttataagtaaaactgctttatgcataatatttctctagtggatgatttgttaataaaatcatatctagccttaggtcaaatatttataatcattctattatttaaaagaaatttttttaaattataagaacagtttttacttatttaaagttctgttctgcccagagagcatagtataatatggaagtaggtcttctgattagaatttatttaagtagtagaaaattcaagccagcttgggtagggagaatatgaagtgagagaaactgaaatgtgaaagattaaagttgcaaacagttttggtacaattaaatatatctattccaagtggacaatataaacttatgcattaatgaaatgatatggtcatattatttgaaatttgcagaaatggaatcatactatacctttacctttttttttcagttagtggtagattttgagtatcagcatatgctttacctcctttttagcaggtaatatttctttatatggatattgcttctgttgatggaaatttagaaatatgaaatttt

SEQ ID NO: 75798 - DNA, 1335 bp, Homo sapiens
atataaaatcttgacttataaaattaaatgtataacttaaaaatgattaattcttttaaaatgaaaattttaactttctaatttctcttttaagtgatttttaagaagatgatttagataatgtaaaaggattgcatctgttaaataacaaactccactgggtgcagtggcttacacctgtaatctcagcactttggaggcctaggcgggtagatcacaaggtcaggagtttgagaccggcttggccaaggtggtgaaaccctgtctctactaaaaatacaaaaattagccaggcttggtggtgggcgcccataatcccagctacttgggaggcgtagacagagaattgcttgaacccgggaggcggaggttataatgagttgagataaagccactgcactccagcctgggtgacagagcgagactctgtcaaaaaaaaaaaaagaaaaaaaagaaatacaaattactcccccttactccttttttgggtattcgtcttgttttaaaaatctttttgtggcctggcgtggtggctcaggcctgtaatcccagcactttgggaggccaaggccggtggatcatgacgtcaggagatcgagaccatcctggccaacatggtgaaactccatttctattaaaaatacaaaaattagctgggtgtggtggcgcatgcctgtaatcccagctactcgggaggctgaggcacgagaattgcttgaacccgggaggcagaggttgcagtgagctgatcgcgccactgcactccagcctggcgacagagcaagactccgtctcaaaaaaaacaaaaatctttttgagaaacttttagatatgggacaattaatgaatatctaatactattcattgtatgactagatttcattttggggaggcttattaatataatttaattattttgaacaacaagatgaattgggtaggtgtttgttagaacttcaaatacattatagttgaaaacttgaaacagtaatacaaatgcaagaataaatattcttttagaaataggaaatggtttcagataatatggagaaaatataaggaaacaattcaataataaaaactattgtttgtaagtaaatcaagtttgagagtttctgctttaataagttgttaaggtttggattcagagatctgtttctcttatagtaaacatttttaatataggaacagctcagggaaatggtttccatatgcttcttgaggtgttaacaatacacttttggattggaaatgcaatataaacctaaactacattctggaaggcaaagtggaggagcatttcaatggtaatatgtacaagaaacccttgtgctt

SEQ ID NO: 75799 - DNA, 1020 bp, Homo sapiens
tgagccaccatgactggccttattttttgtatttttagtacagtcagtgtttcgccacattggccaggatggtttcgaactcctgacctcaggtgatccacctgcttcgacctcccaaagtgctgggtttataggcgtgagccaccgcgcctggcccagtttagttttttgaattatggctaacttcattcctgcttgaggttgagtgtataatattattgtattactcatttattaagagctccggaatgtgtctgctcataaataggtggttgtcttcaatagtatttgcaattttgaagagttacatgtttaataactttctccctggttgacttttaaaggtcttggttgacttcttaaaagttttgttttggttttaaatgatatgttctacagaaacacaaggacaaattacaaaggttttaggagttatatctctgaacaggatttttctaacctttctttcaggtaatatcaaaatctttcaaatggaggtggagaagagggagatgagaataacctgggagggttttaaaaattactactacttatacagaaatgtttactgtgtcctaggcataatgctgaatgctctttattcgttatctcatttaatctttataataactctaattggtaggtattgtaaatatccactttttatggatgagggaattgaggcttagagattctaagtaacttgcctaaggaaacaaactagtaaatggctcagcctagattcagctaggcctcattgatgacaaacctttgcttctgaatcaccatgccataatacactttgtataaaccctttttgtttttctcctttatatcagaatgtggatgatggcaacgctatgtgcattttcaaaaagttaccctactcctaagattataatgttgagtttacatttttaagttatttttttgcatacaaaaagtgtatatataatatgtatagtttaatgaataatgaaaacaaatcaaatgcttgtgcactaaccccctgggttgaga

SEQ ID NO: 75800 - DNA, 1050 bp, Homo sapiens
cgcctgtaatcccagctactcaggaggctgaggcaggggaatcgcttgaacccgggaggtggagattgcagtgagccgagatcgcaccactgcactccagcctggcaacaaagtgagactccgtctcaaagaaaaaaaaagaaaaaaagaaaaaaaaaagaagctgtttcctgctagagtgaacttactctaagaagcaagtggatggtctttacttttgaaactcttggcggggaagtgctgttggagccgctgtggttgctgtccgtgtagtgaaagcgcgtgcctttgtttgtgtccctggccatgtgtccctggccatggcgctgcagctctcccgggagcagggaatcaccctgcgtgggagtgccgaaatcgtggacgagttcttctcattcggcatcaacagcattttatatcagcgtggcatttatccatctgaaatctttactcgagtgcagaaatacggactcaccttgcttgtaactactgatcttgagctcataaaatacctaaataatgtggtggaacaactaaaagattggttatacaagtgttcagttcagaaactggttgtagttatctcaaatattgaaagtggtgaggtcctggaaagatgacagtttgatattgagtgtgataagactgcaaaagatgacagtgcacccagagaaaagtctcagaaagctattcaggatgaaatccgttcagtcatcagacagatcacagctacagtgacatttctgccactgttggaagtttcttgttcatttgatctgctgatttacacagacaaagatttggttgtacctgaaaaatgggaagagtcgggaccacagtttattaccaattctgaggaagtctgcctttgttcatttactactacaatccacaaagtaaatagcatggtggcctacaaaattcctgtcaatgactgaagatgacatgaggaaataatgtaattgtaattttgaaatgtggttttcctgaaatcaagtcatctatagttgatatgttttatttcattggttaatttatacatggagaaaa

SEQ ID NO: 75801 - DNA, 2147 bp, Homo sapiens
gatggaaaaacttgtgctataaagctaagtgctttcctaaatcagatgttttggtcaagtagcttgactcagtataggtagggagatatttaattataaaatacagcaaaggaagtctaaatattcagaatctttgttaaagtcctgaaagtaactaataatctataaacaatgaaatattgctgtgtagctccttttgaccttcatttcatgcataattttccctatcgaatcagtttccaattatttgactttaatttatgtaacttgaacctgtgaagggatggatatttgtactgcttgatgttctgtgatacagaactcttaaaaatttttttttgtgttttataaaatcaagttttaagtgaggaaataagtttgttaaaaacaaaaaaagaagcaagtggatttgtgtggtgtaatttgcctgctcatataatccactcatttttctatagcatcatttattgatttgtagaacctctttatatagtatgaatattatcttttatgtatgatgaaaaaattgttttctagtttgtggcaagtcttttaatagtattgtgtttcccctcccacttatgaaaagttttaaatttaaaattgttgtttttagagatgatggggtcttgctgatctcaaactcctgacctcaagtgcttcttcagccttggcccccacaaagtgctgggactacagatgtgagccaccacacctggccttaaattttgataaaatgaaatttatcaatctcctttacatggtttaaatttttttagttacttttaggaaatttctgccctgatctcgtaattatattctcctataatttgataaaagtttaaagttttctctttgatctttagtcatttgttcataggggatttctttttgtgtatagggtgaaagatagggatctagtttttttctctccttatctagaagcatctctccttatctagaaagcatttatttagtgtctcaagtatttatttagtagtcatttatttccacattgatttgtaatactacctctttcctatgccgtatttccatgtatgcatggattttgtttgtgtgtgtgtgtgtgtgtgattttttttttttttttaacagaagtatacttgttccttacagtgtgctgttatgttggtggtacatgaatccatagacatcttcctggaatgtcaattttacctaaagaatatgaaaaagattgagtaattgaataactggtaactatttgaggacatttttcaatgaaataaggctgtttgaattatggagtcaaatagaactttcatgaagttttagctttttaagctaaaacgtgatacaatttgaagacatgttgagcttatgggggaccatttgaggccatttccccaattttccaggaagttcattctttatcatttaagaatactgtggtagaaaagggtgagaaggactaccttacatggactgtttttattttttgtcaaaacgttgtgtttattgttccatgtatacactgtgtgtattgatacctttattttttttgtgatctctgcctggaatgtcatccttctttcatatttcaaggccagcacatttttcatggcccagctcaattcaacctatttcttgaatcctttaacagttgtaatccttgttactggctcctttgaaatctggtccttactgggtattccttgtattaagtaatatttctaatggctaatgtttattgagagtgtactatgtgtctggtatatttctaagcattttacctgtattaactaatgtaaatctcatcagctctgaaagctaggtttttacccctatgtaggtattctttttatttctcacaaggaaggaaacagaggcacagagaggtttaataatttaaataaggaaaagcaggcaaactggcttcagagtctgtgcccttaaccagtatgctctgctccctctcagttgctcaataaataattgctcaggaatgaatttaccacttatattaacacttagcagacataactttgttctgttgttttatgggtgtgttctttcctaactatataatacatccctgaaggcagggataaaatcttatacttctttatagtatggctttatatttcatacttcattagacggattta

SEQ ID NO: 75802 - DNA, 1041 bp, Homo sapiens
cctgggctcaagtgattgtcctgcctcagcctcctgagtagctaggactacaggcatgcaccaccacatctagctaattttttttaaatttttatattttgtagagggagggatctagccatgttgtctaggctggtcttatattcttggcctcaagctatcttcctgctttgccctcccaaagcactgggattataggcgtaagcaactaggcctggcctgttcttttttttaatgattagtttttatatatgtattttgtaaatatgtagaaaaagatgtggccacacaaacactaaactcaacagtagcatattacccgtgggaagtgagatacagaacacaatgaagtagaactttgagttatttttctatataattctatattttataagctttaaagaaaaaatattcttttcacagttaaaattagaaatggaaaatgttacgtaggaaaataaactgcaataaaaaattttaatactatttaaattattatgacaaggcagattataaaaagtggagatgtacaactgattttggaaacaatatattatgtctaatatacaatataacgtttagaaatattaatgttctatattaccttgctgactaaactattgattgagtctaatctccaagaccttgagatatattaatgttatttgtggctctgtaattttgactattttggatagatgcttacttataaatatctttagttagtatagttgtaaagtttgcctgttttcaccttccatggatgggtttaatttcctctaaccacaaagaatagtgaaaatgcaccactctgaaacttcctaagtccagagtggtttatctggggtttagttgatcttgctaatgacactatgatctttggaatttttccctgttattttttagtgacactattaagatagaaatataggccaggagtggtggctcatgcctataatcccagaaccttgggaggtcaaggcaggaggatcgcttgagcccaggagttcgagaccagcctgagcaacatggggagtccca

SEQ ID NO: 75803 - DNA, 1023 bp, Homo sapiens
tcagctagcacctctttcttgtaattgtcatttgctcagttgattactgaactttcaaaagacattcttacaaggaaaggaagaaaaaaacatctgttttagtgcttggggtatatagggctctctaaagagcaggcccctggcagaggcttctcttgcccaggtctatggatgatattgggactggggatggaggtgaccatacagtagccttttacatgctctttgacttctccctatcctgctcttcttcctagtctctcactcaatttgttttaatttataaatttgtttgatctgtaaaactaaactggtatcacttgggatacctatatctgaaaagtaagctccaaatgaaaaagaacattttccagaaagttttttggtaagattttaaatagaagtgactagttttcaagtctcactctccttatcccataggggcaaactattcagatgtgttgtagatttgaacattggcttaaatgttatgttttatttctgtccttacagctgtgaaagttgtgtagatttactgtttgtgagaggagctggaaactgccctgagtgtggtactccactcagaaagagcaacttcagggtacaactctttgaagatcccactgttgacaaggaggttgagatcaggaaaaaagtgctaaagatgtaagtattcctgctcgaatgattcagtcaacaaagaggactttaacaattatgtcagtaattgattattatttgctcataaatgtggacagattagcaagtaaataactataaattcatttaagttcttagagaactgagtaatattatttatctttgttaaagaagagcctcttgattgatggcttcattattcatttgtatttattctttgattaataaacatgtattgagtacctactatgtattgagtacctactatgtgtaaacactactatgtgtaaacatgttatgcatgttaagcagtagttatgaagtgatgagtaaaacagctatgaactctgtcctcatgagact

SEQ ID NO: 75804 - DNA, 1990 bp, Homo sapiens
tacacagtaagcaattcttttccatgtatcatatatgaattaggtcagaacaagcaaaccagttagataatattaaaagcaatgatatgtaatatgtagatttcttttttcttttcttaaagatacaataaaagggaagaagattttcctagtctaagagaatacaatgatttcttggaagaagtggaagaaattggtacgtttttaatttgatgtatgctagcctataagaccatgtgcttttatcttttaaatgcttaggagaacatctcacataaaaacctcttaacaggttttgttgtgatagctaacatttacctaattactttcttttgcacttgagtcatgtttgtcaaattgaaggcatacttaagtaaagaacctatttaatattgtcttttaggaaaaatatgtttaatagagatagtaacacttcatagctggggaggaagactatatgggtacatgcatctgtgtgttgataacatattagagtagtttaaatgaatggaaaacatattctgatttttcaaaaatggggttcctattaaccatatttatagtgactaaagccatatgtttatcattatttgtgcttctgtggatatagtagtcttaaagtactttgaagcagttgactgttgaagtggcattctattaatcagtattattctggaatcagaggttggagtaatctttgtgccttttctttctgatgtgtttagtcaaaaggaagattttatcaagaaaaaatgatttcagttttcttaaataaaatttcagagatgttaaaaactttggaagttgttatatgttgatttaaaaaataatgctgctttttaaacttgcagtaattattactaagtgcgggtttggaaatgacacaaaggttatatactgtgaacattagaatgagactatgaggatcaaacagcaatcatttttattctttcaaacttaataggtaactgtactcaatatttactattaaaaataagattataataaaatggatcattctttagaagatttatatatgataaacttaacaattcagattcctgaggaataataaatattctaattcctttaatttctttactagaaaatccagaaaatctttttgtttcaactgttacctgaaacttttctcatatgtctaagttcatttgttatgccatagcaaaagcatgtggaaaacataatttagggtttctctgggatctttcagtgccataagagccactgcttttccattctgcatgtactcattgcactttgtatgttatcttagcaatcatgagtgactatggattttagctgaaaagatggtagaattgggagtgacaaggcaaagtggaaaagttagaatgtagactgagaagaaaaaccagaaagaaatctacaagaactgggcaagtatgaaggtatgtagaaatctggctctatatagatactaagtataggacaagctgttggatagcaattgggaagaaaagtagcttacatatattctaaaggtaatgtgattagtcaaaagtctggtcaagcaataaagggaaaggaaattataggtgttgcagtacaagttgaatacatggtcacaattacaagcaggcagtcaggataactaaaagaaacatatacagagaaggtgaggaataggtttaggggatgaactacaaggagatcttgattctgggattaagattctgactgagctatgattaaaaaaatatatatatatatatacacacacacactgcatatatatgtgtgtgtgtgtgtgttgctccaagataaagtaatttgaaggtgtggacaacatggggcccataattggtactagaattgataggcaagagcaagtctggatattgggggtatacaacatgtaatgctttctttaccaaaatatagaagctgtggctcagaccatttaatttgaaagtgattctgctattatgtgtattcatgaaggactgtcttc

SEQ ID NO: 75805 - DNA, 1055 bp, Homo sapiens
tgtagttatgtagttatgtaattaaatacatatttaatattatatgtaatttaaatatttaaagtgtgtaaggttggggaaaaaattgtaaaactctagaaggattctgtttctcaggtttttaagtcacttcttaaaaaatggaaattggccaggtgcagtgactcgcgcctgtaatcacagcactttgggaggccaaggcaagaggattgcttgagcccaggagtttgagatcagcctggacaacataatgagatctataccaaaattttaaaaagtagctgggtgtagtggcacacgtttgtagtcccagctacttgggaggctgaggtggatctctgaagtctaggagtccaaggctacagtgaaccatggttgcgccactgcactccaacctaggcaacagagcatgcccatgtctcaaaaaaccagaaaacagaaaaggaaactgaacaatatagatgacagttatggcctatataaggaagaagcaaaactctaaaatctagaatttgctctatgtcattaagttagagaatgactatatacttcctatatatgttttaagttaaagtatttgaagagagagacaggtgtatgtgtgtgtttctctcctttaacaaacttatttaaatgttcaactataaatcctcattgtgtttattaaagagtggttctactctatttaaagatattgatgatttttgggaagtaacctcttggatttatagtttattttctgaacttcagttcaattcagcaagtttttaaattatgttatgtgaactgctttatggatggggatatgtggtatttgccctcaataagctcagactctaaagggggagataattatgttaactaataactataatgtaatgtgataagtcttataaataggcatttataaaatgctatgggaatacagataaagcaattaacctagcactgggaaatagagatgtggtttggtgacattcagagaagagatgacatgtgagtttgatcttaaaagaagaagaagagttaaccagatagaaagggcttggaaaaac

SEQ ID NO: 75806 - DNA, 1011 bp, Homo sapiens
cttggccaggctgatcttgaactcctgaccttgtgatccacccaccttggcctcccaaagtgctgggattacaggcgtgagccaccgcacccagcgaaaacttcctgtaaaaatcttgtttcaatagctttctattttgtgttgtattcatatttttaaagatagttagatgtctgtgatatctgtattatttgtgttaatcagaagtataaaatgttaatttaatggacatttactaagtaccagactgagctgtacacacattatctcataatttttgaaactctaagagacaggcatttttattcctattttgcatctggagaagaggcacagagagcttaagtattgtgcccaagactgcattgctagtaaagaatggagccaaattgtaaatataggattttcttactttctgagtctagaacatggagttctatggaattattagagatgagagaaaaaaagtagtttggggccatattttgaaggatattaaagacatttgaactcgatcttataggtagaagggtgctgttgaagataaacgtttaaatctggagtaagaaaactagaattattagggtgcctcagagggtcagtgtttgaggattcataaattggagattgaagtaattttgttgtataaatttcattatgaatcttttgaatatgaatataaaaatgaaaacattataattttaataatagcatcaaacattttcaatagaaggggcacacatgaagatggactttcttatggcattaacaatagactcttttctgtggttatgacaatctatacataaaattcttgttccttatggctccagagattatctcaaaggtttattcttagtttcataatgaacagattattcttttggtgcaaaacagattattcttttggtgcagagaatacttatcttaaaagggtgagaaagtcctaagggctttaattataaattctggatgtcaaaaagacttcaaaattgtacgtgaataacatta

SEQ ID NO: 75807 - DNA, 1050 bp, Homo sapiens
gctggtctcgaactcctgaccttgtgatccacccgccgtggcctcccaaagtgctgggattacaggtgtgagccgctgcgtagggctcttatttcttatctgggttatttgaatatacttctaactagtcctcctattgtcagtcttgaacccaattgatctttatgtataccttactgcctctagtcatctttctaaactcatccctcaaattcccttaatatgttcccagtggccttagtatagcaaaattccactagtatggtataacagaatagttgttttatttaatagtaacgtgtctacatgaaataaagtaaattctattttcttcaatatggaattgctacattattaaataataagtgactagtgtgttttatgcttccaataaagaaagtattagagtgtggtatatgattgctcttggctcctaaatttattccacgccatatataaatttttgttttagactcgagaacaggaagaactggaagaagctttagaagtggaacgacaggaaaatgaacaaagaagattatttatacaaaaagaagaacaactgcagcagattctaaaaaggaagaataagcaggcttttttagatgagctggtatgtattaatgctaattgtgattgtaaaaaacattcttcaggatttacctttcctagtaggctggatgatggcatttaaagggcttttccacagtgtttgtaatctggttcacctttagttttgttggttatgtattgatatcagtgtatttattgctgaataagaggttgccctccatccacactgaacaatatgtttttatgctcacaattctgtgggttaggaatttaagtggttcttttgggcttttctgcttccctaatgtattctcaggacacctctccatgtggttttgatagcgacaggaggcagccaaatgcctaggcagatagggacgggtacccagagaaaccccatctccatgttgaagacagtttaaaacctgaaagccaagctacaagttaaatccttggaccagattgagaacttgtcct

SEQ ID NO: 75808 - DNA, 1010 bp, Homo sapiens
tcccaaagtgctggggttactggtgtgagccaccgcgcccagccgcatattcttttagtctttaaagtactgttttgctgcctcattgagctgctattgacatgaagctcccctttgattcagtgaggcatgaagcaagatgtgaaactaccattgttgtacattgtgtgtaatctggagttaatattgatttttgtgagttctttctcccacttcctgttttcttcacctgcaagtcattactgcacatactttcctcagtgtttagatcatataacatgatgattaaataattcttagtaatttactgtattcattagtgcaattaattacaacagattggtttagaataccactgcagtttgaatttctggttttcatttttaaacttatttttagattttgttatgtttatttttcagtctttatacaatgttataaatgttaaaatactttaaatttttatgactaatgaattcattaaatttatttttatcctcttgaatccttattaactaagtaaaagaacgtatttctttttctgtatatgttcatgtgtgagattttgtttaaaaaacaatagcatttgtaaatatgtctagaagcttaattcttataattaatctctggacctaatttacacaagtactacttattagaatttttttcctcctgtttttggttctggtctttgtgccaaaagtcactttttaaccttttaaaaagtatttgcattatattatactgtatgtgacgggattttaatgttatggtcttaatgtttatggcttagtatttgcagtaatgttggctaaaaggtccatttatttaatcctaactgtaaattcaattttaaaaaagtttggaaaaagatttttaaacaggtcctggcttattaaatctttttatattcctgtttgaaaattcgcttcagtttatgtcttaaattttgtatgggctaatattgttgtcaaacgcagtaggtgatttttattagaaatattgtttgc

SEQ ID NO: 75809 - DNA, 1231 bp, Homo sapiens
cccacttctctccacctcttatcatcctaggataattgccatcatttctttagtggactatcacagtaacattccacctggtgtctctattcatctgtgtaccccataatctagtctataagcctttgggtggtttcctaaataaatgaatgatggtaaataaacaatattaaacaaatcagctcatcacctccttgcttactatcttcctatgtcttcccagtacacttagaataaaattcagaatattatctactttctcacctctgagaaagtgacatttgtactaagaagtcaatggtaaaatggagttagccatgcaaaaatacaggcagagaaaagagcagtaaagaaggcctaaggtaagaaacagcattttctagaaacagacaaaagatactgttaagagaatactttccctactctgccttgctccttatgctcaattcacactgaccgtttgactattctatctaaagtatctttctcctgcccccatccacattatgttatgctttttaaaattttaatatagagacagggtctcactatgttgcccaggctggcctcaaactcctgagctcaagtgatcctcctgccttggcctccaaaagtgttaggattacaggcatgggctaccacgcctggcccatgttatgctttttaaccctttataacatatatcactatcagaaagtgtcttatgggtacactgtttaatgtttatctttaccactggaatataaattctgtgtacctagaatgatgtttgtctctagtacctatttaatgaatgttcactgtggaccttcattaaatatttttaaatgaatgactgaatcttacatattaggctcacatttaatagaatgaagatcctgaagtactttcaagtttctgtgactttatggtgtttactctgtttggaatatacttaactgcttatgaaaactttacttataatttatgcatcgatcaagtgtgattttcatgaaccctcttttgtgtggaatttaattgcatattctgatgcttcccctaacattttatatgtacttttattatatattgtagctcctgccttgtattgcaattggctattttccatgccggtctcattttagatgagcttccttaaggacacaatgtgttctgtggcataactttatgtgttcttgtggggactaaatattgtactatgtaattattcaaaaaatttttttgaataaat

SEQ ID NO: 75810 - DNA, 1016 bp, Homo sapiens
tcataaacatatcccctatagatgtatttactctatatatgtcacataaaaacacatataaaaataaggcttataataattaaagtattgacttttctggaggactatataatcttaataagatgttttccttttgataaatattgaatgataatctttaagactaggtaaaagataccatagtatatttagtatttgcattgagacatgtattagtctctttaagagttaatgtctataaatatttaactctggactatgtcactgtcaagtaatattttgggctagagttccccactgagtatctaattttgttgccttattcttttagaagtgttactgtgagcaatagccaggcaactgaaagaaagaaggtgagtgggacccaaaaagaaggacaaaaacagatggaaaggaaataaaataataagaaatttcttaaacagtgtttgttttggatagttttcttgttaagcacatggaaatactttgcacatttgagaatcactgacttacatgctattttggagaaacagcaaatcactcatgtaatataaacacaattatagatttctttgctgtaattttttcatttctggggcttacttttccgtaagatacaaaacgttccttcttacagatcattgcttaacaatatatttggaggattgcaaatttaaattgaatggtacaattaatgcaataaatgatagatattcaaaatttctgaatcctgatagtcttgttgagttatagtctgctctaaagatgaatgttactaatgagaatggactttttagtatacgcctaaagtcaatataatgaagtgttttgaactgcctgtggtcctagatttctaatatgtctgttattatactaataagatcttaagactgaagagcattttatagtattcagtgaacttgcatgtaaatatgcactgtggatattattaattcccttcttttttttacagatatgatcactaagcacaggtggacagtggaaatcagagt

SEQ ID NO: 75811 - DNA, 1337 bp, Homo sapiens
ttatacagaagataggcagaatagcagtgagataggtgttgggttttaatgtttgagagcttcaaattctggctctgtgagttatgcttttgggacttgggcaaataaccttattcatgcttggaataaccttacagtgtattgtttgtgagaataagataatataatgaaatgctcaatctttgagcagccttcttagatgttgtcaaatgcaaagatgagttcctccatggataacatggtagattaacttaaaaacaagcaaataaaaagaaaccaagaacagcaacaaagtaaaaagaaagagagtgattaggtgactggctccaaatataagataaacatttcttaaatctggatgtagaatctgccaaaatgttaagttgtcaaaaaacaaagggaaaatgatctgttttaagccataaataggctaatcagaaataatgacatggtctggtaagaaatattaatgacttttaaagtcattaaaggattacttaaaggataattgcattttccagataacagggaacctaaaactaactttattcttttttgggttcatactttatgggaatttctattaagcagattatcatctagtgaatacatgaaaagacaaacattggtctggtcatcaagtagaattactgggagcagtaaacaagaatgtaaagtaagtcaaagccttggatgaactcatccaagttaagaaacaatctggtgagatcttgattaaaattctgctgttaaagaagctgcttaagtacttatgaatttgtacttctttgtactaccatggtgattaatgtcaatgcatttttctcggcaaggatacacaggcatatctggttttcttttgcttttctttattgtgctctgcagatactgcgtttttaaacaaattgaaggtttctggcaatcctgtatggggcaagtttatcagccaccatttttccaacagcatattctcactttgtgtctctgtgtcacactttggtaattctcacaatatttccaacttttaaattattattattaatatttttattttactttaagttccggcatacatttacagaacaattgcaggtttgttacgtaggtacacatgtgccgtggtggtttgctgcacctatcaaccaatcatctaggttttaagctctgcatgcattaggtatatgtcttaatgctctccttccccttgcctgccacccaccaacaggccctggtgtgtgatgttcccctccctgtgtccatgtgttttcactgttccgctcccacttatgagtgagaacatgcggtgattggttttctgatcctgtgttagtttgctg

SEQ ID NO: 75812 - DNA, 2440 bp, Homo sapiens
aaataaatatagaataagattgttctttaagttatttgttggttaacctgtagttaactcattacttcaccaagaatagttttgggtattatggaaatcttgaagcacatgtatttcaaaatgagttagaggccttaggcatttaaaaaataccaccagtgctgacataatatgagaacatagtgtaggatcttgaggcttttttttacatatttaatgaatcttttatagatattatcaatttttatcttgtctcatgtagtgcagattaatattatgaatatagttggttagtaatttccatgctaatttatatctatttgaagatataacacttgaaaaacacttaaaagtaattgcttttttccaaaagattgtatatttccagaaaaaatgttttctgttttagtaataaatgtaaaaacgttcaaactcatgaacatttacatgaattcattggatatagggagactgtattaaggatataaattatttaaaacatcttccttagaactggaacaataaggttatgttgttcaaaatgttaaagtttaaagaaagaaatttctttgttaagggaagacaaagcatatttggcactatgtatgaacatgcctgttttgctcactgtggagctcccaatgcctaaaatcatgtcattaggtttttttcaccattaaaaaaaatcagtttaatattgaattatttttttaaaaaaatttgaaaaggtctacaggcatcttaaaaattgtctgtacacttgctattaatgaaaaaattagaagaatttcgagcaagaaaatattcacctgaatcaacatattttagtgtccttaatgttgagcaattagctgataagctagtttgaacctgactttcaggatagaatacttttgaggttgtatttgtttttttgctttcaacaaggcaagtcttgatgctagatcaattagcaaatcttgaagaattaacttaaatggtgtggtaattcctgttattagagatatttcttagaactcatgaaattcctccctcccacatgatatcagatgtgttgagttgagaaagttgctgggcagcagtcttgtatatcagagtccagttcaaagttgttagaatgagaagtgtttttaaaatgttatgggaatgcccgaattacaattgaactttgaaattaaaaagaaaacacaagacagtataaaaataaagacctatgagagtgttgtagcaagttgggctttttgtaacctaccgtttaaaatacagatctttgaaggcaggtttttactaattattttattactttgctcttgctaaagacagcaaggcaagtaattatcctcagatctgaagattaaaagtcttatgatttttaaataaatattaagcaaggagagtaatttttataactgttagcacatatgctttgtgtgctagctttttcctaatgtaaaataaatctgaatatgccatacgattggtgacaaataaaaaactctttgtgcaattaagagaaaatctgtttatttaagagctctcaaaggttgtaaaagattatacttggctgtatgtgaaggataaatgttgtgaaataatgccccttagttccccttttataataaatctcagctgtgtgttcagcacaagggctcagtgccaaaaagaacaggttcaacttgtccgtgaggatttgcaccacagtaaagtgcacaactgcttttgtagaggtcattgtggaggtcagggcatgtacagttgaatgaaagcaactttagaaacatggtagatcatagagttacttgagattcaaaaatcaatgttaacttaaaacattaaaaagatggaaaatcataagaaccttcaaatatatttttatctttatctacatatgttaatatgttttcatacagattaaaaataatttctttggcatcttgtgctagtatagttttaaggatcttcaggatattttataattgccaagatttggaagcgttgactattttaatatttgttaaattctttagagtgttcacataatgaaggtaggatatgatggtggtagaacaaagtgtgcagggatatgtgcatggtgggagtaaaggcaggggagtgtggatgagttttaataaaaatatgggtgtaatctggaaaatgtctctacaagtcatatttatcttgagtttgtgatcgaaagattcgaaatttaacaacaacaacaacaacaacaaagaaaatgcagtcttatacagtatgattctttttcctaaatatctcaaaaatacttttatacatttgtgataaatagaaataaatgagaaatagaatgtggagaggctgtaagatcccaggactccagccagtgcattgagtttcatataaagaatacctgaaaagatataactaagtagatgcatagcttacctggggttatatttta

SEQ ID NO: 75813 - DNA, 1055 bp, Homo sapiens
tttagttgtaattatatattatttgaggatctttaatgatactaaccttttactagtgatcttttaatggaagatactatttcctaatttttttccaaccttttcaaaattggttacttttcatttttgaagttcttaaggaaaaatttatattgatataataagaattctaaaattagagttgaaatattattaaaggacatttttctgtgtggaacactaattagagtatgtgtttaaggaggagattacaaatgaatttggctaacaaatctttaaggaatttcactgtagtaaacagattttgatgagtttccagggctaatttgctagaaacattttcagagacttggcttgccaagtgaagatgtatttagagccattttatttctaatgttgagcaagaaacttaagcccttagctagatagttatagaaatttgtctttgatgttttcaagcatatcatgtgtatttgagtagaactgaacgttgctgaagagctagaaaaatatggtgctgtgtctgcaggatgaaacctctttttttattttgaagaagccagttttagaagaaaatttttgtgaaaattggtaatctaactattaggcatcacattttaaaagacaaagagtgctcttaaaggctgatttgtgcaagtatgtcaccattagaatgcttaaaagagcctaccatatatgtatcttttttaccgttatattctgcttattcccaaacatacattcagaaaaagaatgtagtctgatgattctaatagagttgggaatctgggtcttagtcttgtgcatttttttctactggctgtttctttagtatatgtagaatcaaattactttacattaaatttgagggaaattttatgtatttttatgatacattgtgagtcagtggcttatttccacttagtggtcatgaaatgatagcaagttagacttactgtttcagtctcctcacttatacactccccccttcctcattgcacatggtgaaaatgaaacatagagaaattaaatgttgcacctcagttcattctagt

SEQ ID NO: 75814 - DNA, 1052 bp, Homo sapiens
ttacagtgtcagaggtgcctattacaacgtgcctgtaaactagctaggatgatgctacatactattgaacttgttgaagagagaaactgtaatccagatgcaaggatcttcgatggttgtttctcactgctacaattgtattttatgacttttaagtcatgacttttaccttttttaaaataataaaatagataatgtgtactgtgcatccaacttagtaatttaggggaaaaaggaaactaagggatgtagcaacaaaaaaatttataaactagaaattggaggaattaataactgcaagaatggtttataaaaagttatgaaatagagaaattgatagaactataccaagaaaaacaagagaactagggttaaaatcagcaaacacagactatataaaatgtaggtatttttataaattagaattctatgcccacgtggatgatagatatgtaaatctcaatgtaatgatatatacctgagtggcactttattttgctcaaatatgatctgtagggtctttgtattttagttatccagtagttctttcttctcagaaaaatagagtggatgttttcatccaatttagttttcagcataaaattttcttattttatttgtatatgtgtgtgtgatgtgaaataaatacacatttggtaagttagtttgatatcatgtaaagacttcagagaatagatatttatgtggcacaactttgcagagaataattttattagctttcttccctaatttgagctttcaaaaaaaacaaaaacaaaaacactgattaccgaaaatgtcaaagttgtttagtaaaaatagaaaaatgtgaggatagactatgcttgtacacaagggaactttaaaaagtttgtggaaaatggaattaaaagataaatataaaaaatataaactttagttctcaatataagctccatcaggaacaagacacttttgtaagcaatgataccaggcatttagttcatccctaaataactgagggtcctaggaatttaactatgtcagcgaaatctttttttattattattact

SEQ ID NO: 75815 - DNA, 1016 bp, Homo sapiens
taattcatctttaaaatgattataaataagtagcaatatgaaaataataataagaggtattaagttccttcatttttctaacagggtcaacatatttcactggcacctattcacaagcttgaagaagctctgtatgaataccagccactgcagatagagacatatggaccacatgttcctgagcttgagatgctaggaagacttgggtatgtgtcctaaagaactttacattgaggagctgatatgtgggacttattgctgttcttaactgacatgttaacattcttagattttcagtttatagaactttactgttttgtgaaaaatgaacagtactcaataccaaattgttttatttagtacattaatttttctgtggacttgttaggtctcttgagattgagcctggaatacattcgttcttttagaagtctgtccttggcagccatattgaaatggcgtttattttcagtcatgagtgtttttttcttttttaaagaaattggggcttaatttagttagtagtaagccaataaaaatatgaattgggctccttgccatgaaaaagggtagatttactcattgtgcactgtctacagtgaaactacatttatgagccatgagccatgaaatatattttgttgaaaggtataatgtaaggctggccctgtggttcaacagtcatattatatatatccattctggaaatgaacctgggatcctggcttttgtgagggatggagagatggttatagtctctctcatgggagcaagtgggtatttgtatacttgaaaagcgcaggcacagatgttgctagatggagcaaatcatttcttggtctgattttaaaatgtgaactattgaatgaaaggctgatccagaaactgttgttgcttaacaaaagaaaatagtggaaagaatatactgtgaaaaaaaagtgggtaaatcgagtccaagaaactaaaaagcaatagaaaaagtcagagaccccaagaacaaaaacaagaaagatgaa

SEQ ID NO: 75816 - DNA, 1044 bp, Homo sapiens
gaatgcttttatgcatctattgatgtagtttttgaacctaatggtgtataatattattaaaaattttttcaatagcaagtacttcctatattcctagatagctacctacctaaaatagcgtttgggaaaggtagaatttcagctgaaaacttcaagttcaggaaatttgttttaaatggattagtttacgttctaccagtgaaaaataattgaggcaatctataatactttaaaaatcttaacacttaagaaatttaaatttaatcagctatatgaaagcataattcacatacaataaaatacctattttattgtatattccaatgagttttgacaaacacatccagtttgtaaccaccagcacagccacgatatagaatatttgtataatctgctttcactgtgattgtgcttttttctggaaatcacttagaatttttacatatgaaagtgttacttatattccaaaatttccatgagagaatgtggcattctgtatactgctttttggtcatagtctttaccttcgtctttaccttataatattgacttattatatatggattgtgtaagaatggtgaaaacgtagttgtttcatttaagttttgttttgtttttgatgctacccatgtaagtttttttttttttttttttttctttttgatggagtttctctctgtcgcctggctggagtgcagtggcacaatcttggcctactgcaacttctgcctcccacgttcaagcaattctcctgcctcagcctcccgagtagcggggactgcaggcacccgccaccacatctgactgatttttgtattttttagtagagatggggtttcaccatattggccaggctggtcttgaactcctgaccttgtgatccacccgccttggcctcccaaagtgctgggattacaggcgtgggccactgtgcccgaccttaagtttatatgttagttttacagaaagtcttggggcatcagaaaatcaaagaatgtggaaaaatacaaaaatcacaaaaaaactgcaatatgcatgtgtata

SEQ ID NO: 75817 - DNA, 1056 bp, Homo sapiens
atcttggctcactgttcagcagttcttttacttttgttattcatttggttgtcggttagcaaatagttatgaagtgcctactgtgtgccagttactgttctgggtgctgagaaaacagtagtgagccaaacagaggagtaaatgtctactatcatgaagcttaaattctcctgtaataaaaccaacaataacagtacattattgaatctgttaagatgctgttagatgtttctatgaaagatctaacatttgagatgaaacttaaaattcaactgtaataaaaccaacaataacagtacattattgaatatgttagatgctgttagatatttctaatattagaaacacctgttagatatagcagataaaccagggttttccagagaaagaatcaataggacatttagagatacataagaggatgttcatgtttggaattggctcacatgattatagaggctgagaagtcccatgatatgctatcagcaaccaggagaaccagggaagttcatagtataactcacgctgaatccaaaggcctgagaattaagggagccagtgatgtgactctcagtttgaggttgaaggcctgagaatggagacttagcgggggtggaggtgaaagtcatggagtatgaaggcccaagaaccttgagttatgatgtccaaggacagagtaaatgtcccagctccagaagaaagagtgaatttacacttccttcgtttttttgctgtgttcaggccctcagctggattggatgacatccatccacattggtgagggtgtatattttgtactaagacttttgattcaaatgccaatcttttctggaaacaccttcacagacgcacccagaaataatgttttaccagccatcaggagatcctttagcccagtcaagttgacacataaaattccatatgataattagtactttgaagacaaataaaggataaaaggatggatagtgattggagtagtgtgctatttttggtgattgaaatcttttgtaagatggtattttagcaaatacctgaattagcaaagaaatgagt

SEQ ID NO: 75818 - DNA, 1882 bp, Homo sapiens
gagtgcagtggcgcgatttcgtctcactgcaacctctgcctcctgggtgcaagcaattctcctgcctcagcctcctgagtagctgggattacaggtgcccacctgtaatcattacaggcccaccactgtgcccagttaatttttttgtatttttagtagagacagggtttcaccatgttggccaggttggtctcgaactcctgacctcaagtgatccacctgcctcagcctcccaaagtgctggaattacaggcattgagccacgacgcctcgccttatattctcttaagaactactttcaagtagagatgactttattttcattaagtttgtagaaattgtatttctatttagagagactaatttttgtttttaaaaggaaaaacaatcaggagattgagttgttaggaaattattagacatgtatagcttggtgactctttcaacctttcaaatgtaaaacatgttggcttttgggttaaagtactctggtaatttatcgttatcatgttctatgattgtaacctaagtctctcttcttcttctgtctccttattaactgagatataattcatgcttttaatttctctaagtccttctaccatgaattttctagctaaattaaacgtaggaaacaatacaataaggaaaacataaacctaagaaatattagatgttacataaactgttggagattgtcattcactcctattttcagaaatagagattatgataatttaaatttgaaggagaattcatacaatataatgtattaagacatgttagcgttttctcttgaggtctctcccagttatcttggagtcacatgtatctgttaaaataaataaattcattgggtattccccattgtaaaagtaatatatgttcattatagaaaaattttgaaaatataagcaaacagaagaaaaattaccatgtttctactgttgagttattgatttttataatatagaaaatcataagccataagtggtctctgttcttaggaaatataaacccatcacccctatgctttttttcttggcactttattaaatgtcacctctcttcctcctgctttggagtggcactgtcttaagttaggaagccactgttactactccccaaacagttcagcagatgaaaactagatagttggttctgttggtacaaaataaaaatatatttaaactttgtttctaataatattaaattattttaacacgatcagaatgcccaaagtagtcattattctgacgtgaaggtaatgttgccatggttttttgtttctctttataactggttttaaatgtaaaaacataaatcctaaagaacaggaatggaaaatggggatggttttcatttgctacaatttcctgtgagacatggctctaaacaagacccatatttacacaactcaatatagttttacatacagtgttgtattcagcacattttaaaattctttaatttcacttttcagtcattggtttaatactttcatagtaaatttgtttaataacactaggtgaagtttgaaataatttttgaataattttacagtagaaacaccagttaaatcacccttttggtaataaatgtcggaaaaaaagtaattatttttgctgccactgcaaaatcaattgtgtaactgttctttttaaactgacttttacattactaaattttaaacactcctgtaacttgtcagaagcaggttttggttaatagatattttcagtgatgtaatgggaacttttggcagtgagtcagaatataatggactatgattaatgttttaataagtagttttctattgctcatgatgtaaaggagaaatggtttcctgcttggatggataggagaatagcaggtgtgcata

SEQ ID NO: 75819 - DNA, 1353 bp, Homo sapiens
aaggctaggaaatacagattgttagtcaaatggaatagtgatcaagtaagatttctccattgccaaggccacaagttcaacgtataaactcagtagttcagaaatttggaaagttaaacccaggagattttgtgtcagtcttggaatctgagaaagtttataaagacaaactggaagaaatattagtataccagacttgaaggtttgattcacagtttgctttcatttttttgtgatttaattttggcaacttatatgcagtaagtatctgttattttgttgtaggtgaagagtcctagggctcagtagatacattctacttgggaatggtactttactaccatagatactttctttcccatatttgtgaataaaattgagcatttgttcaaatgtacactttcctggaataaagtttatggtttttattcctgtctcaaagggatcctgattcccaatagaggacctagagtagtggtctcaaaccatatatcagaatcacctagagggttttctaaaacaaagattgctgggccgcaccttcagagtttgtgattcagtagggctagagtgagaccccagaatttcatttccaacaagttcctaagtaatgctgatgctgatggttaaggactatactttgagaaccactagcttaatcttcgttaatagccttctagaccttttttgttatattgcatatttttgttattatacatatttaacaaaaatgcttctgttacatttgctacctgtcttaacctactatatcttatctttacattttatactttacattaatactttaaatgatacatgtttatccattgcatcatttacagtatttcataacataatttatttaaccagtcttcaattagacatttaggtcagttttcatttgttgtttttataaatagaatcttgctaaatttttatgtgatcttctaattatttcattagcaaaaaatccctggattaacggatggacatggcatggcacggtggctcacgcctgtaatcccagtactttgagaggctgaggcaggcggattacttgaggccaggagtttgagaccagcttgggcaatatggtggaaccttgtttccacaaaaaataaaaaaaattagccaggtgtggtggtgtgcatctgtaatcccagctactctgcaggctgagaacccaggactgcactccaacctggatgacagagcgagactgtcttaaaacaaaacaaaacaagataaaaacagtagatatatttataaggcccatttgaggtgtaagtgacttaacatccctggcacttgaacactaatgaatattatgactgccactttaaaggaggcaga

SEQ ID NO: 75820 - DNA, 1205 bp, Homo sapiens
agctgcagcagggatctgaatgattaaggcagctgctcaggcttgctttctcactactcacttttgttgcctgtgtcagggaaaggccagggagagaaataattggggacagggactgcatttattctgctgccagagagtatgtgcagctgccgcttccttctgattcaccactaccacttgccacagcagctgggctggaccaaaataggtagactgtaaaagattctgtgataacaaagcccattgcagcactgggtgtaacttgaaatgttttttattcatatttctctaacttttttcttatttcaaaaatatgtctgtagatacatatcgtagacctgaattgtatatttaatatgtaagacccttaatatttttgatttagtcagtgtgggagaatagtactacttactttaatgcatatatatatatgtgtgtatatatatggtgtgtgtgtatatatctataacctttgacactctgaaaagagctgcttaattgtcaaggtagaagattttaaaaacatcctcaaagtttttttttaaaaaaacaatggtgaattaattatatactcccttagatactgagcctactttttaaattttttaattcagtcattttgagaattaagtgtgttatttgtccattgaattaagtttgtgtgtaaatatttgccatttctagaatattcatacttcttactcttactaattttttctgataaaaacttcatattataaggatgttagttttaatcaattttatattatcaagttttctagtatatgtctttaatttttgcttgtacaaacctatatattaggttacattagagttctgttatcttttttcttatgtaagtttagtctaaaataagactgacatactagtttttaattcgctcatatttcttaaatttttgtttcatttgtagtataaaatcacttttttagagaataatatttagtttttcttctatccttgtaaaactacagcagccttaaattatgctataggtgttcattgttggttcatcataaaataattaacacttgcattccagaactgtaattccacttagtacagcatttcatttcatttttttaaaagaggtttccatttttagaaaatttggaggttttttccctcctttaaagacatggttaaataatgattaatatagttcaagaaactgtcttacg

SEQ ID NO: 75821 - DNA, 1060 bp, Homo sapiens
gtaatgtcatctaagcatataatggcaatactgaaattagacaaacattgtattaatctcttgtggaaataaacatctgacttggaagaatatacttaaaatttatcaaatatcttttggcctattagctactgtttattatctgtttttcatggctctatctatctcatagcccatgttcctgagatgttcctgtgtttaaatgtatgtagtatatagacagaatctatccttagaggtctatcctttgagataatcagcactaccaacaacattgttcatagaatatattatacttaagtagctatatcttctgtgtgttctatagttcacacttaaatcaaggaagtaatcctttcattatgtaattatattaactgtcagtaataactgttctatccaaaatacctggtgtgctctttgatagcaataaattacacagttatagtataactggacttatactccagttataaggcagaaagtcttctccgagcaatctatattcagttattaaatatgagtaataataaagcattgtgttcatttggaaaccatgtgtcttttaatttccaaatatgagttttggtgtttgattggtctaaatgtctggcataactattcactctctttccaagtgtattgatgtaaatctgaattcagttttattattagtttattcaaattgtattctcactagctggctagatggtaaagtgtaagagtaacatatgactgcctgtggaagtttgttacatttttgtttggacttcatgaagccatatgttttttgttttttgttttttttaagatggagtctcgctctgtcgcccaggctggagtgcagtggcgtgatcttggctcgctgcgacctccacctcccgggttcaagcgattctcctgcctcagcctcctgagtagctgggattacaggtgcgtgccaccacgcccggctaatttttgtatttttagtagattcgggttttcaccatgttggtcaggctggtctggaactcctgacctcgtgatctgcccacctcgccctcccaaagtgctggga

SEQ ID NO: 75822 - DNA, 1006 bp, Homo sapiens
caaaatgtgatgaatcaaaacagttagttgcacagtggtttgtattacagctatgaaaaccaattctcatttatgatgtttggcttttcaaggttgacaaacattctactgtggtgcttgaattttaccataagtgaacatctattgaagctaagactatgcttttcttttgaggatctgaggaaaggaaagggtgatacattatcatctggtgtgcggataaaaattagctggaaacttgtatcaggaatggaacatttcatttccaagttacctataaaaatattactcacttattatttgtatgatagttattgaattccctgtgaagccaggttaatttttagacctttctgaggtaacttaacatttacttcatttctcatgcatcagaatcttaacagttgatactttattgtgtcttggaaagtaataagcagataactttatggccatggggtaggtgtggtgaatccctatttcaatcctatgcgacctaaggttctatcaagagtttaacaacgactatttttcttttttttttttaaacagggtctcactctgttgcccaggctggagtgcagtggtgcgatctccgctcactgcaacctctgcctcatggactgaagtgattctcttgcctcccaagtagctggattacaggcacctgccactgtgcctggctactttttctatttttagtagagacggggtttcaccatgttggccaggctggtctgaaactcctgtcctcaggtgatccacctgcctcggcttcccagagtgctgggctcacaggtgtgcgccaccacacccagacaacaatgactaattaataatagtagtctctaaagtgggatgtgtcccatgaggatatgtaagatacagtatatggagaaaatattaaaacattcattcattaatttatttagagatggagtctcgctgtgtcacccaggctggagtgcagtggcgaaatctcggctcactgcaacctccacctcct

SEQ ID NO: 75823 - DNA, 1022 bp, Homo sapiens
aaagcaagttatagaacagtatgtataaaatagttctcgagatatatttaaaccttctaggttatacccagaaagacttttagttggcagaaatttgcagaaacatttccacctctgtaaccttaataatttggccggaagcatctgatatggttgggagaaggaaaaaaaatatacatacaaattgggaattaaggtcctggaaagcagaagatggaagatgtatctatctatgagatttatagaacttatgaactttctggcctttgattcttcatgcataaattaatgagtttaagatgatggctgaggtcatacttcatgactgtaacttaagttttattttctgttttttaaggtgtctactacaatagacccaaaagaaacgttaaaaagtcttttgttcaagaattagcttcactgtatatatttagtttacccatgaaaactcaaatttgggaaagagaatctgggaatgattcattctatacactggctctaatttatagacatcaaatttgcaaagttcaagtagctgtcgaaaaacatagtaaaatacctcaaaattgagtgacacatctaccatggctcccttttacaaacacaaaactaaataaggagggaagcttgtttgctgcatagaagtactgtctgcaacttggctacccagcatgaagatatgggtggtgtgttgtttcaaaattgtaggtcttgccttgtctatctggtgacataagagtataattaagccagttaattggcctgtctgaaaaattcctcatgtgatatggtaactactttatggccatggccctataggattgagatggagagccatttggctttaaagagatgactttttctcacgaataagtctaatgcagtatattaactggccttaggaatagcataaacaccaggagtctaattaaaatgcctttaaatgcactgttgtttggctcttacagtagtaaacttaaatgtgtatgtgtttgcctgtgtgtatacacaacctatccaat

SEQ ID NO: 75824 - DNA, 1021 bp, Homo sapiens
cctgggttcaagcaattctcatgtctcagccctctggcatcttaagagacttcctatgagttcctgcctccaaacttttttttttttttttgaggcagtcttgctctgtcgcccaggctggaatgcagtggtggatctttgctcgctgcaacctctgcctcccgggttcaagtgattctcctgcctcagcctcccaagtagctgggattacaggcacccaccaccacatccggctgatttttgtattttttagtagagacggggttttacagcgttggccaggctggtatagaactcctgacttcaggtgatctgcccacctcggcctcccaaacggttgggattacaggcgtgagccaccgcacctggccagataacattttttagcatactgtcttcatggtgctgttttaagagatttgcatgtattattctcacaatagcaatgtgaggtagaaattgttacatccactttagagataggaaactgaggcactgagtgattaactagcttgcttaaggttgcacagctagctagttagaagagctaatattcgatttaggcaagctaactccagagtccactttcataacactgtgctgccatttccccactattataggaacctggaagcttattttctggagaaggtaaactaaaaggactcagcaatcatagatattaggtgtagttaaggccaagatcaccttactgaaaacagggagattaagtgaaagtctactaactgaaggagagtcccagttagtaggagttctgagactgctggcagcaagtcttctactttcacttaagggattggaggaatattttcaacagaatttctcctgcccaagagaaaagacctacaggtaaaaatagttgagggcccttcaagaaagagctgagtacctcctgtttaatcatcatatagttaagcataccactcaataagcctcttctgtgtacacagagcttgtatttagtcttttaatgcatcacacttacgtcaagaaatagcca

SEQ ID NO: 75825 - DNA, 1047 bp, Homo sapiens
atggttgtgagctgtccaaactatattttgatgtgtttttcttcttttgatcagggatcatagttcagtaaacccacagttaaactaagtgggctgatcgtatgggtctatctaaagtgaatttgtgtacttgtctcatccttcttattaatgagtggttctaaactggacttggtttttctcccatggggcatttggcaatgtctggaggcatttctgattgtcacagccggggattggggagggcagggtgaggcaaggggctattggcaggtagtgggtaaaggccaggaatgatgctaaacattctgcaatacacaggacagcccccaacaacaaataatgatctgggcccaaaagtagtggcaaggttgagaaaccctggcaacattatgtgtgtgctccccttgtgtagtgattcctttgtagtgtttgccttgacattagattaagtgttcccttaagcagaagctgaattttttgttattgagttgcagtgaaggatgggtgtgaatctctgcagggttaaacatttttacattaacctttcctttttatttttatcaaaagtaatatatggttacatgtatgtgtgcatgtgtgcacacacttatgcagaacttagaacagttccccacccattcttccctagttttatcgcatttcccagagttagcaacatgtaaagagttttgtttttaatttttttggtgattgcctctctaagtctaaataatagcttttggttatctattgatttaagagattatctattgactcttcactgcagaaggttagcaaaagctcagctacactaatccctccccttcttccttctaatattcattagtttatattcgattgtcctttcattgattattttgtaattctaaattaaatacatataaacatttaattttgttccatcaactttagtcagtatctttttatcttctgcctttattatactagcgcttctgttctttcaccttccttattcctatttcctatagtctgtctgctgtacctttacattgtcagattgac

SEQ ID NO: 75826 - DNA, 1033 bp, Homo sapiens
actgtcatttcatgttcatatttcctgcgttgcttgtatagcagcaaagtttaaagagtagggactgctgagagtcttcttttcctaaacctcttagagtagttgtgttgtcattttaatacatgcaccaaaaaagttcatagtaggcaggaacactagacaaagcatactctgaatgaggagttgttgtttggttgcttgtttaaattttctccacacttccacagttgggttgaaacttaaccatttccttctatccagatgttatatagttataatatgggataatattatgataaagaaattttttgaaatgttttgaacttgttaaagatttatttcaatgtctataaattggtatttattcaccagacaaatatttattgatcaaatactttgtaccatgtactgtgctaggcattaaaaatataagtaggtaggcaggtgggtagatagatagatattctagctttcaagatattaaatgcttaaattcagccaaagaatgaaagaataatcatcaataagttaatattactgttttttgcaatatattaattgaaaataaaaccaaatttcatgtatacctactactgacagtaggtatcatttgtactgaagatagtatacacaagttcaaaatagtcttttcacaaataacttcgacattttggaactaagttttacataggctgaaatgcagaattttttctggagagcgttcaagtggcaatcaccacatctccaaagacactttgccagattttcatatcattagccctcctctgcaaacctcaaggctcctaggtcctaataacttagattgttttcagtgtaggcaaatgctgtgccactgatagaattcctaacaaagatgggcatgaaagattatctgttcccaattcatgtagaactgaatgattctagacagctagtcagctccaggcatacgttggggttccgatccattaagacttgagtgattgaaaggcccacatggaagcacagtgttttactgtttcctctaagcata

SEQ ID NO: 75827 - DNA, 1044 bp, Homo sapiens
ctggttggtcagttgccagaattctagaaaggattcttgcatttggaggtggataaatcatgagttttcccaactcttaattttgttggtttgcttgcttgcttattttagaacttttttttaaaaaggtgatttagagtggtcacagcagtttttaatgtcccttaaatttagaaaagctagtaatgcttatttagtttttagaatgatatcctcatgattttcttcacattggttaaaagtgtattaagtgcccagtcagtaataaccaaatacatattttcagagttttttctgtcttttttcgtagccagatgtacataaaccatttctttattataatagaattggaagcttgctcttgtgagcagaacactagattggaagtcagataccttgaattctgtctactccagtctctgccattgggtagccatgtgtcttgtggaaatccctcactctcactgtcttggcttcagttccctctttgttaaattgttggacggtagagtgggaagcagggagtttaaggtcccttcttaccccaaaatttgaattcaaatttggcacattgggaggcatattaattattttaacgtattaacgtattttattacaggaaagttcaatgcgagggttatacttggttcaaaagatgatttggccctttcttaggtatctttaacaaatcaataactattgccctaaaagcattcatggatgctattttttgtcactaagcaaaagggaacttcagttcttaggactaccctttagaacctcctcttaggttaaagtctaggaaccctagccttaaaaagtagtttcttgattgatatatacagaatctgtggaacttctagtccatgtatgcttgcaaacaacatacttatttgggaggatatttaatatactgtgtcattatattaaataagtatatatatatatatacagttttattataataaataagttaatcgtacaatgaccaatgttacttcattaaaatggattttgattattttctttattaattggaaatat

SEQ ID NO: 75828 - DNA, 1035 bp, Homo sapiens
ttaatcaatttttccccagatttttgccattgaaacttgactttcatttttgttcttagcttttgtaagttttgtaaggagaaagtgaaatgtttcctgatatataaataagtaataaaattaatgtgcacacaaagtatactctttattcttttttttttttttttttgaggtggaattttgctctttcacccaggctgaagtgcagtggtgcagtctcggctcactgcaacctccgccttccagtttcaagcgattctcctgcctcagcctcccaggttagctggtattgcaggcaactgccaccacgcctggctaatttttgtattttcagtagagacaggatttcaccatgttggccaggctggtctcgaactcctgacctcgtcaaccgcccgccttggcctcccaaacactctttgttcttcatgggcgtttcctttttggccccaacacatacacacaaacataatctctgggaggaaagagaatcttactctgttaaattgaagttctgactacaaatcttctgagtttctatatatttaagcttaaactcaagtatttacatatgaatgagttctgtattctgtaaccatattaaaacttttcctagtatttttatagaatttgtttttatagctacatcagaattaggatcgttattaaagtgctataaaaggtagttatttatcggactctgttagattaaatgtgagaaataatgctagcttcaggttatgattacataatatagatgaaccctgttaataaaatggaataaaagttggaagttttgtctttttaatatatttaatggtttatattgaactttctctaatctttttagagactaattttaaatgtaattcattatgtattcttttttatcctataattatatgtgttcataatgcaggggtgggtagtagagagaggaaaagaaagggacagagggaatgagacttctctgttgtggggaggcatctttctctagtaagaaggaacagataatccagttactagccataccta

SEQ ID NO: 75829 - DNA, 2978 bp, Homo sapiens
tcttttaattattaaaacagagcttcctgctgctattgcagaatttttgactggagactatagtaggtaagaaaaagtattttacattgtgtccgttcatgtattaatttgataaatatgtattaagctgtaaatggcaatacttgtagtggcaggtaaaataaatgtagtccttgccctcaagacagttacaaattaggcagaagtgaagcagtaatagaatagaaactactcagccaatgtttgattacccatatgaaagcgctgttctgtgaaccatatgaagcaccagatataatccttgcattccttgggggtgtgagataggctaagacaggtctgagattgagatgctcttaaggaggaataaagggtaaatttctggggatatgcaagacacaggttggggatgggagaaggttgaatatactgacagtacgggtcttaaacaaaggaggggagtgaatgatattgctgtcatttctcagcaaatcatagtgataaaaaatgtggcagttacaactatacctgtttgaaattcctattatataccatggcaaaaaaataaattatttgcaaggacttaattgtttcatttcctgtttttgaacaatattataaacaatactaaactacattgtatctcttttatctttctttaaaaaatgcatcttacatttttgactcacctctttatagggaaaaaacaaaattaattgtacttttcactgtgtagaacaagaacattctagaaaaaggaacttgaaaagacagaataaatcattttaattgccatcaagttatttcacatagttaagtttcaaaccacagtacaaaacctgtcagacttttagatttgaatactgggttgttctgcttcaataattgaacttgttctggaatgcaaggaaaggtttcaaaaattagtttttagcttttacatttcagcttccattaaagaattctacttagacaactgcaaatacatatttgtaagaaaagtgtggtgtactttagatctgaatagaaaccatcaagaaaatgtagttaaaaaaagacaagtagaagtcctaaatgatttctcttcatcagaagatattgttcctttgtatgatactttacagttaatgaggtttccacatgcattatcacatctgatactcaaaactaccttattttatctacagctttatctagttacattttgattttatgcttaggttgataaacaattcctataagaaatagctatgtgaaattcatttttgtatctgctgtaaaaaacattgagggcaccttctattactcaaattctatgtgagaaatttatattttagggttaagaactcaaggcaatatgaggtagaataaagagggctagactaagagtaaggagatatgtgttctatccatttaatattcaataatctcaggaacttaatttaacttcttttgactatataaagtacttggagccttaggtttttttatgtgatataatgggggtaccaatattgccttctcaataaagttgctgggatgatcaagtaagatatatatacacatgctaatagcatgtgtataaacaagcatgtgtgtacacaaacttacagcacagtgtggagaattaaggaattctaataattactatattaaacgtggtgtttccctttttgccctgactgccaggaagctcagagtcaaatgtgacacatttgaattaatataactgtgttaattccaacagttgtcacaagtgttttcttttttcttgatcctgaatttggtggctcctatttatattcttttattgtcatatgtcggtggaaagaggagggattagaaatatatgtaatattttagaaataattaaagtagtatgtggcagaactggtattgaaatttaggtcttctttctctaaaagtgatatttttaccgtagcttcattttaaataattggcaaatgatttacattgttgcattgatttttttgttttttaaataaaaattaaaatgaacttccatctcattcatattaatagaaaattgattaaaatgttatttttacatgttagaaatacatttttaaaatcatatacttcaaaatactgtggtcagtttgcatcatctctgttatgttttaaaattgtacatctttttaacaaccttatcttgttttaaatgtaatatatattcatttatttttggctaattatattaacttacttgaatgcagataaatcattagtcttgaaagcttgatgctagaaaataagtaagaaacaaaatatgataattgactttactatccataaaggacagtttttttctagatagacttacagtaggcagtatttcttctatgagagaaacatgatattgataagcttttattttagggtttgatatacaataaattttaattaagatctttcaggtatgctaattttctgggttatctgcgagcttggtgtacctttgaaatataaatctttataaagatatcagaatgaaactgtgttcataatattctaatagaagtcagaagctataatacttatactgaactttcatgatatatctatatatttcatagaataacttacatttttaaaatctgtggctgttaaagttggaagctctctgttaacatttaatgatcttgtcggggaatatgattgacacaattaagttgtcttgcattttagttacataattgatatgggatgtgagtaagatcctaattcagaacatatgatactcttgttccattcctttcgagaatgaaattaaagcgacttataaataaatctggttttcattaaaatatggaaaaaaacatctgcatgccaaagcatttgcaatacagctaaggatttatactctatatttcatacttggaacatttttatcatacaggattaaatccacagatcaaacaagttctctaggaagtataaaggtttttactctaatt

SEQ ID NO: 75830 - DNA, 1034 bp, Homo sapiens
tgagcttttcataagcttggttcaactctttcttgtttttgaaaatgcatgaaagaaacagccatatgtaagagcagaacagcacatcagtagttaagccatattaaagatccagatttcaaagctgtcaaaacaacctagggtgcatttaacttaggctaagctatcttctgagacacagggataaaataactttaaattatttaaacaaagtggaagtgactctgattttagtatatataagcatttattctctattgaatgctcttaaaactaaaaacatttaacagtgtttacatttaatcatttgttgaatttaacaacattaaaatcattcctcttcttctctccccagttgtctgacttatatcttacagataagtgaattgaacatacactttgtaggctccatattgaaaaagaaaaaaactaaatatttccatcatcatttgattgttgagaagtgtggttagaagtggcctacatatgcaaatgaatgtatggatattaaagagaatcagtatagataacatattgaatttttctctcacagataattggcaatgcaatcattgcatagataggagtaatttagttttcatagccaatagcttaaagcaggttaaatgtattgatatgatatgtctactgtagttttgtttctgtcatgacagatactctttaattcaatgcagatttctaatgtagcagccatatggaaataatacccatattctacatttattgtaatgccttataaaccatctgctcagatttttacctgtgagcacagtttaatctacagtggggcaatgaagaatactctgtatgcttttttaaatactctttttaattggcatgtttattttattatttatttatttatttattttgagacagagttttgctctgtcacccagggtggagtgcagtggcacgatctcagttcactgtgacttacatctcctgggttcaagcaattctcctgactcagcctcccaagtagctgggatttcaggtgcatgctaattttt

SEQ ID NO: 75831 - DNA, 1037 bp, Homo sapiens
tggagaacagtgtgtgcaatatataaataagtattgatatatttgcttcagaataagagtctcaagagttgagaggagagaaggctcactgagagctagagtaaagaaggattttagaggaaatacaacttgagttgagccacaaaagaagcaaagggcttagagcagagagaaggaagggaggccttttgtgcaagtgaacaaatatttttaatacttagtctcctttttccctttgtcattccaaccccaagacttaccttcttaccaacctaagcaaggacttcctgttaatctttcctctctgttgttgggtctcgtttcactcccgttctgtacttctgctttgtgggacatcatctctatccaccccataccaccatacaggcttggagttgggatggatctttgcagagaaattagctgtagtaactgaactgtctattaatataaaatcaggctacttcttatttttttcaaattaataaaaattaatgataatattgcactttggagcattgctttgaaatattttgatttgaaagcttaagaaataacaactgataaatgaggcagctcacatacagagtttatctaggtacctggtgcacagcaagtcctcagtaaatgattttttctgccaacactaccactgttagttaggggaaaatataagaaactgaatttgggcctgtgcagtggctcacgcctgtaatcccacactttgggagcctgggacaggcggattacttgagcctaggagtttgagaccagcctgggcaacatggcaaaatctattctctacaaaaaacacaaaaattagctgggtgtgatggccacacacctgtagtcccaggcactcgggaggctgaggtggaaggatggtttgagcctgggaggtggaggttgcagtgagctgagattgtgttactgcactccaggctgggtgacagagtgagaccctgtcttaaaaaaaacaagaaaagaaactgaatttggagcagtttcaccctcacctcatcctcatcgtttttttt

SEQ ID NO: 75832 - DNA, 1007 bp, Homo sapiens
tctacagtaatttttttcttggtgaggtttttaattaagagtgattctttagttcactcattaacttaatcctaaaagtatatgttttccttatatttgttttatcactgtgtaaaattttgattaaattagtcaaaatccaaaactaggtaaataccaagtaggaatagaaattgtgtttacatattggtctcctacaaagaacaaatacttcctttattctttcttgtccttttgtgcactgggattcaccctggagcaaacatttacagagtaattatgtgccctgaaacaacagcaacaatggtaatattgacagagccacagctataggtctgataacaggatggccacaattaagagtaaaaacatgaaacattttcattgattaattctgggaaacagcatccctctggatttcttttaatgttttttttgtttgtttgtttgtttttaccagctggagttccctagctatatgctcctattccagccagctttctccacattaaccaaaaataattcagatctgtaaaagtaaggaggggcagcacttaatgtgtacatcagaaatccctgagctccttctgagtataaagtctgtacttatttcttcctgtggcctttccataaactgctgttaaatgtttctctattcactaatacctactctacaaataaccatattcctgtgtgacagtcactgaaaacatcatgttcctgttttgagttgcacttaaaaaaaaatgccttgatgctgttggaattttgaaagttgacacaggagtacccttagtctttaatgggggagatctctacttaacaccctgcagtctccaaccgcctccctaccacaggtgaccatgttaaatgttgaccccattctaaccgggaaaagtcacagaagcagagactcttctattagcatcttatttaattgaaatgatactgacctatttcaattcagtttcttattaattttataagaaatgatctgagtgctgatt

SEQ ID NO: 75833 - DNA, 1024 bp, Homo sapiens
tatctctctggtcccaaaagggagattaccacatcttttacatggtaaagacctccaggtgccgtaaagatctaggtaggataattgacaagccaggaaactgagcaatatatgaaatggagaatttgtgaattaaactctcattttcctagtccagcctcaggaaacactacagcttcctctctcctaacccccttcagatattttaagactctaggcattatgtcccaagataggtcttcatttctggaatttcttttgtttaagagcctgaagttagttaagtggaaatttttttagagcagaaaggagaaaatagatcaccatcgtctatttggtaaagatggtattttcacttaaatggtaactttttttgctttactctgactcttaagtattctaataataaaaacaaaacaaaaccttatatttgtatattacattggatctcttaagagtttgtaggtctagaataaatgatattcattcccattgaaagagatcctaatcaaagatgctggcaatattaaaatgtgattaatattttcagtattcccttggattgagttcatgaaagcaggttcaagagcattaactattagtgctgcttagagtaataagatacatttaaattgtgcgtacatttagaagacagagaattaaaaaagagcatttctaaaatgttatttttatctcatttaaatattatttatcttatgtaatttttaaaatcttatccagataatgtagaagtagtgattgtagtaaaagcagcatggtatgggcagccaaataaaaaatattctggctagtacaggcaagcccactatcaaataaaatatttgctggatcacaagtgtttttctcttttaaaaaattcttattttataaagagaagactcattaaagatgaaataaatgtaatcaaattgattttttaaagaactgagtttgttgtcaaatgaaataatggtttcagtagagtggcatttaataattttgtctctttaaaatttttttcaga

SEQ ID NO: 75834 - DNA, 1040 bp, Homo sapiens
tattgtgtatctttttacctctaaggctttcggattgaatgacatcctcttttattaatcctttcctctcatcagtggatcctaagtgttagtttaaaacaaaacaaacaagagttagttctgtccaagttaagaatgtttcctagaagtgtaatctttgaggctggcctgtaatcccagcactttgggaggccgaggcaggcgggtcacctgaggtcaggagttcaagaccagcctggccaacatggtgaaaccccgtctctactaaaaatacaaaaaaaatagccggacgtggtggcgggcacctgtaatcccagctacttgtgaggctgaggcaggagaatcgcttgaacccaggaggtggaggttacagtgagccgagatcacactactgtattccagcctgggcgacagagcaagactctgtctcaaaaaaaaaaaaaggaagaagtgtaatctttgtgtactaatttcgaatgaggacttctagtgtatagttattgatggagttgttcttgaatgaggaattctctcgaccagcttaggacatacttgtttctttacatataattcagatcacttattctacctttgtcatttttgtcttttagtccttcaaagaaaagaatgcagaatgttaccaatacagcaattgctttaagttttctcatttattttatatctgcactctttgggtacctcactttttatggtaagtacattttaaaattatagatgacaaaataatagttacatagatggcctcacgccaatctatagactttacctatgccttttattactaagttaatttgctcagatcaccaaattacaatgcagtactgtggtggctcttgaggcctaaacaattggattatctttcttttagaaaggtagttcaggtttaagattaatgacttcttatgaaaattttcttaaacacttaagtaaaacttcaggcttagggacatgattctttctataagaaaaaatgtgcaattttaatgattctgtttttcttaaattttgaattcaatata

SEQ ID NO: 75835 - DNA, 1052 bp, Homo sapiens
gaatcataaccaagaaaaacctttgatcatatctttctaccaggataacaggagctttgtgtcataggaagaaattgctggttgaacctgagatcttataagggctagcctcaacttaaggcttccaattcattttacagatgaacaactaaagcccagagaggtgaagtgacctgtcacagaattaaaggcaggtttcctgaatactaatccagtgttatttctgctactttgtgataatctttgtaaacttaataccctgtttgacaatgtgtattaaacaggacagcctcctgacttcaatggcatatataacttgcagagatcaccattaggccctttctgagatttgtagagatttgtctgaatccagggaagcatgcaccactctatccctcacatatgttatggctcagttaagaacacagagtgactggctcagaagaagtgttttcatcctgggaaagtagaaagtggacatgtgacatctattttgaatttgtaataaatctagttcttcaagattcaggagctgctttggatccttttatccagagctcctaaagtttaatttctaaatttgtcagattaaagggacttataggtatgtacctagattaatgatacttgctctgattacagctgtgaaaggaagagaaaagggttcctctggtgagccaggccagtgcccaaatgttgcataataaccaggccatttaaaaagtctatgaggttgttaagcaagaagtgttaatagctcattttatgattcagaaaatggaaataaaatagtttgccatatttctccaaagactcacaagtatctcacagatttggaaatagaatccagatttcctggctcttcttagtctcctacttagtccaaatcccacattgtgtaaagtatgtttttgatactttggacaattcatttctctcctgtttccattatcactagtctagttcagattctctttacctctcagtgattgtaacagtagctgttatgcctgtttggggtctctttttcttccaatccgtactcctgcttt

SEQ ID NO: 75836 - DNA, 1054 bp, Homo sapiens
acatcagcacacattcattgactcatgtaatgttctcagtaaccctatagtttagtatatggccatccccattttaaagatgtaggaactgagagactcagtgtaagttgctagttactggtggggtttgaacatgttctatgtcatcacagtttagaatctccatagctcttgtttagaactctctggccacttacatgtgtatatcacactttctatcatagctatgtgtattcatctcatctcttcttaaagttccctgagaacagaggtatgtttccttttgtttttggtttccctcaaagtatcctttctgaaacactctcaaattaaaaggcaccattctattttaagtacaaactgatattttcccacaaaacactgatatccagtgtttctgagcaccctcagtcttctttccccttgtctgggttgaggttagggagacattgtgagaatgcaagaacactggagcaaagcttggtcggcatgtataaatcctattgctgaccaccacacactggcctactaagtaagacatttccctaacacttctctttttttcataaaacatgaatccacagatgaaacgtaacatgcaccaagctctgagattctagaaaacgttgtggtattgaggaaaagatgctgtctctagcaccaaaaagaagtaggtgtatggcactgcccctttgtgttatgtgatcttaggcaaatcatttaacacttttggacctacctgcgtattaatattgttatcatggggactaaattcaacaacacgtgtgaaagcactttataaacaaacagcacaaatgttcaaacccttagattatggaaaagttccaaagagataatttagtatacatattcattgtcataatttgagaggttctgcttattctggtttttattaaaggaaaaagggtgttaggtttcaagaagatatttaattaatgtctctgtgtttcataggctaggggaaaggccaggatttggtaatgggaatctaaaatctgttatcatccattagtgcaaaggaaaacaattttgt

SEQ ID NO: 75837 - DNA, 1042 bp, Homo sapiens
tgctttctctgggcattggtacccatacccaggtgtggtcagttggagtaactcctgccttgctgggcttaactgtggtgtttctgggcctaaggcaattggaacatctgtagtttatttcctaatcccaattttgtggaggtttgtgttctagctttgattcaattactcctaagtagtggcccgtattaagtagaggctgtgtgagacaagacacttaatgtaggccccttggagctgctgggtccttttcatcagaatttggctaatgatgcctctctcttttttacacactaaagcctaatataactagtaatgaacctcattaataatttgtattggcagatgtgaggtgtcacacattaaaactgttttacaccatgagcattgacttcattcggtcagtgagggaggatgcaaccacctttgccaaaataggaaggaagagaagacccagagttttcagggaacggaattaaatagcactttaacaagcttggcggaggcagtggggtgaggagaggaagttaataggcccagggaggagagtatctcactggtttctccaagctgattcttctgggtgccaagagagctgtggaaacccacagaggaatgccccggttcctttccttccttctttctggtaagggtttagatctatttatttgatggtcagccttccagttttatcagcaccggtctctttgtacaacttcccaaatgtacaaactccagacagatgagtacagttggtgttttccggggagggtgttgctccctgtggtctgtcacagccagagagcagggggccagagagaggactgattgcccatatgttccacatgagtcgtcagtggtgcacccagttttaaaatgctctgggggtgtgtggccatgaagtggattttgaatgaatagaaggaaaaagctcgtggatgaaaaccatgagccatttgaaccgtgtgtggtgtctggaaaaacaggtggtctggcaaaactgacaaagtttgcttggggaaacagaagctttgcctccacc

SEQ ID NO: 75838 - DNA, 1099 bp, Homo sapiens
aagaatcacatggatgaagcaaatgatgataaccaaaatataatgtatgggagatcactttataaagatgtaaggctatacaataatttaacgtgtttttgaagtaacattgcaattcctaaggggaccaaaatgaatggttggtcttaatgggctttgtctgaaaattgactggaacaattgcttccaaacagaagatacttggaatttcatatatggaatatagatgagatggttggcatttgaccatttaattttatcagtcaatataaaatgatctatattattcttaattttcacacttttccatatttctaatcctaatatactcatttgttgccttttcccacttaattgtataattgcagttcccatgttgcttataatagctgcataatatttcagtcactggtttacataatttaccatcttcttattgctgtttctatttgtgtgtgtgtgtgtgtgtgtgtgtgtgtgtgtgttacaaataacacttccgtacctatagctgtttctttttcttttcctttttttccccctatatttaggggttgttttcttagggaatatttttttctgaatgcgtgaggaacttaaagtttattctataagcatttattcagcatctactgtgtacagggccctggagatacagagatgaattttagaacctgtgcacaagctgtctccatttcctggactctcttcctccctctcccttcacctgacgaattctccatttaaatcccactttgccaatgaggcctttatgtattccccagagtattttaggcttttctgtactttttcttctcatttagtcacagttatattgtgtacatctcagaataactaagattacttcatttttgccttcctcattagactattaaacagtaaactctgagaacaggttttatgtctgatttattttccttggtaccctcagtacctgggacattatgtctggcatataccaggcacagaaattcaaatgagtacttgcataaatgaattagatgaacaaatatttgaatatgattcttgccttgagaaatttagattagaactgaaaaatggattcaatggataattt

SEQ ID NO: 75839 - DNA, 1039 bp, Homo sapiens
gccagtgattcccatgtctctgccttgcactgcctggtgaccagattctgctggttgtcatgtgagtatctgaaagcctccttaaattttccaggagctgaatgcatgaccatttctcctaaacctccccttcttttctgaatttagagaccatattatatatggtggttaagattggggctctggaatcagatttggatttgaattggggctctgatacttcctggatgtttgagcttgaacaagtcacttaattccctgaccctcagtgtctttctttttaaaatggggataaaaatactatccatctcagaaattcttatgaggtagattgtaatgcatttgtacagtgcctggctcagaataagactggaataaatgttagctgctgctgttctctttcagtttccctcatccacggagacatccaagccagaaacctgggagtcatctctaatgccattttcctttagctccttaatgcctgttttctttagcttccatacatagccagttacccagtgtggctgatttctaatcactgtttacttcttccttctggacatttctgagttttcctttctcttgattcccattaccactacctgtgtgaggcctttatccttactttccaagatgaagccacagcctcctgcctcctttatgttcctgtgatcctccctccagtgtgttaccaggctgcctctctgtgtctaacagggtttccaccctggttgaagccctcttgtgatgctccattatatgcaaatcaaaggccaatctccttagcatggtattcctgggtgtcctcctggcccttggtggcattctagcctcccttttaccacttcctgattccggcttcatccttgagcaacacagtcttgctgtgttccctgtgcaggccctgctctttaggctctttcccacctttgttagcgacactgcttggaatgctcccttccctgcttttgacttagtaactcctcatcctgaggactcagctcagctatcacctcctccaggaagccttctctga

SEQ ID NO: 75840 - DNA, 1008 bp, Homo sapiens
ggttcttctagtctgtgacagtttctcagactttccttggttttggtgagcttgacagcttgacaagtcctcgtcaggtattttatagaatgtccttcaaattgggtttgtctaatgtttttcctgtggttcaagggttttgggaggaagaccacacaggcaggcatagtaccacatttcattccatcatgtcatatcaattgcataattagcttttacatgcatacatgctatcaaaacgacctatcactgttgatgtgaaccttgattgcatggctaaaattatgtttgtcagatttctcacataaagttcctcttccccttctttccatactgtactcttgggaaggaagtcactgtacatagctcacactttagttgtggagaattatgctctacctccctgagggaggtagtatttagagaaattattgggaattcctctgcttgggagatttgtctattctcccccatttatttattctatcatttatttgtatcagtatggactcatgcatattttatattttaggttataatctaatatcacatgattgtgctcctcaaattgtttcagatttggtttttgggagctgtttcaataggctcctgtgtccctttgtgacatgccacccatcctggtgggtttttgttgttgcatgtgtgctttttaaaatcacatccttattctttctggcactaaaagatgcccctggctcactttgtatattctttgccccatccctagaatcagttatttctccagggaccctggttccttttgttggagaatggttttagaaaccaagttctgggcactgcgtgtccttgttgctactgaggtgtcattgcttttaggtctgttcagctgacggaacagagaaataggtgtatactcacccttgtatatacacatatctgtaaatatttctatatgtatccatctgtatctatattaagttgaacatgagttcatgctaatgttttcaactccgatacagtgttaca

SEQ ID NO: 75841 - DNA, 1036 bp, Homo sapiens
agcagcctctggagggcctggaacctgggtgggaaatttgaactttgttgatcggcagtgaattaccatggaatgttttcgattatgggggcaggactagagtgttagaagagtcctctggtggtgggtgcaggatggaataaagtcaggaaggaagaaataggcccaggacttgataagggatagtttgagcctgagcaaaggtctgtgttaggatggtggcgaaggcaataggaaggatgggcgcaccagctgctgtcaagggggccagacgagtccagtcttgttggcacggtgcagccctggttgactctgctgtaactggctggactgtgagcttctgataaatgtataattgctggatttaatttcctagtgtgcacctgtgtcgtccataaacgctgccatcatctaattgttacagcctgtacttgccaaaacaatattaacaaagtggattcaaaggtaagaggatagcagtttgctgattaaatgtgcgtgtgtattgtgtatgctgtgtaccgccgtctctctccctccctccctcctttcctccccctcttttccttctccccgtccccaaacctctgctttcctccccctgccacctcccttccacattctttgaagccaagggttgtattagaatagaaatgtctctctccctttttttaaattatggcatttatatttctgtatttatgtggcatcatccctcctttgtgaggaccccattagtggttggctgggtataagctatatggattggttctacttatttggagagacttttggcagagtgaaaggagccctgaacttggcatctgacagcctggatttgaatgctgaatccagcctctgttagccatcttctctatgagctgcggcaaggcctacaatctctcttttcctcagtcttaaaacaggatcaatgtttccctcacacagtttttgtaagttaaacaacatagaattgatgtgatacatatgttaataactgtaaattatgtttcctaagtaaaaagattgctggctt

SEQ ID NO: 75842 - DNA, 1012 bp, Homo sapiens
caaagaagcaagtgaggctgggcgcaggcagcactttgggaggccgaggtggggcaatcacttgagcctaagtgtttgagaccagcctggccaacgtggtgaaaccccgtctactaaaaatacaaaaagtagcttggtgtggtggtgcatgcctgcaattccacctactccagaggctgagacaggaggatcgctggaacccgggaggcagaggttgcagtgagccaagatcgtgccattgcactccaacctgggtgacagagcacgactttttctcaaaaaagaaaagaaaaaaaagcagcaaaggagattttctaatgctgagatagaggtatacaattttagttttgctgtcgttgttgccttctttgaggtttgcaaggtatcggactccacagtacacatagcatttgctcgctgtgcattcgtctgttggaagtccttatttactgttgtaaaactatccccatttactgttggaaaactaactataaagaacagaaagtgttacttgctatgagaagttacagcagaaagatgcttactttttagctgcccagtgttgcaggccctggcttctcaagtaagatgctaatcagtgtgtaatgctgaactgtgacagtctcccctggagaatttaggagtgagagggggtgttggagccactctacctgcaaagcatttcattgtgagggcctttgtaaaaacagcactctcctcatgcagccctgtggaatcagtctctctgaagcccagagcagggcagtaactagccgaggatcccttagattgtaagtggcagagacaaagttcaagtttaggtcaggctgactctgactccatatgttgtcttattccgcatttagttggttgattcagcctcggcttaagcacctcctatctgtcttggctcccctccaacctgacaatatggaaatggcattgcccttgggaacagaaaacctgaactgtgttttagctttgttttccaccatctaaatggcttgagtct

SEQ ID NO: 75843 - DNA, 1058 bp, Homo sapiens
tctgaccctgattctcagatgtattcacttgtattttgtggaggaacagaagcccagttcctaggagactcagcaagggaagggcctgcctctctgcctttggttggagggtctggaacctgccatggcccagaaaccaagaagagtaggctgggaaggaggcagtcatcaagtcagttctcccaaggggaaaaaaagaagactattcattcttttgtcctgggcttcttggccgattggaaggccagacagtgctcatgaataatttactcatggtgttgacttttttccggagtcaagccctacagaaaagtaagggaaacaaaggggcatgcatcccattgaccagacatctttcagcatgtttcatcaactgtattaaagggaaactcagctgtcattgacatttcaaccccaaactcctgaagccagccagcacacatttgattggctgtttttgacaaagtgtggaatactgtatctgaaatatgttgggtgaggaatagtttatagaagggcacagtttaaatttcacttcctcctcaccatgttacccctgggcacacagcactttccaacacatgcttttcgactcatgagtctgactgctttgtgccttatgcagctgttggcatgctgggtgcacggtaattagtgtttaccctgaaagctccaaatgcttcccgtggtatttcgccatcccattttgcagatgtggcccacagaggaagcttttgccccacagaggctcactgccaactctgacatgccgccttttactcccatgattacgtggcacatgaacttttcaactttgagctgctgatttctcctcagattgagagaaaaatgtctacttaatttgactcttttaaaaattcagaatttgggaagagtagcaatctcactcgcaagattaagccctgttaagctagtctctgaacatagttgggggatctgtgtgaatataccgatcaccaacatcatctagctcttgtttctcaagaatcatgagggtccacaggtgcctcgctgactccagataactcagctgggca

SEQ ID NO: 75844 - DNA, 1040 bp, Homo sapiens
tcaacatcactaaccatctgggaaatgcaaatgaaaaccacaatgaaatatcacctcatacgtgttaggatggttatccaaaaacctgaggacaagtgttggcaagggtgtggagaaaagggaaccctatgcactgttggtggaaatgtaaattggtgcagccactaagcaaaacaatatgtaggttcctcaaaaaaattacaaatagaactatcatatgacccagcaatcccattcctggatctataaccaaaggaattggaatctggatctcagagatgtctgcactctcatgatcattgcagcgttattcacgatagtcaaaatatggaaacaatctaaatgtccttctgcagacaaatagataaagaaaatttgctatggaatattattcagccttaaaaaagaaggaaatcctatcattccggacagtgtggatgggcctggaggagattatgccaaatgaaataaggcagacccagaaagacagatactgcatgatctcactcatatatggaatctaaaatagtcaaaatcatagaagcagggagtagaatggtggttgccaagggtggttgggggacagagaaatgggaagatgttgatcaaagggtacaaaatttcagttatgcaggataaacaagctctggaaatcctactgtacaacataagacctatgattaacaatgctgtactgtatacttaaaattttgctaagagagtacatcttaagtgctcttatcaccaagaaaaaaacacaaaggaggcaggaggaaacctttgaagattatgtacaggtttattgcactgacagtagtgatgattttacaggtatacacctctccaaacacatcaagttgcatacattaagtatctacagctttttgtatgtcagttattccttaataaagcagttatttttaaaaatcctcttccctttggtcccccagcctttaacatggcaattgacatggcaattgacatgataaaagctactgtatttccttgatttaaaaaaaccacagctcacaaaatgccca

SEQ ID NO: 75845 - DNA, 1011 bp, Homo sapiens
ctctgtgggcttgggatgttaacaggagccaaaaggagggaaagtgtgaagaataaagtagatctgagaaattctgagccaatcaggcttcttaattcaagagacaaaccaagacgttctgtcaactgtgctgtgctcttctttaagccaatgaaccccaattcctggcagtctacaagaagtctcttaatgctaatgaagaatttaaaggtctttttaaggaaatgaagggctttccaaatagaatgatttactctgaagaaacaaacaatggtatctctgaaactcacaacctaaagcccaatcttgaaaatatgttgtgcaccaagacgactgcttcagcttcttctcttatccttactttctttaatagatatttattaaactgtccagtgaaaaggtgccacaatgcccagtattgtaaacaacaggtttgcattcatgaagctttcattcattctggagtctactaatttacctgaatggtgtttgcattctgtgaaatgcctctccacgttgcatatgtcacacttttgtctgcacataactcttttttcacaagaagggtcactgccacaacagcacagtcagcgggtgaattacaggtgcctgctgcctgcctacctgggtaatctgatcttgtctgtatcgccgtgtgctcatcactgaagaattgcaggccactcatgtcagtgaccagatttgtggcttataaacattagcagtttatttatgttttaagatgcaaagatgtgtgtttgatattcactttaataattagaaatggatcttgtaaacagggcatatatcaaagatgaccttataatatgtacccgaatatacagttcaagaattttgtctgactggaaataaatgcattttgtagcaaaaggaagtgttttgactagaatgatttgtctccttcccactaagacagtagatttccaatcaaaataaaaccttgagcagaatgggtagaactcaactcacagaaaattcctgagaggagag

SEQ ID NO: 75846 - DNA, 1056 bp, Homo sapiens
gagcaggagcattacattactgcaccaagagtaggaaaatatgatgcatgtttgggaccaggcaaccgaaatcccttctcagcagcgcctcccaaagccgggcaccgccttccttcggagaaggcgcagagtccccagactcgggctgagccgcacccccatctcctttctctttcctccgccgctaaacacagacgagcacgtgagcgtcgcagcccgtcccagctgtgcctcagctgaccgcctcctgattggctgagagcggcgtgggctggggtggggacttgccgcctgcgtcgctcgccattggatctcgaggaacccgcctccacctcaggtgaggcgggcttgcgggagcgcgcgccggcctgggcaggcgagcgggcgcgctcccgccccctctcccctccccgcgcgcccgagcgcgcctccgcccttgcccgccccctgacgctgcctcagctcctcagtgcacagtgctgcctcgtctgaggggacaggaggatcaccctcttcgtcgcttcggccagtgtgtcgggctgggccctgacaagccacctgaggagaggctcggagccgggcccggaccccggcgattgccgcccgcttctctctagtctcacgaggggtttcccgcctcgcacccccacctctggacttgcctttccttctcttctccgcgtgtggagggagccagcgcttaggccggagcgagcctgggggccgcccgccgtgaagacatcgcggggaccgattcaccatggagggcgccggcggcgcgaacgacaagaaaaagtaagcccattccctcggcccgccgccttctcccccggcgaccccgcccgcctgcccgccctgggctcctgggccggcctcggcgttaatgggattggggggggcagcctttttgtttctgctgctgctcccctcccctctcttcccccaacctcgccggccgggctcccccgctgtccacgtcgccatcttgtcgtggggggtgggagacgcctcgaaagtgctttcaggggccggggtctgagccctgcttgccctccc

SEQ ID NO: 75847 - DNA, 1299 bp, Homo sapiens
cctctccagttccattgaaaactcggccctggggcggaccctgcacgctggtcctggctttccagtggacttggggccttgagttcccgactgagggactcgcgtggtcggatgcgatcttgtcctgtagttgtccagccgtcgcgggtgtctttgcctttgtgcattagggatttgccgcgatggccttaagatgcgaactttttagtttgcacgtgcaggttttgtttcgttttaatcgccttgaaaaacttgcctagactgagagtcagagtaatgggaatttagggaaatggcaacattttaaagagaacttcagaattggatacttgagttcatatcacctgtcacgagaacgcagatattataaatgaatatatgcctcattcattcttcaaataatgaaaatgtaggggctggttaaatttaggcagttttaatgatactgaaaaaagtatatgatgagtgaatgaaatgcggcactaaaatgttgcaaaaattttcgaactctgtctcattttcctgaaattgaagtatattaaaggaaaaccgtcaacatatatctaaagtaagtaatcactcggttagaacttaatgcaagttttataaatcaccttgaagtttgagtctaaggggtacattagagattaagaattgtgagttggaccagtggtgttaagagcggactcccccatcccccaacacacacacaattttgcccactttggcattttaacttttaaggaaatcacttaaggaattgaagatttagagtaagagttttggttagtagactggctttgctgttaaatccttccactcttctggcagagagattaatttccctaatcagtatcagcagaagataaacttgtttatattcctgctgttttgtagatcccttctcctggtccttcttcaatagaatattaaattcttagtttgtatacagcagagaaggtcacttataaaattcaaaaagtgagcaaacaggtctagattaattccaagagttaccaggaattaattgcagtttattttgcggaggtgattacagtgcttttgatgaaatgataaagctgctatattgtaaacctaaggcagattacctctgtgtagtgccagttttctatccttattatatattgaatcatacttaatacaatgcattaaattatgtaccactttttttatatacagtatcgaactcattgttttgccattcatccgttcagaatatcagaagcagttttgaaacgaattaataaattagctactgttcatcagccccaattctaa

SEQ ID NO: 75848 - DNA, 1050 bp, Homo sapiens
ttagaaagagaatttgaaactaagacaagccaagcttcttgttgctcagtatttttggtaaaaatatggtcagattgtttaaattaactataggctttggaattttaaaaataattatatctcttggtctcttgacacatcaagaattaactgttttgtatatgcgttgagtattaatgttcatgttttctgcagtagaaatttataaacccttatttatttgccagacatgatccctttagagaaatctagtatctaaaacctgaatttttaaaacaaaatttaaaatttttgtttcataaaaacaaaaatgtgattacctcatggcttttttcttatagcttttgattgttttttaaaatcgtagttcaaaaacattaacctaaaatttaccatcttaaccatttctaagtactgttcagtagtgttaagtatattcacattgtgccactaacttccagaactttttcatcttgcaaagctgaaatcttacccattaaacaactcccaatttccccctctcctcagcctctggcaaccaccattttactttctgtttctgcaaatttaactactctagatgcctcatataaatagaattatagggttttaatatttttgtgatgggcttatttcactttgtgtaatgtcctcaaggttcatccatgttgtagcatgtgtcagaatttccttcctttttgagtctgagcaatattccattatatgttccatattttgtttctccattcatccagcaacggacacttgggttgcttccacatcttggttattgtgctgctctgaacatgagtctgcaaatctctctttgaagctttcactttttttggatacatatccagaagagggatgctggatcatatggtaaccctttttaattttcaaggaaccaccatattgttttctatagcagttgcaccagtttacattcccaccaacagtgcacaagggttcctatttctccacatccttctaaacacttgttttctttctttccttccttctcttctctttctttcttagccatctaat

SEQ ID NO: 75849 - DNA, 1307 bp, Homo sapiens
cacggtggctcctgcctgtaatcccaccattttgggaggccggggcaggtgaatcacctgaggtcaggagttcaagacaagcctgaccaacttggagaaaccccgtctctactaaaaatacaaaaaaaaaaaaaaaaaaatagcaggatgtggtggcacatgcctgtaatcccagctactcggaggctgaggcaggagaatcgcttgaacctgggaagcagaggttgcagtgagccaagatcgcgccactgcactccagcctgatgacagtgtgagatgctgtctccaaaaaaaaaaaaaaaaaattaaaaagaatgttttaattctttagttccctgtctgagattcactgattggtaagaagaaagttaaagaatctcctttgactttttttgatatagatatttaaattctattactttatagtaaggttggggtttattttctttgctttataatagaagagcattgattattctctttgctttataatagaataccatttaaataggagttccctgagtgtgtttacaatcatttgatctggctaaactattttaatgttaatgaaattttaaaattttggaggaaaaaatttaaaaactacacaggtgcacaaagaaataaaaatcacctgctttttcactatgtagagaccattgtctactatttctcaattctgtgttacatctgtatgttaataactgtaggattagggactgagtactgtttttaacctgcttttaaaaaatttacatctacattttttcccatctaaatagtgaggaagagtatcagaattttgtaggcttgtggtgatggttaaattagataatattaatgttgggtacttaacataatatatggctcttaatactctccagatttcagatatagtctgttttaccattactgcctttttatcaaacctattctcaaaaaagtgagaaaagtgctgagattacaggcgtgagccaccatgcccggcctcatggttctttcttaataataaattagaagaagtagaattacagggtcaaaaagtatccattttaaagctttcaatgtaattgcctgtttatcttctagaaagtttgacctagttgtattttagagtgtcattttcttgaactttatcatcattaaagttttaaatttggaacactggcaatttgataagtatattaggattcttcttattgcaagtagcaaaatacaactcaatctagtttaagaggggaaaatgtagtcattggctaacacaatctaattttggtttaagagacaaatctagagtctcaaatgat

SEQ ID NO: 75850 - DNA, 1614 bp, Homo sapiens
gagatcatttagatgatgtagaatatgccttttctttttttacaatgccaccaaaatgaaaacacggttttaaaaattctcatagagtgtaacttcaacactgctttaactctattaaacaaagcactgccatgttgtaattcctatttattactctctggagttgtataaattaccaaatccgccttttgtttgatatccttttcaaatatctgagggtagctatcatgtttcttccttctattcttaaaaaatagtcccaaatttcttgaatcttttaatttaaaaattatatattgagcatctgatttgtggaaaggcataggccatattaaaaatggggcttcatattaaaatggggaaaagggtggagattctcaggtggaatctgagatctgccacacactaatagtgttacctaaccctttttaaagacaaagaaacaggatcagaaggtcactttggaaaatttatttggtaatattggataggatggattagtatagttggaaaacagagactcttgctttaggagagctgctcctttgtcatttccagaatcttaatcatggtcaaggtttagagctaaatatttaatagaagaagtctttagggtatgctttctattgtacacccttatttcaatacatgtgttttttcctgttatgtaagtactttattattatttatgcatcttctattaaagttaagcaaataattatttcaaggacacattcttctacatacacacaaagtttagggtcactgaccttcttaggttctagtcttagatctgttaccatctaagagcatataaataagggaaacagaaagaaaaggatttacaagctgagaaggaagcaatgcagagaaagaagagtgatagagtaggtaatttggggaaagtcagtgatacacagctcttaaccatgaacagtgattcttcactcttgaatgtttgtgacattcatgaaggtattaaaagctgacttttaaaaaattgtttcagagaactggaaaaaaattcagttgccacattcttccttaggtcatctttgaactctactcatgcacttacgtgtttaaggcaaagttttactaaacgcacacttgttcttgctggcttattgacttttactgctagcttcttattcttagcaattatacctcacattacatagtattgtgaaactcactatattcagtgttttgcctgacaaacatggtatgttataggatgtgtattcagttatagctaaaaataaattattctcgtttttcaaaatttgctggcctacctgttaagcttttgctttaagacctgctaatgtttctcaaacttctgtggttaaatcacctgagtgtctagttgctctatggattcccagggacccattcgccagagattctgatttggtaattttgggatggaactcagggatctgtaaattttacaagcactcagaaatgaaacatagactttaaacagctaagagtgctcatcaggattatgttgatattattttttaaacagatgtgccaagcctttaatttgaatttccagggttgggatttggccttctatatttgggggaaaaaagttctattgatgat

SEQ ID NO: 75851 - DNA, 1054 bp, Homo sapiens
gtttttgctattttttccattaagtagagatagggtttttaaaaattacatgtgatgttttaagtattctggttttgcaacaattactagatagaaaatgtaacaacagatcctattaataatacttccaataatacatataaaatacttgtctaaaagtaaccctccttaaaaaaacaaagctggccaggcgcggtggctcacgcctgtaatcccagcactttgggaggctgaggcaggcggatcaagaggtcaggagttcaagaccagcctggccaacatagtgaaaccccatctctagtaaaaatacaaaaaattagccgggtgtggtggcaggcgcctgtaaccccagctactcaggaaaatcgcttgaacctgggaggcggaggttgcagtgagcggagatcgcaccactgtacttcagccttgggcaacagtgcgagactctgtctcaaaaaaaaaaaaaaaaaaaggcaataggattaggtatcaacttaatgaaaacttcgtgacagcactttcttgaaaaagactgtggaaaccaaagttagtaaactcctgtttctgcctgggttcggaaaacataaagatgataaagatgtttaagtattcctttttttttttttttttttttttgagacagtgtcttgctctgtctggagtgcagtggcacaatcacagctcactgcagccttgaactcctgggctcaaataatcctcctgcctcagcctcctgagtatctggaactacaggagtgcaccattacactcggctagtaatttgattggttaagaacattaactataactcacacattttcctgaccacatttgcttaggacaaaacagtaaaagacatgagtgtagatgaaagcgataagggaactaatcttaaacactgaacctcttttcagcaaattggctttctagtttctcagctctctctttacacctctaaatctctttcctggcaagatcatttatttgccttggtttatggtgatactcttcattgttatactggtgggtgattgttttaattgatagctgtttt

SEQ ID NO: 75852 - DNA, 2241 bp, Homo sapiens
aaagaaacaagtagaaatcagtttgtagctattaccgttctacctgctaacaactcctgttttcaagttattatgtacaactttaggtagtttctctagccttaatcgtggtttctctgtattgagactacttttgaattctatgaagtacagccttagatgtacaggctactttaaatttttgcctaaaataaaaacattctctccaattacatatgctggggaggaaacacctgcttccgacaggtttaaagcttggttttggactttttgtgagagttccttatgtgtgcagtaatccaaaatttgtatagttgccctttataaaagtacattaatctagtagacaaatctccatgtaacttaattacatggcatcttctaatccttctgtgataagcagaaatgtaaagttttattcaagttaaggcaaactaacttgtatacactttccatctcgtgtttttcttgttgttgttaagtaggataagttctgaacgtcgaaaagaaaagtctcgagatgcagccagatctcggcgaagtaaagaatctgaagttttttatgagcttgctcatcagttgccacttccacataatgtgagttcgcatcttgataaggcctctgtgatgaggcttaccatcagctatttgcgtgtgaggaaacttctggatgctggtgagttattttacaagggtataaataggcctgaaaattagaagttagaagtaaatagaaattatttttagaaggtggtcgcaatgttttgattttgtatacctctttatattgtgatatgtacacgtttaaaaatttttctgtaattctcactatttttatcaagcttcatttttttctcatcagttattctttgaaataatcattctttatgcacataatttgttttgctttattctcttaaacatactctcaattcttttctaatataacatcctttttattacctgcttttaaagctttagtcaggaataagatactggcttttcccctcccccctttttctcctgttccatctacctttcttcctttaaaaaacatgactcaggccgggcgcggtggctcacgcctgtaatcccagaactttgggatgctgaggcgggtggatcatgaggtcaggagttcaagaccagcctggccaagatggtgaaaccccatatataccaaaaatataaaaaattagatgggcacgctggtaggtgcctgtaatctcagctactagggaggctgaggcaggagaattgcttaaactcagagggcggagcttgcagtaagccgagatcaagccactgcactccagcctgggcggcagagtgagactccatctcaaaaataataaaataaataaataaataaaaaacattactcttctttcttcttctatggtttgctttgctgcattactttaatcatgaaaagcagctggcacatctaattatagtttttctagcttctggcctgcacttttctgtgttgaaatggctgtatatattaaataaagtgtctgcgagaaaactttgtaaaaacatctaaatattatatcatttaagtacaactttttaactaattattttcctcttcttgtgccctttttaggtgatttggatattgaagatgacatgaaagcacagatgaattgcttttatttgaaagccttggatggttttgttatggttctcacagatgatggtgacatgatttacatttctgataatgtgaacaaatacatgggattaactcaggtaaaatgcacacatattaagagctcttctatatgtttttatgattttatgatctagccctaatttttaaaaatgtgtttacagtttgaactaactggacacagtgtgtttgattttactcatccatgtgaccatgaggaaatgagagaaatgcttacacacagaaatggtaagaaaagtctgttgtttgatttaatgtgacaggtggttttacataataagatactattgctaattattaaactttgctattgtacttacccaaggcaaaatgttatttcatgtttaataaaatgtctattctttgttaaaactattattttagtttttaggaatttcattttgaaagcccacctaattgcataaataattgtgtgggtgtgagaaataaaatggaaaagtaaaatcatgaccaagagagttacaaataactttttttttttttttttaagatggggtctcgctcttttgcccatgctggag

SEQ ID NO: 75853 - DNA, 1815 bp, Homo sapiens
tttgttattaaaaagaaagttgttattttaaaggttctataaagacatagagtgcttattagaaattgagctaacacattcaggaaaggataggaagagtttgctgaagttctttctttagggattcttgtgtaccgatagcacagttaaagagcaaactcataccatttttatatttctgtgtatttgactaagcttactggcttcaatgattaactgttatcccaaatatggattatctttcagccaactcagggaatcacagctactgagtagtgtgtgtcagatctcttgggtgtgctggagtgagtaaaaggggaatgaattactgtgttcatgctgagacttaattgaacgggtattcagttgatctaggtgatgggcactttgttacttttattgtaacaaatttgtatatttagttgctttaaaactttatttcatgctttcattaggccttgtgaaaaagggtaaagaacaaaacacacagcgaagcttttttctcagaatgaagtgtaccctaactagccgaggaagaactatgaacataaagtctgcaacatggaaggtaagtgaaaattatttgtgattgattatacactttatttatacatagacattgtagtattaagataactttagaattgtgagggaaggtttacagttccatggtgtttggttatgtaacatttatatcttcaactcatttgcatgtgatctccaaaatgcagaaccgtgtagtaatttgccaatttgaggcacaaacttaaattacgtgaattgtggcactggtgttccaggcttaatcagttggctttgccagccacacaatatttgaatcctgatagggcttaattttctattaatcatggttttatatctttgttcaatgttgaaacatagtcatcagtgcaagaaataactatcaaacagccatgatgatgagatgaatgaaaaagcagcctagactttatacgaggggaattttttaaagagtaatgtataggccctgggcaggaagtaggtcataggtggtatcataggaaaaatgttcattgattttcaaaaacgtgattaatccactagtgacagtaaattttatcaaagcttactggccatgtcagactcaactacttatctctgctttttttttccctagcattgtaaatattttttttaactgctttgttcttcatacacaggtattgcactgcacaggccacattcacgtatatgataccaacagtaaccaacctcagtgtgggtataagaaaccacctatgacctgcttggtgctgatttgtgaacccattcctcacccatcaaatattgaaattcctttagatagcaagactttcctcagtcgacacagcctggatatgaaattttcttattgtgatgaaaggtaaattagatctaaaatgtgaatttgaaatttttaattagtctacagcattactgaatattcaccatagcaaagattcagcgctggccatgcatggtggctcacacctgtaatcccagcactttggaaggctgaggcaagcggggggtggatcatctgaggtcaggagattgagaccagcctggccaatgtggtgaaaccccatctctactaaaaaatacaaaaattagtgggacgtggtggcaggcactactcaggaggctgaggcaggagaatcgcttgaacctgggaggtggatgttgtggtgagctgagctcacaccaccacactgcaagcctggatgacagagcaagactcccatttcaaaaaaaaaaaaaaaaattactcaatgttaaactatactttccact

SEQ ID NO: 75854 - DNA, 1066 bp, Homo sapiens
gaaaccccatccctactaaaaatacaaaattagctgggcatggtggcacatgcctgtaatcccagctacttgggaggctgaggcaggggaatcgcttgaacctaggaggtggaggttgcggtgagccaagatcacacctcattgtgctctccagcctgagcaacacgagggaaactcttgtctcaaaaaaaaagaccaggtaacaagtttgggtgaacaggattaaagagttaaataacaggaggaatctagaggacttaaagaaatgtgtggtgttggatttaataactgtagttgccaaaggtgaggtgtaaatttattctaagcaaaggaggatgctcatttttgaaaattcacttgtccataagattaatgcctatcagttaacttgggaggagaaaaatttttctttatcagtgtctcccttttttttcttaaatcttgtattttttactaacagaattaccgaattgatgggatatgagccagaagaacttttaggccgctcaatttatgaatattatcatgctttggactctgatcatctgaccaaaactcatcatgatagtaagtacaatggaagaactcagagatattctaattacttaactgttgcaacctctgtacagtttggctacccatctaattctctggttaaaagttctagactaaatgtgttaacaggcctattcagtagagatcttgaccattttgtgttttgtatgtgttgcaacaaatatcagtaaaaatagaatcatttaatcatagaaaaaacttcctggcattttaaatacaaagacttttgaaaatccaaatattatagagtattgaatagcataattttcagaattcacataaatactcagaacagtggttggtatgtaaaaggcactcagaaagtatttgtacaatcaatgaatgtgaaggtggtgaacatcacctttggtaataagtaccattttaaaaaatgcttataagtgcatagttaggtatttatatttatgggttcatgaaatattttgatataggcatgcagtgcataaggataaatggagtacctatcacc

SEQ ID NO: 75855 - DNA, 1153 bp, Homo sapiens
aatgtggtatcaatttatatttaaatatgctacatatagctttttaaagcatctttggttctctggaaaccatagtcagaatttaaggaagttattgtggcaccattttcttgaaaaaggctattgattattctctaatctgacaccaacctaagtcattaaaggaattttagttactgaagattgtatattcatgaactcttcacttagctcactggcagcaaaggagttttatttagggggtttgaaaaaggaaatgggtacattttcagctattctgggacgcactgtcagaatgtaagcagttacaactgattccactaaataaacatttgttttccaaaacaatgatgaacattcagcatctgttcatttaattgaaaattcaaagttaaaatattttctctgcatgattctttttcttttcccccctagtgtttactaaaggacaagtcaccacaggacagtacaggatgcttgccaaaagaggtggatatgtctgggttgaaactcaagcaactgtcatatataacaccaagaattctcaaccacagtgcattgtatgtgtgaattacgttgtgaggtaagtaagtttgagaaataaacatttttggggaacaaatagtaattctttttggatactctgttcatttataggaagataagataataaatattaactaaattttaattcttttacatcgctaccaaattattattttctatactctgacctaggtttccagtccagctattccacagtgatgctgctaaacactgtcagtagttgtctatccccataccttcactcctatttttaaaaagaccatgaaaaaaataccagatccattgattggtttggtctaattatacagatatcggcatatactatctcaagacagctgtgttctttttgtaggaagaatcctggcctagatttgtatcatagctctaccactcattagctccctgaccttggggaagtctcttcatttttctgaatttcatctatgtagataatccttcagaaggttataatgaaaattaaatgaaattctatgagattagggaggggggagggatagcattaggagatatacttaatgtgaatgatgagttaatggatgtagcacaccaacatggcacatgtata

SEQ ID NO: 75856 - DNA, 1197 bp, Homo sapiens
ttagccttccctttaaaatctagggtcactcctcttaggaagactttgggcagtttttatttttgctacttctgacaccatcctttaatgttttaatattagtgccacagagttcttttgtgactttaccattatgtaagaatcttccacttggaatgtctttctcttcctcacaccccagtctgcctagcaaatgccacttgatcccaagtatcagcttgttagcttctcagtgaagcaagccttctctattttagcagttatcacagtgtattttaattgtttacatatctactttcacaatgggttataaatttcttaaggtcaagggttggctattttaatctttgcattatcagttcatttcagatagtgaacatttaatacgttaattaaaggaataatttacatttaagccaaacgtgaagataaactattgctcatcatccctcttcagccgtatcctgtaggtggtatcaccttatattcttaccaccaaagaaaatatggcccctctcttagaaagatcttaatcatttatctgtgtatctttaggactatccttagatcatgcctcacatattgatgccaaagagttcttttgtgccaatttcataatgtgtgtcagcacaacaattctgaagatttgttggtgtctttcatgtacttgactacaaattgccttgccattactactcttctcaaaggatatctgaaattctttttttcttttttttttttgagatggagtctcactgtcacccaggctggagtgcagtggcgtgatcttggctcactccatttcccgagctcaagtgattctcatgcctcagcctcccaagtagctgggactacaggtgtgcaccaccacaccgggctaattttttgtatttttagtagagacagggttttgccatgttggccaggctcttgaactcccaggctcaagcgatccacccgcctcagcctcccaaagtcctgggattacaggcatgagccaccacgcccagcctggatatctgaaattcttaactgaaattagtcaaattatcttgtactggggattttttttttaatttcaacttttatttttgattcaggggatacatgcataggtttgttacatgggtatatcatgtgatgctgaggtttggggtacaattgatcctgtcacccaggtagtgagcataataccca

SEQ ID NO: 75857 - DNA, 1069 bp, Homo sapiens
gaggtgggagaatcatttgagcctgggaggttgaggctgtgattgcaccactgcactccagcctgggtgatagtgagactctttctcaaaacaaaacaaaacacaataaaacaaactaaaaggggtaacaggtataggctgtagctaccttgagcacacttagtactattctctttaaatgtccaaattcaagatgtttttgtcctactgatataaataatagagaaacaatgtacgtttcaccttttggtttatattaagctagtttcttcccatgttcctgactatctttgagcctaaaacatgtgctcaggtctaggttaggcagtagctcttgcaataattttaaagtgctaaaattcaaacacacacacaaatgtaatttgtggttcaaataagtgtttgaatcaaacttataaatacattcttgaatgttaaaatctgaaagttgtccctttctgattatatcatgacacctacctcaggtgaactttgtctagtgcttccatcggaaggactaggtgtctgatcctgaatctggggcatggtaaaagaaagttccagtgactctggatttggttctaattttaatgcaacttcttgattgagtgcagggtcagcactacttcgaagtggctttggcgtttcagcggtgggtaatggagacattgccaaatttatattctgtaatttttcgttgggtgaggggagcattacatcattatataatggtacttcctcaagttgctggtcatcagtttctgtgtctgtggggaaaaaatatgagtcaatctaaagtatagaaggatttttttttttttttacccaagacagagtcttgctctgttgcccaggctggagtgcaatggcgcaatcttggctcactgcaacctctgcctcccaggttcaagcaattcccctgcctcagcctcccaagtagctgggattacaggcgcacaccaccacgcccagctaacttttgtatttttggtagagacggggtttcaccatggtggccaggctggtctcgaactcctaacctcaagtgatccacccgcctcggcctccc

SEQ ID NO: 75858 - DNA, 2124 bp, Homo sapiens
caactagcaaagtatatggaagcttcttcaggaaatagtaaacatatttctttttacagcctaatagtcccagtgaatattgtttttatgtggatagtgatatggtcaatgaattcaagttggaattggtagaaaaactttttgctgaagacacagaagcaaagaacccattttctactcaggtatatgaacttatttgttttatattaaatttcattaatttttagtctgaagtgactttgagtttcacttgttttttatttataaggtgtggccattgtaaaaactcatgtatttgctgttttaaaggacacagatttagacttggagatgttagctccctatatcccaatggatgatgacttccagttacgttccttcgatcagttgtcaccattagaaagcagttccgcaagccctgaaagcgcaagtcctcaaagcacagttacagtattccagcagactcaaatacaagaacctactgctaatgccaccactaccactgccaccactgatgaattaaaaacagtgacaaaagaccgtatggaagacattaaaatattgattgcatctccatctcctacccacatacataaagaaactactagtgccacatcatcaccatatagagatactcaaagtcggacagcctcaccaaacagagcaggaaaaggagtcatagaacagacagaaaaatctcatccaagaagccctaacgtgttatctgtcgctttgagtcaaaggtatttatatgtaacattcaagttatagttcttttattatttttgagataaatgtatgtgatagtacatgatttttaaacttatagcaaactttctgatatatatgccctaacgcaaattcttgagaactcaaaaaactttctaaattaacctcatatattttttctttttctttcttttttttttttttgagacagagtctcgctttgtcgcccaggctggagtgcaatggcatggcaccatctcagctcacggcaacctctgcctcctgggtgcaagagattctcctgcctcagcctcccgagtagctgggattacaggcatgcaccaccacgcccggctgatttttttggtatttttcatagagacagggtttctccacgttggtcaggctggtctcaaactcccgacttcaggtgatccgcctgcctcagcctccgaaagagctgggattacaggtgtgagccaccatgcccgctcctattttttctaaaataattataaattctaaaattacctatctaaatggaggagggtcttctgacacctttaaaataaaatccagctcagtactgtaaatgtgtttacagaacttgtttaaagttcttacagttgtttaaatcagactagttaactaccctcactacttagatgcttccatttcttagagctcttttttaagcttatctgaagaaaagcccttccaatttaagggttatttccaattgcacattccaaattgagccttccatcttcagcattcaatatagatatttacaggcccctcttttaaaattttattatagttaacttgtattaaagttgcttttatttttcattacgtatttgtagaacattagctatatatatattgcaggctacataggttttcaaactgtacaacaggaatctaagcatgaattgttacttctatggagctagttcaaacaaacatatggacatgacccaatttttaagttatactttctgtatataatttgtaaggggatttcacatattttaagtttgaggctatagctagaagaaattaagttttatctaataagtgtgtggaaaagggaaatgattccttctctactatgtctagactaagccagatatcaatagcaataggaaagaaccactgtcgtagccagaacacatagcttttttccctgcctaacattcccaccttgacctagagtgctgggagaggtcttttccctaagcttggaaaagacattggggctttagatgaactcagaagtactttacattactttatttactgtgtcacttactcacttttgactctgagctccacgagggcaatcacagtgtcttgggcattttagtgatactaatacttagctcatgacct

SEQ ID NO: 75859 - DNA, 1028 bp, Homo sapiens
tacaaaaattagccaggcgtgttggtgcacaactataatcccagccactctggaggctgaggcaggagaatagcttgaacccgggaggtggaggttgcgatgagctgagatcaggccactgcactccagcctgggtaagagagtgagagtccatctcatatttaaaaaagaactgctatgttttggggtaagtcaatggtggtataatacattctgatattttcaaactaaattaactggaaagtatttatagacagaatggtcataatggatgacaaataacttaagaaagaattcaaaataatttagggtagtatttaagaaactgcctataatgttattaaatttacaccaatttcaaggtttttggttgtttaaaaaaaaaattcaacaaactaaacttgaaataactttactgtttatagggaacattattacagcagccagacgatcatgcagctactacatcactttcttggaaacgtgtaaaaggatgcaaatctagtgaacagaatggaatggagcaaaagacaattattttaataccctctggttagtttattctttttgaccttgaacatcacaaagacaaaatacatgaaacatttttatttaggagctttaatctaagtgagaatgactttggttccttagcaagattaaaaagtaaagttgtggctgggcgcggtggctcacacctgtaatcccagcactttgggaggccgaggcagccagatcatctgaggtcaggagttggagaccagcctggccaccatggtgaaaccccgtctctactaaaaatacaaaaattagctgggcgtggtggcgggcgcctgtaatcccagctacttgggaggctgaggcatgagaattgcttgaacccggaaggcagaggttgcagtgagccaagatggcaccactgcactccagcctgggcgacaagggtgagactctgcctcaaaaaaaaaaaaaaaaaaaagtacagttgtatttcatgtgatggtcttaatacagagattaacatttca

SEQ ID NO: 75860 - DNA, 1955 bp, Homo sapiens
ctcaagcaatcatcctacctcagcctcctgagtagctcgcactacagacatgcctcaccacacccggttgctttttgtagagatggggtctcactatgttgcctaggctggtttcaaactcctggcctcaagtgatcctcctgcctcagcctgtgctaggattacaggcatcagctttgatgcccaccatatttatgcctttttccaaattgttatttctttgtgcctttattgtatcctgtaaacatttctgacacagcaacagtatcactggattatacttactttttaacatagttgtggttttgccaggtaaactaaaaacccttccagaattttgctttattttctatgatacctaacacattgtgggtgtttaataaatattcattgactagatgaatgtatacttaggtatctcttttgtttttcagatttagcatgtagactgctggggcaatcaatggatgaaagtggattaccacagctgaccagttatgattgtgaagttaatgctcctatacaaggcagcagaaacctactgcagggtgaagaattactcagagctttggatcaagttaactgagctttttcttaatttcattcctttttttggacactggtggctcattacctaaagcagtctatttatattttctacatctaattttagaagcctggctacaatactgcacaaacttggttagttcaattttgatcccctttctacttaatttacattaatgctcttttttagtatgttctttaatgctggatcacagacagctcattttctcagttttttggtatttaaaccattgcattgcagtagcatcattttaaaaaatgcacctttttatttatttatttttggctagggagtttatccctttttcgaattatttttaagaagatgccaatataatttttgtaagaaggcagtaacctttcatcatgatcataggcagttgaaaaatttttacaccttttttttcacattttacataaataataatgctttgccagcagtacgtggtagccacaattgcacaatatattttcttaaaaaataccagcagttactcatggaatatattctgcgtttataaaactagtttttaagaagaaattttttttggcctatgaaattgttaaacctggaacatgacattgttaatcatataataatgattcttaaatgctgtatggtttattatttaaatgggtaaagccatttacataatatagaaagatatgcatatatctagaaggtatgtggcatttatttggataaaattctcaattcagagaaatcatctgatgtttctatagtcactttgccagctcaaaagaaaacaataccctatgtagttgtggaagtttatgctaatattgtgtaactgatattaaacctaaatgttctgcctaccctgttggtataaagatattttgagcagactgtaaacaagaaaaaaaaaatcatgcattcttagcaaaattgcctagtatgttaatttgctcaaaatacaatgtttgattttatgcactttgtcgctattaacatcctttttttcatgtagatttcaataattgagtaattttagaagcattattttaggaatatatagttgtcacagtaaatatcttgttttttctatgtacattgtacaaatttttcattccttttgctctttgtggttggatctaacactaactgtattgttttgttacatcaaataaacatcttctgtggaccaggcccctttgatcagcttttatgttcaaatattaataatatttgcttcaacacctccaactcataaaattgtttaccaacaatttaagcacttatgaaaattacatggtactggttatttctacatttatcttagtgccatcaccttaatgtatgttgagtccctaaatgtcatgttaaataataacaaccataatat

SEQ ID NO: 75861 - DNA, 1032 bp, Homo sapiens
taaatgttgaagcactttgggtcacagtgtttgtgcttaagtatacctgtgccccccccccccccaaattttgcactgaatcttagtattaacttttgttccaaaattttcatataattgtaatcactgtcctccattgtaagataaaaagagctacctaagagatctgtggctcagttccttttgttcagtatatatacctcagggtaaaggacctaaggctctggcacttcctacataatttgttcataaaaataattttctgtacctgtaggtgcagggattcatagtgatttttctgttttaaaaaatatctttctacactgtctgatttttaaaaatgagattatcagtataaaagaaatacagctattttgtaaaagaaaaatacaggagaaaaaggataaagctactttgttttaaaacgcagtatcattaaaacaaaaacaaaccaaatttgttctaagtttgactttagagtcaggaaacttaagcttacatttttggtctgccatctattacttttaaagcttgggcaaattattcatttgaagtctaaatttattaatctgttaatgggaacagattagaaatcttcagagaagctctagcctttgtaacattgtgactataatgctgagaactgcttcactcatcccattcatattttaaaaatactaatattttgtgtttgagcattttaataggctcagaaacttaaaaatgatgtttcttttctaacaacatactcttttcaatgggatattatggttgttattatttaacatgacatttagggactcaacatacattaaggtgatggcactaagataaatgtagaaataaccagtaccatgtaattttcataagtgcttaaattgttggtaaacaattttatgagttggaggtgttgaagcaaatattattaatatttgaacataaaagctgatcaaaggggcctggtccacagaagatgtttatttgatgtaacaaaacaatacagttagtgttagatccaaccacaaagagcaa

SEQ ID NO: 75862 - DNA, 1085 bp, Homo sapiens
gtattataagtaatctagagatgattgaaagtatatgggaggaagtgcataggttatatgcaaatactacacaattttatatcaggaatttgagcttctctggattttggtatacgaaggaagtcctggaactaatcctccatggatactgagagacagctatacgtggttgctttttaagaattgttggccgggtgcggtggctcatgcctgtaatcccagcactttgggaggccgaggtgggcggatcatgaggtcaggagatcgaaaccatcctggctaacacggtgaaacgctatctctactaaaaatacaaaaaattagccgggcgtggtggtgggcgccagtagtcccagctactcgggaggctaaggcaggagaatggcgtgaaccccgggaggtagaggttgcagcgagctgaggtcgtgccactgcactccagcctgggtgacaaagcaagactccatctccaaaaaaaaaaaaaaaaaaaggacagaaaaaagaattgttaatacctgtattgcatatacagcattaactgaaaattctttgcttaagcaagtaagggaattcacctactgatgtaacaaaacaaatccttagccaggattggctaaagatatctgtgtcgcagacaaagctatcattaagactggccctccattttcactgccgtcaagtgctgttttcctgacagctccagccttgcatgttcccagctttagcttccaaggcaagaaagaatttttccttcttaatagttagacaattccaaaatagcatttcattagccatgatacataccacataccccgcctgcttgcctccccactcccaacaaattaccctggccatggggatgttaaactcattgtggccagatctgggccacatggccaaacctggagccaagcgtgaagtacttctacttggaatgcgtggtagtgcctaagggaaataaatttattagaagatgcctctacacctttgttgcctaaccatgccagataatagaacaacttcattttaagcccatgtgagtagatgatgatgacagctgcaggaaacttcatgttataaaaata

SEQ ID NO: 75863 - DNA, 1041 bp, Homo sapiens
actgagtacacttatttcaggatgcattcagaatctattaatatgatttaccacatcaataggttaaaggggaaaatgtgaatttattttaatagttaccaaagaagacatttgataatatccaccatccattcttgatttaaaaaaaaaaaatcctctagatcaaggagtcagcaaacagtttctgtaaagggccaggtagtaaatagtttaggttttgtgagccgtgtttctgtcacaactactcagctctaccatcgtaatgtgaaagtagctatagataataccaacacacactagtgtggttgtagtccagtaaaactgtataaaagcaggtggttggtcacatttggtccaggggccatagtttgttaactcctgccctaggtaaaatagaagattatttctttaatctttaaagtgtgtgtgtgcacttgtgtattagattacaaagtgcctcatgttcaatggtaatatgcaagaagtatcacagttttatttaacgttgctcttaaagagctagtcagtgtaattagataagagagtgaagggagatatgacatcagaaagagagactagaaaattatcatgatatgtgaatgattttatgcctaaaaaaattctaaagagaatttgctgaaaaataattaagaacaaaaatttagggaggtaagggtgaccactgtaaaccttacaaagattaaaaggtgaccaaggcaaaattataaataattttatgccagtaagttaggtagcttaaataaaatgaataaatttattaagagacacaagtttccaggccgggcgcggtggcccatgcttgtaatcacagcactttgggaggctgaggcaggtgggtcacctgaggttgggagttcaagaccagcctggccaacatggagaaaccccgtctctactgaaaatacaaaactagctgggcttggtggcacatgcatgtaatcccagctacttgggagactgaggcagaattgcttgaacccgggaggcggaggttgcggtgagccaagatcgcgccaagat

SEQ ID NO: 75864 - DNA, 1103 bp, Homo sapiens
agtgaaaaggctttttaaaaaagtatgatctcgtttctattaataaaaaaatatacatacatacacacatgaacataatatatagcactgaagaaatctagatgtgtatgaagtattaccagtggttaattttcaaggatagtataatgagaaactacccataaatgtctgtaacgtttggattttgtataaccaagtgttactttagtaatcagtagaaatccaaagacctttttacaaataaggtaaacataatttcatagactcagacaagtagaggggctggtgtgaaaaaggcaaagtagctgggaagtatagagtgaggggtccatttaggctggattgtaaaggggatatgttggggagttaaatgttaaaagtgctggaaaaatatgttgaggattgtattgtgaccaggccttaaatgtggaatcaagaagtttacacttcaattggtaggcagagggggagtcagctgaaacttttgagcaagaaagtggcatgcccaaagttttccttgaagaaaatcagtctgggagtagaatggtaggtagctgggaacaaactgaaaataggaacactaagtagagggctgttgcggtagttcagatttaggagtaacgagcgtgtgccacatggttgtaggaattagagaagcaaggctaacagacataagagcaaatacggagactagtggagaggggtgagacaagaatgcttaatgtctgagcacctgggaggatatttgtgtccttgctggagaaatacaatgacacaataaagatttcattggggggagaattcgctccagtccgccttgccagactgatttctgtaataattgcttggtgtattaatgggtgctcagtatattgatggaatttacttaagcttatgttatttaagctttaattatgtgctcaccattcctcgaatataacatgcatgttgacaggacatcagtaataccagtgctatgatggatgaagatgatagcaactactatttattaacacttttttttgagatggagtgttgctctgtcacccaggctggagtgcagtggcacgatctcggctcactgcaacctccacctcctgggt

SEQ ID NO: 75865 - DNA, 1028 bp, Homo sapiens
cttttaatttattgaagcttagttctgttggagatcaattctatcagattttgtttttctgagtctttatttaaccatttttgaaggatatttttcctggatttgaattctaggtagacacctcttttctttcatcacgttaaggattgttgcatgtcttcagccttcattgtttctgatgagaagttttcattcttacccattttttggtatataacacgccctttttctctggccacttttaagtttttttttttttttttttttactttattttcagccatttgcatgatgtgcctagtgcagttaatttttccagtatattgtatatgtttttctgtactggtctcacttgcttctctttctaggactccaattacatgtctgttaactgcttaatactgtcccaaatgttattgtggcttcctcccacacccccagtaatttttctctccgtgcttcagattgaatgatttgacttgtcttcaagttcatgaattatttcttcttttgtattcaatctgctgttaatcccattcaataactttaattttagatgtagtatttttcagttctaacatttctccttggttcttcttcatggttttcatatctgcactgaaatgtcccatttcttcaccaattataacattttttgctgtaggtttatactattttatagatactataaatttatactgtaggtgctataagtttagcaaatttagctaccttgaagtgtttgctagtttcaacattgggggcatcagtatgtctgtttcccccaaagagtatatctgtttttattgaccgatttatttttttattgactgtggtttacattttcatgtttctttccctgtctactaatattttattgtatgataatacatgttagggactctgaattctatcaccttcctctaaagagtgttgagttttgttctataaggcagttaagttatgacagagcatcttatacttaaaggggcttgattgtaggctttgtcagggtggatctattcagc

SEQ ID NO: 75866 - DNA, 1028 bp, Homo sapiens
gatgaaccagccagtcacaagatatagtttgtcttgttaccacttaaaaaaatcccttatatttacaaatataattcattcacaaaactacccttgatagaattaggactaaattgctttataatgtttctggatctccataattgagactgaatttcctcagaaaagaaaatgaagaatatagagtgactcctcagggttgtcaagtcagaatcaccttgttctttggtggatttaaatatgttttctgatataaagttttaacaaaatgaggagactatctctagcaatttgtacaggctagatgactacaggaaatgaaaccaggcaggtgtagcctactaggaaggcctcgtttggcctgaaacttgtggtgccaagaggagataagtcctggcctggtcaatagctccatccatttagtttttaatttttactttttttgttctgtatctgagagtttatttatatctgtctagatacgttttatattttcttgttctttgattagcttttcagtttcatattttatttcttcaaatatttcaagcataattaatttacatcctgtatattaatttcagtatctgcaattcaaccagtcagtctattatttgttgttttgctgattctcactcttggtgatttgtatccttgttgtatttggtggtgatctttatttggagctcaaattttcttatactgaatcctgtggatttaatttgggatgctctcctttagagaggatttatgtttgattctgctatgagccaagaatactattgttctgatacctctaaagtcctttgagtccttggaatcttaggttacactccaagtttgatcttttgatttcaggaattattagatgaactctgcttcattggtttctactccacttgcttaatatcctactgcctcttgctctggtttcagctaattgttttgtttttctccttggagattctgctactttctggtgagcacaggaatgcattaacctttttctttagtagtatattcaggag

SEQ ID NO: 75867 - DNA, 1030 bp, Homo sapiens
cttgcctgtacgtgttcagacagcatagggacaacttggagtgggagacaggcaaccataagccagtggttttctgggtttaggtcactgaatttctccagtcattgttggaaatttaaccatcaaacctaggccctgccttccaccttccagaccagaattctacctgagtggccctgtcttacttctgttcattctccatatgacttgcaaggattaaatcagaacgtaatcctatttattatctaatggctatttttaagatcctataatttttattaccatattctatgtcatatttgaatgttctgaagttcttgagttcagaggcttaggaaatatacagagatactattgcaaagagatatagacacctaatgaaactcaaagataagttctataaaaacaattaaaaaatgcctctcctttggtgtcagataaaatgctcagtagcttgcaggccacacgcacagctaaaataatttttccatttccacctacggcaacaaagaaaaagcaatagctatttcaaccagaaatagtctccacggtgacacagacccactcagcatgtggctgcagcccttcaccctgccttgctctcatttcttgtttatagccggagtgttgatatagtcagcaggatgcggtcatcagccaagggtcagagggcctatacagtaacttctgtgcagttgtataaaaggtctttgtcctaccttattctggaaattaacttaagcaatgtgaatggtgacatctgaattacaattatggcaaataagtcagaagagccctgcaagaatcataaattatctttgctgaagtttttttttttttgtttgtttgttttggtttttttttttgagagggagtcttgctctgtcaccaggctggagtgcagtggcatgatctcagctcactgcaatctctgactccctggttcgaacaattctcctgcctgcctcagcttcccgagtagctgcgattacaggcacgtgccaccacgcccagctaatttttgtatttt

SEQ ID NO: 75868 - DNA, 1026 bp, Homo sapiens
aatatatatgcaagaaatttcgttgcccctgtaatgacatcttgacatattagataatgtgtgttcaaagcaagaataggtcaatgttatgtctcaaagctgtttcagggctgctctgagagatactgtacttttcctggggattggagtgagcattatgtagtagacattaattttagagcacagttctcttttaggtcacattcctttatttttctatattgaattaactacctgactggtgggaaaattaaatctcaatcattactgataccctttcccactccataggataatataagaatcccaggctggtacagtgccataaatttgggatggggcccagtccactccccacagttggctccgtcatgaccactgcacattccgacatgctgctgctgaagacatgatccccagcaactaggctgtcagaggaccctcccagctgttcacccactgacgaccaccctgagagagaatgcaccatgtccatctactgttggctttctggaagagctcccccagctcccacctacccaggcacaggtgggaacgaggtctgtgtttctgacagaacacaatctcttaaattcattcctttcctgttctggagaatattcctgtcctttcccttttggcataggctttctttcacaaagccctgtctggatgggaacttttgtaagtaccttgaaacttcaatttattaccctgaaattcacaaaattattaaaaatggagtgtgactcttgctaaggactcaaaaactccaaacataaagttgtctatgttattggaagggagaagggaaaaatactgatagtagcaatagcagcaggaagaaagtacaaattaatatctcgatgaatcatcatgccccattgtgtttgatgtaggcaacaggcctaaggcttctgcagctaaatcttctctttacttgggccatccctagcaagtgaaagggtgtttattgagggtgtttccccaccggccccccacccccccgccatggtctaagcactg

SEQ ID NO: 75869 - DNA, 1033 bp, Homo sapiens
tccaggaagtactaggtagcctcaattgaatcaactttctcaaggaaatatcatgcctggtttaacttgctttgcagtcgtgaaagttccagagagctgggtaagttggttgttctgaacagtcctcaggctaactttgatattctgagggaaggggctagtttactttgaaaatagtacaagaactgtaataggtgtaagtttgatatttaacctatttgttttctcttaaattgagacttctgttgttgcatgttcaaaccccttatggatctgtatcatacgagttcacctgagtgttatagaaaatggaggggttgaaaggcggagctagacagaggctagaggtgggaaggtggggaagggatgttgactggagctgcagtggaattgatttgctttgtcctcctaagagataggaatggacatcaggggcacttacttaaagaaagtaggtgctagaaatctgtttgctgaggaacaattggcaggaaaaaaggacataactgaaattttgctctcttgttcttgttttcagcttttaacatagtcttgaccttggcatatatgtctttgagctaagtgagcttatgtaaagcttcctttttgtgtgtctgaatacctagtccagagagggtgtgtagaaggattagtgatctctagtcatcagaaatcccatggcaacatgatcaggcatttacctgataattttatacctaggtgagaagcccagtcttctgggattggcagaaacagacagtggcaattacattttgttctcatttacagagcttgcttctttgctattagaggggcttaagtctgtagatatcggctactcttctgttcataagcacaccggaggtgtctggttattttttaaataacctgggttaagaactgagcattacttccttttgaggctagggcataacacacagcttgttctcaggaacacgataatgaggataagtacataaatatggataaaagcacgtcccaaagcaccatctcctgcaggaagaaaggtgat

SEQ ID NO: 75870 - DNA, 1051 bp, Homo sapiens
attgaggaatacccattttaactttcatctgaggcctcttctgttgccccaacctcctaccccgcaacacacacacacacacacacacacacacacacagagtgtttcagacaggaaacttggagggatgagaccacatatctagactataagtttaatttttcaattaattaccgaaggataaagaactttttaagaaatgagatacgcaaacagggtggggattgctacaggctctgctttcacacgttttcctccttatctgcttccctggtgtttattgaatgatactgtacccaaaaccctgtgatagacactgtatgagctgggtggggaggatacaaggaatattagacgtgggccttcaagggcttcacaaagtagaaaacagctgcccagcttgccagatacgagatgtttgccaggtaagtagtgtgggagtgccatacagttcaccttcagggttggctgggtgggaggggacttgactaggaaggcattcttggggaggggattggattaaaggtccagaggcctagaaatgaataaataatgctctctccagggcaatgcgctgaggttgttaactctgtggaactacaaggcttcctttgggggcacagtgggataaacctggagttgaccttaagagacaagcaaaaggatttaaggggtatccttaagagacaagcaaaggaatttgggctttatattgtagctaatgagaaaccattaacaccagctaagggggactgacatggttaaaaaacaggtgaagatgaattttgtttgatgctaagaaggatgaatttaggggacagagggagtgtggaaacagactctaaagggattttgtggtaattcctaaaggatataaaaaggacagacatgaggctgggtgcggtggctcacgcctgtaattccagcactttgggaggccaaggcgggcggatcacttaaggtcaggagcccgagaccagcctggccagcatggtgaaacctcgtctctactaaaaatacaaaaattagctgggcatggtggcgggtgcct

SEQ ID NO: 75871 - DNA, 1049 bp, Homo sapiens
gagatagaaagagcatcatgttcttccaatacttggggcagccatgtttcatgctgggaataggcgtcgggcttttccactgcacctgcttgagcgaatagcggtgcccactggtggttttctgttgattgtgaagactcttgatgagtgtatggagatcatttggaactctaaaaatgacatgttacacttcctttcgggagttctattcccagaatagcacagttctttgaaatcctcatttaaatgagcctcatgatttgtggaaggtgagaatgcacacacctgctttgcaaattgataaactatgccctaaattcataacaggtggtttgcttgaagtagagtagtgagtcagcagtggggctatcaatagaatccagtcaatagttctgtcgctcaccctctgacctcgcttttgatgttagtctagttggaaaaaaaaaaaagtagtaggaggagattgatggttttatcagctgaggccattgcctttctctgtgtgtatgtgtgtgtacacattgatatgtttgtgtgtgtttctgtgtttgcctgtgttttctgaatcatttttgccaagtggtatcttcttcctacttcccagatggtagttctgattttttttcttttggaaattgctcacaaatcagaaggcttcacttgccagttgacagattttaacagcagctggtagctgaccaccctccaccacccatccctcccaccttcttccatgaagaggcatcaggagatagcacagataagctgtaagatgtttagctttgttaaggaggttaggacagtaggaaaatttgaccattattgaaaatattcaatacaaagccaaactgaaatgtatctttctgctcagattaaagccatttttgccaatgtctctgactccgtattttgatcaattccttttcagtcgcatggtagttttgtccgcttatatcatcctgccgggaaaaaaattagttttgaaagtgttttaaacagaacttactcagagaatattgaaaatgcaaccattgtgatgttgatgttat

SEQ ID NO: 75872 - DNA, 1064 bp, Homo sapiens
ctttttcattttatggatcaagtttcttcactgtatggatagaattatgtttctgcaggtattattggtatgggttctgtttctgcaatcttgattgttgtgactgcaattactcaatttctctaggtaaaaaggtgttaaaaataatgcatttgaaatggttttcttattgcaaatttagatttggatggagccagccaacggcgttattctgagaatctctcctacggtgaagatgaccacatccctgctcactcacagtccccatgtgaaagaggggatgccaaacaccacggcacatctcaccaagagtccagtgtggtccaaagcctcaggcgccaatccacagagggcagcttggagatggagacagcttttaatagccggggatttgaagattcctatgccactgacagctcctccatgtggagtccagaggcaagttatttgtttttcattctttcattggttccctttccccttcccctctttccactctcctttctcatctctctaaaaaaaaaaaaaaattccagaaaggaagcattacttttatctgcaataaatttttgtccagatgaccaaaatcccatgcatgtcaataaaagagtcataaatttctctcaaaatggaaaaaaaaggatgaacggtaaaaaaaaaaaaaaagaaaaaaagaaaaaaaaataagaatggtggcagaatggatccaggaacagccaggcttttcttttatataaaggctttttatagacttaattttaaataatggaattttcagttctttagagggactggtttatttacttcatggtttcaattaagtggagtctatttttatttagcccaaatctcaagttacgattatttgatatgaaaattatttgaaaattgaactaaaatgaaatggccttccaagtgaaattatacaaggtgtaatgatgcagatcttgcactgtgaatatatacaaaatatattttgtgcctaggagacagcattaatcagtaatgcccctctggccattgacattggttttgtagtaaatctctgataaaagatacttctt

SEQ ID NO: 75873 - DNA, 1034 bp, Homo sapiens
tgctaacatgttggcgtgtgtaggtagtatctaaggaggggtatgcatacacatctgtgcccctgtgtagatgtctctgctgaggaccagaaatggtagctcacatatgtggtttgtggcttgttaaaaagcagcccttcatatggaggcacccaaagccattaactttatacattttgtttaaaaaaagaaaaaactctgcttacccgttagtttactaccaagccgtatcaaatcccacacactaactcttaaaaaatattttgaatctctctcccaaaaacaaaacagaccaaatgatttgcctgcctattgatactctgtctccttggtgattgtgccatgaggcttggaagtgacttctccaggtcacctcccatttacctgcctgctggagctttaatagaagactcggtattgagggtactaaatgttctcagactccaaaaatacccagacatctctgtgtgctccattcaacctcctatctattttgagaaaaaactgtaatttggtgctcctacagtagaacctcaaatccaactcggaggcagttcccgtaactgcctgctttgcaggcttagcttgccttttaagaaatgatttatttgcctcttagctgtattgagaactctgtcttcccctgtgtatctggcatcaggaacatattgtaggcctgtttactttaggccacacagatgacatcaacactatcttactaaaacagaaaggctttcaatttgacagaaaatctttaaacctacctgggttttgacaatttgacacaagtattctcatcttaaggaaaagcccaggatattggagctcaaggaatcatttattttgtctcagcaggaaactggtcgtgcagtgtgactacctgttaggctgatggattttcgagctctgctcttctctgctggcgaaggcctttggctttttcctgcagacccagggcttggcaggaaagacaatgggagtgtggctggtgattttgagcacacagggagacaggtgtcccacttttcatctct

SEQ ID NO: 75874 - DNA, 1121 bp, Homo sapiens
ggattttgccatgatgaccaggctggttttgaactcttggcctcaagtgatcagcctgcctcggcctcccaaagtgctgggattacaggcgtgacccactgtgacattttggacttttgacctccaaaattataagataataataagttgtggtaatttgttacagaagcagtagaaaatgaatagagactttatcttataaaatacttactaaataaatgttattaagtcaatgatgtttgggagagaggacctcctttcccttgacgtaatatttccatgtgacggaaatcacttagggtcaacacacttggcttgaatgcccccagtggagtgagagaatcatctgattggtaaatctgggagcagtaactgggtatgcattgctcagcaccttcccctttctctttgggtttgtctgcagagagcttgttgaagcttaggcttgtgttcctctctcaggaaaaacactatttctagaattgagactgtgaaaaattcttttctatgggtttttgtaaagagaagacttacaataatgtagtgaacaaggttctaaatgtgatcttgagtaactatggctatatacttcagaagccatttcttacaatgtccttcagtttaaggaagtggtacaataaaacatacttcttttctttacacttaataattatgtattgagaatctactatggaccaggggcaaagctgggtgctagggcatccatgggtgaagaaaacagaattatccttgccttcagggagcttatagtttggaaggggagccagatactgtacaaataaccccttgctaggaaaatataaaacaggactcaaggggaatgtaaaacaggaggctcagttgatttttttaactttttaattttttaaattaattaattaattatttatttttgagacggagtttcacttgttgcccaggctggagtgcaatggtgaaatcttggctcactgcagccactccctctcaggttcaagcgattcttctgcctgagcctcctaagtagctgggattacaggcacctgccatcacgcccagctaattttttgtatttttggtagagatggggtttctccatattggcgaggctgatctggaac

SEQ ID NO: 75875 - DNA, 1401 bp, Homo sapiens
cctttctcccccataaagtttttcaggatgatcaggtcacagtgtgtacgtaagagtcagctaattatggatattgtcatctcggtaactttgtaaaaaaacaaacaaaactggcattgttaattccaaaaagaaaaaaaaaagcagtaaaaaaaaaaagtcatatgcaacaccagacgcaacatggtttaatggaattaatagtttttttttttttttttttaaagaacattgatggggattcactgtaaagttggcagaggctgccaaagacgaaacaactgactttaaaaatgctggaacaatgtgataaaaaataaatttgtaacaaatcttctcctttttagcccttgtcattttagccctttagtttcaactctgcattatatttagtttatatagtgtaaacttttgtttgccattaattcatctttttaggtagaagacattaaaatcacaggtttatgaagaatctctgctcattggaatgaaatgcagtcatttgaaatgagaaaggccaggatccttttttgtaccttaccctgtcttcaagagtaaaggtgaacacttacagctctcctccttgatgtcaattttgtatgttgatcattccaaactgagaagaataaagccacattttagacatatttatagaatcaattaaagctatatgtctaaaattcgtagggcaacttctgagaagaaacaccgtctttttcttttttaatggaaagtgacaatgtgacattagtcatgttgtgtgcggtgacgcagagtaactgaggtaatctgactgttgcactatgtgacatatttcaggacgtacttgctgcatttgcagcagccctctctctctgtcccttcccacaattctgctgttgctgcaacttgagttaattgtgacaaatgcatctttgtgttatattttgtttgcttcataatttccagaactatatataaatatattttttaaatagcaaatattgtagttagtgagtgatgatcactccaaccttatccttaccatattggtttcagggataggattaagagtgtctttggaagagaaaaatacacacaaccctgtggtttagaatgacgctgaggccttaggctgtgggcctagaacaactatgtgagtgaattcacccatctcatactttgaatcaagcatgcattcctgtttctcattgtgaagtatccccagttgttttccttcagtgttgagtttttgtccttttaaattttattatattttgctctccctaacatttgactgttttttataaaagaaaagaaaaaaaaagaaataaataataccctcgatgccactggatactcacaagcagggttatgctccttcatcttgggcttgtttgcctaaatgaaagggtttaattt

SEQ ID NO: 75876 - DNA, 1987 bp, Homo sapiens
tatgaatgttaatctggatcagcatttttttttttttatttttttttggagacggagtcttgctctgtcccccagactggagtgcagtggtgtgatctcggctcgctgcaatctccgtccaccacaatctccgccccccgggttcaagcgattctcctgactcagcctcccaagtagctgggactctaggcatacgccaccatgcccggctaatttttgtatttttagtagagacggggtctcactgatgatccacccgcctcggcctcccaaagtgctaggattacaggcgtgagccactgcgcccagcctgggtctgctttttattggttcgctgcaacatggaaaaaaaccagagacagtgtagtgaattatttttagtaaatgtgaatttatataacttacaatatagtcttatattcctgcatcatgtacttcctacttggttgatgttaaaaatcctttttttgtaaaaatgtaattttaaaatgtccttggcaaaatataaagtttgtcgattctaatttggacatctaatttttgggggaagttttaccaaatagtgaaatctcaaagtctgaaaatcactaaatttaaaatcagtgaaattgatattgaacccaatttgaaggcttgatgcattaaaatttaatacttaataatatcaaccaagttcttttcagatcattaaaagtgaaatcacaagttttcagtttcttctaaactactgaagaatttaaatatgcatgaggtgggaaaaataggaataaaggagcagatatattttcttgacctactatattctctgtatcagtgtcatctccagcatcctttttgagaaactatttggagataaagaaaaattaagattcttactaagctgcaagtgaaaatcactaatatgcccttgattttacaataactgatgcatataagtcattcccatttttgtttcttagtaattttaaagttaattttctcaattaagctaagtataaaggagtgttaaggtgaaattgtaaaatattcattgttgcataatctcattaaacctcagctgtttacattgtattctgtttcttcctcagtgagaaaaagaaagaaaaggagcgtgaagaattgtggaaaaaattggaggatctggagttaaagagaggtcttagacgtgatggaataattccaacttaacaaaaacaatgacaacaacattactaacctgtggagtcacacgtttatgtagtagaagatggagcaacagttttctgtattgtgcaactttacagtagatttcacctttgtttcattattacagcagcactgtatatacctgtctctaagtaaaggaaaaaacaaaataaggacttcaatccaaagtttggacagtagatggacttctcagaactttgcaaacataatcattgttctcaccctcttttaaaaaaaaaaatcggtcttcaaagatctgttgatgaaattgctatgttaaaattccattatcgggagttccttatttatcactagcagagagtatgatacaattttcaaatgtgaacaatcttaaatttagcttgtctttctgctaagctgttaaatgtatttatagtaaaggaagaaaaaaagactgtcatttccttataagtttgtgtaacatcctcctctggataacttgactgtaatttaacatctttttcttttgcacatcttcctgagttgaatgtccacgtggaatggggtcatgaattataaaagtccctgataaaagttttgtttactggggtgaacatctttccagtaaccaggtagtcctggtactcctttagttttaaaattaggagttaagagagaagaggtgataaacatagtagggaagggaatatcggattcatgcatcagtttatggtgaatccaaatcaatgtcttgaatcctttgaaaacaggcactgggacatcacaggcttcagtacctgaccagtattagttgcatata

SEQ ID NO: 75877 - DNA, 1046 bp, Homo sapiens
acattgaaatgttttttagttgagtaaaattccaagcccttgcttaccatccccttatctctccaaataaaaaggtcatattcatcgaaagtcagcaggatctatacaattgatttatatatacccaaattgtgttttttgctaacattgatttagacctcataattattcccagactgtactgagaaacaaaaagtgataatttgtcaaacagcttgattatgtttagaatctggaatgcaccaggagtggtggtgcacacctgtagtcccagccactcaggaggctgaggcaagaggattgcttgagcccaggtgattgaggctacagtgagctatgattgtgccactgcactttagcctgagcaacagaatgagaccctgactctaagaaaagaacaaaagcaaaaacaaaaaagccagaagaagattggaggattatctaatcttgcccttattgtcctataagtgcaattttttcagggtcaaaattaacaaataggtaattttatgaaaactagtctgcttactgaaatttatattgtgcagatttgtatttgagatagctgaaactaattatggtaaacaaggcctaagttatgaaaatattacctattagatcatgatattaattaccatatggctttactaagccataaacatttattgtaaagagttccactggtttgtgctcccatatggtcttaaacatttctggttaataccagactattatggcattataattcaacatttcctcaagtctctagtggaataagaatataaaattacttaggtttttcttgagttttttgggagttggaggggatgaagattaatctctattgctctagatattaatataacttttaaaaaacattggttataatgttttaaaaaaaatgaggcattggaattacatacaaatttcactcaacccatgtggatttccctgcgtagaaattgtactgtggctgaagttttaatccttgctaagtggggtagtgcatggattacatccccatgcctgagatggtggagccccca

SEQ ID NO: 75878 - DNA, 1096 bp, Homo sapiens
cacatgcctgtaatcccagctactcaggaggctgaggcaggagaatcacttgaacccgggaaggggaggttgccatgagcagagattgcatcattgtactccagcctgggcaacaagaggaatcccagctctttgggaggccgaggcgggcggatcacgaggttaggagatcgagaccatcctggctaacatggtgaaaccccgtctctactaaaactacaaaaaattagcagggcgtggtggcgggtgcctgtagtcccagctactcgggagggtgaggcaggagaatggcgtgaacccaggaggcagagcttgcagtgagccgagattacaccactgcactccagcctgggcgacagagcgagactccgtctcgaaaaaaaaaaaaaagaaaatgggtttttaaaagcaagaataataatttgtcaaatgagcaatagaagggtgtactgacagatggaaacattggtttctccataggtgtgggaataggacaagggaatgaagaaatttagttggtactgtcagagaataactgaatggacaattttacttcaggatggcaagaagttaatggtttcagttcagatcaaattttgaagtattacaaatctgaaaatggtgggtggaataagtacttaacactgttagatacatatgccaacattagtgctatgtaaaattgaaattagaagagaatttgacaatatcccctgcatgacagtgtggttaagcgttaaaatttccacctacagggagagagaaaagtgggaaagattgggggtgacaataactgtgtcagcaatatttaggatttttaaagatagagttgtcagtatgaaagccgtgtgataactgagcataatgctcagttggaggaaaagcccaacaggataaattgcattgagtgccatatttgatcaaaaacatgaaacactttagtaacaagatgatgaatgttttaatgatgtcaacacttaattaaccaatttatgcctagtgttccattattggaacgctaagcttgtgggagttatttctatcccactgctcaaggtcatcgtcaaggtctgatttttcacaagaaagttttaca

SEQ ID NO: 75879 - DNA, 1037 bp, Homo sapiens
ctccaatagcagggggaatgaggcaccatttatctagctcttgggcccaggacttactagaacccaacaaatttattacaatttaaagatcagtgaaaagaacatgaaggttaatagtctggtattaaccagaaatgtttgagaccatatgggagaacaaaccagtggaactctttgcaataaatgcttatggcttagtaaaaatcttgtccaatgcattctactttccaaaagatgtacttggggagattatagaagtctagagagctcttagtagttgcgcctgtggtttggctttgatcatccataagcagatgtcagctttgtatatcataaagctatggaccttagaggacccagagatgtgtgcgagtgttcatacccagggtcttgctgaacctctctggttcccttggtgctttgctttgtctcatttttagtctgtcaacttgcattttattgataaaaagagcaatgaggggaaaggtttgatggcagagggaccattgcaatgatttttttgttttaagttaccagggatgtggtttatgaaaaccaacttaattatggaatgtggtgagtatttagctgagaatctcagaagaggctgggattttttacccagaatattgggattattatcaattatgggatatgttattccatactcacagtttaaacaacttttttttttttgttttttgagatggagtcttgctctgttgcccaggctggagtgcagtggcgcgatctcagctcactgcaagctccgcctcccaggttcatgccattctcctgcctcagcctcctaagtagctgggactacaagcacccgccaccacgcctggctaattttttgtatttttactagagacagggtttcactgtgctagtcaggatggtctcgatctcctgacctcatgatccacctgcctcggcctcccaaagtgctgggattacaggcgtaagccaccgcgcccagccctaaacaacttttaattcagtatattagcgattgttgcaaattataaatttat

SEQ ID NO: 75880 - DNA, 1671 bp, Homo sapiens
aaggcagggctgtcagaactcttgttttactagttatgaaactgtagagaggttaaatagcctgccccagtacactaagtaagtacagatgattaggccagaactcgcctccttgactcctaaaccctgtctttttattcactgtgctcttcagcctcgctaagcccaggccaggccccaatcaggtgtccagttgtctagctttgttgatgttcccttccgagtggcccccttcataatatgaaggttttgctgtcactgtacatagacgctagagcagcctgcccaaatactcattttaaagcatggtataggtggatcttgctgtgtcatcttagaatagacaacagacctttagtttcagccattcacaaatgaccctggggggttcaggcctacaatcatttgtacctttgctgagaattcaccaggcatgtgctactttgtgaggttgttatggggtagtgcatgagtttcttagctggagttgagcctaactgagcaccagatctgcagccattcttctggaaggttagcaaccatgtggaaaatggctcagaaaaaaagatcagctgttagttttatatttggttaaaactttgggagaaattccatatacatattaacaaatggcaagggtctactatattttacttttagcagaaacgccttccttctcaaatcagcttcaattctccaaactctattttaatttcagaaagtcatttaatttcttaaaatctgttagataaaattgaactgtgcattgctacccagatacatctcaaaatatgaaggcattgttatttttcatattttgattgctcactttattttttcaaagtaattattttttcatagctaaatacgtaaactggtttttatttatctgtcattttcccattatatttaaaacaattgactctactgcagatttggctccatattgtgatctaaaaactctgtttcttgcggcacccggtgctgagttcacaagattcactgtgctttgtagagagcaagcgtgtgtgtgtgtgtgtgtgtgtgtgtgtgtgtgtgtgtgtcgagaatgcgtcagtgcatgcttatgggtttgaagtggcacctgcatgtgagtgagtctgctcatttgtgtttcttgaactttttgttgtattaatgagtgcgttctagagcattgagcatgtagcaggggctgtacgtatttggcaaataaccacatttgaacttttgcctcttccatttaggagggccaccttctcattgttttttttaaaaaaaaaagtgttgtggaaagagagctggattactaataatagagaggaaggccctacggggtcagttttgcttctcaggggccggtgcagtgtgtgagtgtccctcgttctatgtaatatatataccaagtagagtattttttccaagtacgtagaatttttccaagtaccctatggtgaattctttgtggaacgaacatcttctaacatgggataatgactggttcatgtatgtttggttttatgtgtaaatttttcttaaaataatccaaactctcattaatcctccttgttcttatggattttttttcatgatgtgcctcacatcttgtattttgcttgtacttacaggtcatgttccttggggaactggaagaaatattggatgtgattg

SEQ ID NO: 75881 - DNA, 1030 bp, Homo sapiens
ttatcccagcactttgggaggccaaggtgggcagatcatttgcagttaagagttctagaccagtctggacaatatggtgaaactccttctctactaaaaatacaaaaaaattagccaggcatggtggtgggtgcctgtaatcccagctacttgggaggcctgaggcataggaatagcttgaatcccggaggcgaaggttgcagtgagctgagattgggccactgcactccagcctgggcaatagagcaagatgactctgtctcaaaaaaaaaaaaaaaaaaaaaaaaaaggaaattctgaatgccactggggtgggtattatgttgttttgtacaaacaaactgattaagtttaattaatatcacaagaacagtttgtctcagttcaacttgtggtaacattgctaatttgtgtctcttttttctccctagtattatcaatggctttgctttacctcttaaggcagaacacaaacagtttctggtgaaagtattgatccctttacacactgtcaggagcttatcactcttccatgcacaggtaggaggattttgtacaactacttttagaagcaaaataaaaagtttgcaaactcgtttttttgatattgatataaccttcattttgtttttttggtttttgttttttgagacggagtcttgctctgccgcccaggctggagtgcagtgggacagtcttggctcactgcagcctccacctcccgggttcaagcaattcttctgcctcagcctcccgagtagctgtgactacaagcgcacgccaccatgcccagctaatttttgtatttttagtagagacggggttttaccatgttggccaagatggtctgggtcttctgacctcatgatccgcccaccttggcctcccaaagtgctgggattacagaggtgtgagccacggcgccgggcctatcgccttcattcccaaaggaaagagacttacttaagtttaaaatactccccgagggaaataaaaatgtatgcattttttttctatgcacagtagaatc

SEQ ID NO: 75882 - DNA, 1110 bp, Homo sapiens
ttaaccttggaatgggaatgggtggatgggtggattgggtaggtggattagaggtcttatgtcatttggaacatgttatagataaagagatactgagtctatatggggccttttttttttggctggttggggccacatgcctttctttcctagatagaatgttttcctgtggaaatgtattaacttgcccattacctcccctgatgggctccaaaattgttcaacaatgtgtatgtccagcaatgaggaccatcgctggcacatagaaagaactcagtacgtatgtatttattgtattgctgaatgggcagagagctgtagttaacaacatcttctgtttggataggctgctaggaaaagcatgtactattgaacctgtgaggagcactcatatcccacttctaactcctcatttcttcatcggtcagcctggatgtctcttcctttagaagcctttgctgatcactccacttcttccaaatacagtagatgtgtctgctgtgtatttatacaacatcctgaactacttaacatgctgtttatttacttgtttgtattccccattagaataggctctgagaaagcaaagactgtatctgtcttgcttatcattgtatccctgacagctcgcccactggctggcttttaataagcacaccataaatatttacttgaaatactcatttttaaaatgaacagatgaatgaatgatagatggatggtggatggcattatgtagctaaaaattgtgtcctgtctctacctatttttgaagaccatcctttagtttgcgtttcctgccatgtttgaggggcctttttttggtccataactcttgtcttttattcaaattaaaacaccgaacaaaagcacattcgattattgaccatgaggtttttattctgctgtcagtgtcaacctcatgtctaaatcacctgaggtcaaacttacatatatctggatagcctttttgatgacgatggtagtctaatttgtgtgttatgtgctcttgaaatgttttgctgtaaagacactagaactgaattttgctttattgcaatgatgatgaatgttaaaaaaaacaactcagtaacattcaaaccaatttcc

SEQ ID NO: 75883 - DNA, 1065 bp, Homo sapiens
ggtgtatgccaccacgccagactaatttttgtattttcagtagagacagggtttcaccatgttagcccatgttggtctcaaatttctgacctcaagtgatcagcccgccttcgtcttccaaagtgctgggattacaggcgtgagccactgtgccctgcctgcctacatactttattgacattttggctaagtgtaaatttggaactttcccagatgttttaaggaattgatccattgttttccagcttccagtgtgggtattaagaaggcctgcaccaggtgaatgccttatcctttataatgacctgtcttctttgtatcttctttgagatcttctctttgtctccacatccagaaagtgatgtgctttggtgtggatctttgttcatttattgtgcagaacacttaatggaccatatctatattgacattgatgactttttttttgttggaaattgaattgaattattcttcagataatttccttctcttcattttctgtttttctgtctccatgtctttctggattgctattatgtattggatcttctggtttttaaaatcttcttctatatattatctctgttttttggttatatgctctggggtagagttgctcattttaatgttctagtgcttctgctaaaatttttatttattatatgttgaacttctaaaagcttttaaaaaatttcctgaatatccacctgaataatagcactgttttatttcaaggatccagcatatttgtttatctttgaagatgttaatagtttccttcttgcaattttttttggtactcctagcattgtgcctgtttcctctgagttccttataattgtttgttgtggtcttttatgttaaaatatctggtgatctttgacttcatagtcataattacatgttagtctaccgaaaagttgcttagaacttgtgtatgttaccgtgtgcacatgtgtgtttatatttgcatggtgacacttggcaactggtgactttgaatggcataactggtcagggaccttgccatttcattaggaaaccctcagctgttagcatatctgt

SEQ ID NO: 75884 - DNA, 1402 bp, Homo sapiens
taatatttttattaggattcttgttttgagaactttcttaagctctgttttctttaatagcttcagtccatgaaatcatatagtgttagcctgtcatgtcttacctagcatgttatgaattatttgaaatccaactcttattctaaaaatcattggtatccattcaactctacgtatatggttcttcacaggctgttgggttctcttaagatgttacatgggtttcctgtgtctctggattctcttcagttccactttgccaactgatttcctccaatcagtgttgaacataaatgtttattagtgccaggaacgtataatttataatgtgtgaaaaccagggatagcccatttaaatctttacagaggacagacaaatggtacatgattaagtagtgttggtatgaccaaaggagtgatggaaactgtggcgatttagagagcttggatcctgctgccaatccgctcccagtaacggttggtctctaggtaagtgagccaagtattgctagatcttttggcttttcaagagaagctggaaagccatattttggtagagccagacaaaacagtctgttgtttttctttttcttttttttttttttttgagatgaagtctagctctgtcacccaggctggattgcagtggctcgatctcggctcacggcaacctccgcctcccgggttcaagtgattcttctgtctcagtctcctgaataggtgggactacaagcatgcaccagtatgcctggctaattttttgtatttttagtagagatgaggtttcaccatgttgggcaggctggtcttgaactcctgacctcgtgatctgcccgcctcggcctcccaaagtgctgggattacaggcgtgagtcactgcgcctggccaacagtctgtcgtttttcattcaagggttttgaatgtttttgtttgaagggttttgttgttttttattctagaatagtatgactggctcacttgaatttcagtgtgatttttattaaatctagatttacataacctgtagcattttttgtgtactcacttaagtgtttggacaagaaagctgttagagatttatcaaagatagtccattcattgcatagtgcacttttgtctgtggtaatgttgatttcagacttaagtaacttggttaactgccttctagagctatgactatgtagacttgcctaggctttatggaacaattttgtctattcttaataaagataattttcatctgtattgggatggttgggaaaatggtttctttatgatcccccaaccccttctttagacctaaatgaattagcaatacttcgattatttcattgggtggattattgtggcaagagtttagcaacatatttctaaagattactttcaactactctgcaaatc

SEQ ID NO: 75885 - DNA, 1043 bp, Homo sapiens
caatgacagttatatcacccacaaaatatatatatatatataaacataagttaatttccattactgcctattaaaagtaataggtacatttaagtttatttatggtagaaatcaattacattttaaatagccaggaatgctaatgcctaaatccctacagttttctctaaaaatttaattataaaggaatttcatttatataaccttggtttgtgggaatcgttatatagcttaaagacttacatttgcgtaaggattcttaaagaagtgtggtgtagatctgttaaaactgagtaggcaagctcagacttcaaagcataagtaacctgtaataaataatcaaagtcagggtactgatgagatttcactgctagaaaatagcatagcttaacattctaaaatttccctaaagggattaactctcatgtctccatttggaacatctccgggaacacttttttcctgactcctcattgtgcatgttataacaatggatcttcctttttacctggaacttgggtgctttcatggcactgaagttttaggtaacacttccttgctcctgttgttgatatattcgtctctaaaaatgggtgcttgagccaaactggtgtagctctcttctgagtgacatgtggggcatctaatgtaggaaagaataaatgtttatctcctagtaagccggtaagaagaatttcaaatttaaaacattaatttgatctagcctgggcaaaagagcaagaccctgtctctaaaaataaaataaaaagtaaaacattaatttggcaggaaattggtctcctgtgccttactgggatggggctgataacctttgtgatctcatttccctccttaattaaattaatacatttggaatttaggatatataggttgaaccatagccaattttttgactgtttttgacactcaaaacagcagtttcatagggttcaatccaacagggtcaggcaagcttccagagagctgaggggcatggaggcctctctacatcctaagtaaggctaagtggaattaaacccaaa

SEQ ID NO: 75886 - DNA, 1032 bp, Homo sapiens
tcttttgggatctttaaaaatagacaaaagaataatttttagttcaaatatgtcaaaggggtctactctgtatgttattcaaccttttcagttatccaaaatagtatcttgtttatgtattttctgaaattaggtgtgtcttcagtagaatacaattttataggactttcatttacaattaagaatttgtttttagtgctttccgtttgagactgacaaacaggaatgctagtcttcttactaaagttccttggagaattcatttatgtaaccttgaaaagtaatttgtcctccccagcccccagtctttctctttagaaacttaagggagatttttgattttgacgtagaatctttctcttaagtgcagagaacacttatgcttattaataaatatgtctgaagtgtttccaccaaacattttagaccataactgctttcaagtgaccagagaggagagagcactttgccagtcttgctggaaagccttgccagtccacaggccagcttagaagatgagaatctcccctctttgtggcaatcgaaagagggctaaaacccacttgatggggtcatttgaataaggctgacattctgtatgtaaaactgagagttgacagatgagtgtattagaaaaggaacaattctctgaggtcttaggacttgggcattattttgactagcaaaataacatgtgaaatttggcaacgtccggatcattaggaaagaaatttttctgaattcagagagttccaaggagaaaaacatagttttataaggaagtaaaatgctaacgtgaatccctaatttaagtcttaaattagagtctgacgtgagaagaaacatttaaatcagtggtatctgtggacccttagaggggctctgagacctgattttccatgtcctgcaaggtcaaaactacctttataacagtgctgtatatatgatttgtcctttcactgtgttgacgtttgtactattcattgcaaaagtggcggtggttaaaattgctgctaccttaacgagaatcaa

SEQ ID NO: 75887 - DNA, 1045 bp, Homo sapiens
ttgtgtttttagtagcgacggggtttcactgtgttagccaggatggtctcgatctcctgacctcgtgatccccccaccttggcctcccaaagtgctgggattacaggcgtgagccactgcgcccggccagcagttatttatttcttatgtcagttggttaatcagaaacatgcttgactggtaagtaaccaagagcaggctttgatgggaggtatgaaatcatggggacctagggagggaagggttaaataaggacgattaatagtgttcaagagagtaggatggtgctgctttgctactttccagcttgcctggaggtggtccccacctcagagcctatagaaagaggtccttattctagtttggtgatgttccttgtgcattgttatctgggttcccctcagcttggctccaaggaccttgtgtaaaactgtgcagaaggtgcttcccgttaactctgctgcttgtttatttttaggtatcttgcaatatattcagaactctccctcctagtgacagcaatgaatttgatccagaagaagatgaacctacccttgaggcatcgtggccacacttacaggtactttgaaataccatttgttataaaagaaaactccattaactcattagctgattagcatgggaattccttgaagggctttattcaccaagaaatcaaattagagtacactaatggaaagttagagaatgttttttatgtttcttattcttgataattagaatgccaaaagaataaaatagtgtcagtgtgatgctttagtgtcccccaaccccacgttgcaggtacagccagcagttcttatttctctattagagcttctttatgatcctgccctctagagcctccaacaaagcacagaattattttcacattagcattagttggatgtgattagctcacagagtatatatctcatttttagtggtatgtaccctgggaactttgtatgtctgtcatcacattaactacaaatgtgtttctttagttagaaggacaaaaccaaactgtaatagctatttcgtt

SEQ ID NO: 75888 - DNA, 1044 bp, Homo sapiens
caggatggtctcaatctcctaacctcgtgatccgcccgcctcggcctctcaaagtgctgggattacaggcgtgagccaccgcgcccggccgaccctttctcttctttttgtttactcctttccaaggtgatccctttggtctggtggctttaagtattatctatatgctgctgagtcttatatgtctctggttctgacctgtccagctcagaggtccaacttcatatttctaattgcctcctagatactgctcccttaatatgtctctaactagatccctgaatctctccgctaaaataagcaagtaaagaaataaacttttcccttttccagtaatctccatcttcggttaatggcctcagatctatgtcttgtccttaattagttctttcacatcatatatccaagccagcagcaaagcactacctttttgaatcagtctatttctgtcttccctaccatccttgccaagccagcgtcattccttgtcacattcacagccttctaacttgtcctcttcctgcctattctatacatagctgttggagtgatttttttttttaagcaaaaatcagatcatgccacttctctgttttaagatccactaatggcctctcattgcactaaaataaaattgaatctccttcccgtagcttacccatctgagctcagtttccatagctaggaaatggggataattgtggctttaactagaatatagtaagttccatgagggcatgggtttttatctgctttgttcactactgttttcctagtgcctagaacagtgtgtacacgtaataggcacttaataattatttactggatgaataaacacattcagattatgtggataccccaaagcctttcttctttcctctttcagagcagtatattatgtagctcagtattttctgcattacataggaaggccagctaaggcttctgatgcaatatctcctttctttttcccttctcactttttacgcatgttctcctgtccctccctgtcttatgtttgggtcattaggaggatatgtttgg

SEQ ID NO: 75889 - DNA, 1047 bp, Homo sapiens
ttctatgacacttgatatgctttgccattctttcccattgtggtagagaactacttcaccaatccagtcaactctgaattgtccaacccagcagacatgtgctttctcattcctcatttggtgaatgttgagaagtaaactaaataaagcatgacaggaagataaatctgaagaaatgacagtgtgtagctaaatgaaatgtatatacttatagaactacctgccttttggattatttacccaacttggccttcttttgctgtaactgagagatgaagttttgactaagtcagaagattagaacacaatatagggataaacatccttagaaataacttaaatttattcaagtcaccaagaaaatgttgaagtttgtttaaagcaaaaccacaatacccagctttattaatatatccaaacttctattttgtgaatatttattaaatgcttagtatatgctgggaagacaaatgtgttgtatattcctaattagttattagtagggagagacaaatacctaaacagatagttgctgcagcgtgcagtggacactgtaagagagtttatatgcccaggagtacaaaggaagagaagtttctgtttctttacccagattttttactatagagaagcccccttttcccccctttcatggtttactttcatgtcttgggagaggaaaaacacttgttaaaaagtgtagtacgtataaatgactcagttgggatgaagactcagtttttgaattacatgtatagtttaatgaagattcaaagttgagtaattaaagaacctttgccctgtcaattacattatagctggctggttgaagggaagtcgtaggttgatagttatctgaaaagtcatttatttcttcataaaaataatttctagtaatcactggaagggacaaaaataaaacaatagaactgtgtgtgctgtcattagcgatagcaaaagcatattctcacatgatcatttttttctgtcatctaggctaacgaataagaaagttggtctaccttttcttctagaaagaacactggg

SEQ ID NO: 75890 - DNA, 1048 bp, Homo sapiens
ccttgctttgtccttatagccactttttggaggccaggccagtgacttcaagcctcctttttttctttctttctttttttaatagagagatgggggtcttgctatgtcaccagggctggtcttaaactcctggcctcaagtgatcctcctgccttagcctcccaggcatgagtcactgctcccagccccttcaagcctttagtttgatcctaacatccgatgtgtattctaatatctttggtatgaaaaggaattagactacctcagaggcatttatttcttaaactttttttttttactttgcactgacaccagtgtagtttaaaatacaatatttgaaaaataaatgtatctaatatactgtaaaatttccttttgttcatttttgatagtccacttttgaatgaataaaataggaggtgtagggctagaacctcatatattttaatataatagagaccgtttgtgactttggaaatacctgaatgcattttaatctagccgcataggctcttcacaaaactgttgcatggtggggagtgatgttggtgcttactcatggctgtgatacatttgcataagcatgcaagtgccctatttaataatccatttaaccgtaaactataaattaaaagtgactgccagtgataaaggaagatttaatggaagcaaatttactatttaggaccttggtttttaaccatttttagatcttggaagtcttttgaaaatctgatgaaggcaactggccttttcccaaattggactaacatacaaactgttgcagataaatcaggggatttagagacacgcctccccgcttcctcccccgtgccccaatggaagcccatccatggatgacctgattttaaatttatgattttggagctcaactgtacagttaaactggttcattcatttaattcttaaatcattcattcatgagccaagctctctggtattgtgggaggctgtgattttttttttttttttttttttttgataagcctttggcactcctggaggctgtgattcttaactctcgctt

SEQ ID NO: 75891 - DNA, 1189 bp, Homo sapiens
attccccttttgctctttcctgtttttccttgttaaacctttttttctaatcttactatatatacattatcattatgatgtaaacatactctcctgtaattaaataatcttttaaaagcataattctgatggttcctaacactccattatgtggatgtaccattgtttacttaactgattttccaatttgggatatttaaacagtttccaaatttccactattaaaagtaataccatcatgagcaccaaagagacattttgaagtaataaataaaatgacttgttgacaaattgtatatagcagataaaggagaagagttaacaaaaactccaaagggttaaaaaaatagtgaacttcttgaaagaatggggaggtgggaggagaattctctttgagagataaatggagtccaatgagagtgaaattggttttgaccagcctgaatttgagatgatagtgagatgtcaaaactgctctatatgtaactggaagtaaagaaattaaggatatccatgtgccctggacacagaggtcgtagtggaaaaggtgataggggactgagtattgagaggagagcagcatactaagggctgggacttgttctacctctagtgctgacctttatttttctttttggggaggttgtgtacttcttcactggatgaaatcatgacttggaggcgttcatttgaattttgcattcagtattcccagatcctgaacatgctttatttttctattttattttatactaagacccactaatgtagttggtgctaattctgagaaagaaactcttgtgaagatctctcagtttattttggctaagattagagtatctgccattttttgtttgtttgtttgtttttttgctgttatactggactcttccccactaaaaagagactgattttttttgcataagcaaattaaattacttgaattagcagaagttactggagaatggaagaaataacttaataggaaataatcactaacttttgagtaaatagggtatattgaacccatgcatatgtttacttttattccctaaaatctccccacaattactgaaatgaaaaagttattactgaaaggaaataaaacccacaagaacaaagcaaaatagagagatctcaaaattaacattttggaagctagaaagcaaatgaacagtggttactacct

SEQ ID NO: 75892 - DNA, 1025 bp, Homo sapiens
cttaaaattgtttgacagctgtgacttgtctagcactgatatatccaataatatctcactgtaatgagtatactccccctgtctctacccctccccccagtggctggcagcagaattttgcaggataagttacagtactgcattcaagttttggtttctcttttctcccaccttttaatttaaccttgaagctgaaaatgtggtttaaaggtataagcaatgcttctgggaaatctattaagcacatggatgacaaagtgtgaaatcttgcttgtggcatgtgcaagtgggtcttggataatcccagctcttggtgttagtttgtatgatttggctgtctctctactgaggagacacagaaatgaaagagagggatttattggctgattgtttggaggaagctggttacaccacagtggtgcatgatgagcaggaaaaagctgagaaaatgagtgtcctcaatgtggaattcacagagacaggagtgcctgaggcaagaatctggcaagcagacaatgagcaggtcatttccaggaggcagttggctgctgaccagtatttaaagccaaacttgatctgtaggaaaacaagaagaaatatgctattcagtgacttctcaggagcaagttgcctctgaaaaatggtgcaaagacactagactatagagtagaaatgccatttctgtgatgagtagagagaggtgagggttggccaagtagtggagagggacagctggtggggtcatggtgaggagggtcaggagtggcacacacaaggaaagacatttctcagtaaaaatcaggctggttataattatttgctaagttggagagcaagtgtatttttttgacaaaatggacaaggaagttctattggaaaatatgatgtttctatacttttcagaaaggtagggagtggggtcttgggaggataatgttaggtgctaaatgggctactttgaaatactgtggaattggccttcctgcagaaggtaagggctttatgagaataggatagaccactct

SEQ ID NO: 75893 - DNA, 1023 bp, Homo sapiens
ggaatcaattaggagactgttttattggagaaattgtggagggcctaagcgaactgcaggcatggaagtagagaaggagaggaaaggaacatttgagattcacctaggaggtaaaattgatgctgcttgttagcatttatgtgaacttttggagtgtgagagaggaaggagtctcggatagctttggcagttgggtagtttgtggtgtggtgctgctgttggggagtagggagagcaggctttggatggaagctgaggagttggttttcgatgagttaatgttgaggttcttatgggagacctagatgtggaaagtaggaggtggaaattggtagttatcagaatgggagtagggcaggggaggaaaagaacaatgatggaactctagatgataccagtgaatcattgtttcagtgcagtggtacaggtgggagctagtgggttgaagagtagattaaaaaatcaagaggttgagatgacggctgtagataattgctcgcaccttgggtgtactgtcttcattagagtaaaatcctgtcacttctctcctacaaaaagtgttcaaccttgtcacactgatcatttgctgttattatttttattttgtctctaggacttggcttttcttggtttcaaagtctgcttcaattctcaatctctgcttatacctcaaatggtagaatatgtaattttccaaagttaatttagttttaagataaaatatattcactggtttttccttccttgctgttgaggtctttctttgagttcgttacgttgtttcttggccactattagctttgttttttcctactctcaaattataacctgtcacttggttatctaagtgctttatttttttttatacattctttgatttaactggaaaccagagctctggttagcctcttaatacaataatatgacattgtagaaaattatgaagttgcaattaaatctctcagagtctgccgacatgtactcttagtagtgcttggttaacctcgctacattattagctga

SEQ ID NO: 75894 - DNA, 1023 bp, Homo sapiens
tgtaaacacaacttttacatgcaccaggaaaccaaaaatgtgtgtgactactttattgagatatttgctttattgtgatggcctggaactgatcctataatgtatgtgaggtgtgcctgtaaagcaaaatagcccataaagagtcccagacagagaacatggaagccactgtcttcatttctcatcttccacttaactagtggtaagaacttgggtaagtagttttctctctaagcctcagtttcttctgttataaatagagggagttgatgatgaatcccttacatctttccatttctgaaaactaacacctcttttgatcaacacagtctaagaaattttgaatggattatgcctttcttaaagtttacaggccattgtgcaaagtagttccttcagaaagtggtttgtgtcatgtatttctcttggggtctcctggagtcatagctgatgaaaaaatgagaatcaggacttccagctcctttaggctttgctccattctgcttcacatcatctcaagtgtcaggtgtctgtccctgaggcatattttttttaaccacattatgctaatgcctttttggttttgttgttatgtatccatttgaaagatttcttggaatttctggctttccaaatcaccttgtgtaaatttttatttacctgagcttgaactctgtgtattttatattgtttatatttgcacatcttttttttttctcgaaaatgttttttttggggatacttcaaatatgagatgaaatctcatgggtgaagacattgttttagttaattcttaatgtttatttaaatgactcagtgttacacttttacattttgctaataaaaaagacagggcttcactttgccagtgagctcacaatctggtagagggaatactcacgtgaacagtaacaagataatgtcatatatatagtagtaaagtctgtacaaggcaaggaaggagtaaagggacgtgaaggtagatagaagggtggttaaggaaggcttgacagaatgattata

SEQ ID NO: 75895 - DNA, 1052 bp, Homo sapiens
gaaccatacagacctgggttcaaatgccagctctggccatactttctacatcaatgtgagcaagttactttaacttaggggttctccatttttgtgtggtgctaagaggtacatagggtggggggagggtagccatagttttcccagtccctccttaaatattccacctaggtaacatgcttgtgcttttgtttgcatatcagggtactcaacaccatacatacatatacagtccatagaacgtgtgcttactgttctgtaaggaaaactggaaccacgtcccacttggtgccctcattccctctaagcccattgtatatatacatcctggtgctggtcactttcctaatttgtgtaatacctgtctttggggggttttgtgaggactagcgacaatatttataaaagttttagaacagtctctaacatgtggcaagtattcagtaaatactatttttacatttcaatgattttattagatacttgattttacgatcattggtggaacccactgttacttctttgtacttaaaatactccgtcactgagatgtgttttattccattgccacagtggttcttaagttctctaattccaagatgatcctgcctgttgggtaatcactgtccccgctgatttctctttcgtgttactgtaaaacaaaatcacttcaccagaattagtgagggaaatgatagtgttttttatgaaatactaatgaagtgatagatgggttttgcaaaccaggatgagtaatgatgtataatggcatgttacagtatcagcattagtaccgagagcttttgatccaacttgatgggacttgtactttgagaactggtattcctgttaggggaagaaaagagtaagagataaaagtaatctatgtgttgtggaaaccatttttaacaattaaatgaagtctggataccacctacagacttctagaattaggaaagcaaagcagctcttatgggtataaacaaatcacatgcacacctcgttttattgcacttcatagatattgggggttgcttttttttttttttttt

SEQ ID NO: 75896 - DNA, 2802 bp, Homo sapiens
aagtagtagatacggtatcccctcccacccatgtgtaactgtgaaaaagaacactgttgtcatgtgaattcttatttttttttagcttgcctttgaagtaactttcacagagaattcctgttacctggaaattgatgacagacttacaccatttcctttttttttcttagacgttccatcctcagagcagcctgaactgttcctaaagaaacttcagcagtgctgtgtcatttttgacttcatggacacgctatctgatcttaaaatgaaagaatacaagcgctccactcttaatgaactggtggactacattacaataagcagaggctgtttgacagagcagacttaccctgaagtagttagaatggtgagtttctttttttctccgcggacacttttaagcatcttccatagtgactcacaggtgtatatattgcaagagtgaggtcattggaggtcaactccacaaatgagagccaacctttggagagctaagcaaatgtagtcggcacagtgctagaatttgaagagcatgatttcatgagaacgaaatccagaactttaactacgacagtgctgaagcaataaatgacttcaaaatatgaagccaagattgccagggtattactggatttctagctttggcaaaagaaaagacacaggaaaataacaaaagtcttagatccgtgtttgaaaaatattcaagcctgttggatgtcttttttttttttaatcttattcattgtggtatattagaaatggcttaatgcttaataaaattgtgatttgtagaatgtagttaaggcctctcttgggctttataactaacgcttctctttataatctccttgaagtcagggttgataccttttatgatttttgaatagtgtcttagattttgtgtggtcattaggagttatgaggaaaaacattattaacataatgtgagtaattacattcttactgtgtgaacaattattttagtttttcaaaagctgagccaaaatgtggttttctgatagatttctgtgggagagttgcctttcttggcatcccagaagatcttggagctggagagtgcacgctatttggggatgggctttgcagggtggggaagctggtctactgactggtgaaatagcctcagagatccttaaggtcagtgcatcgttgaggagtccattgcaggatctggcacactctctgtgtactgcggaacatctgcctggcttttgtatttagttctttatcatttgtattcaaccaatgcagaaaagagacttttgtgatggagtagatatgtttaaaaatgatagttcagatttgcaaaggcacttgaatgatctcagcgtgagactgtgactgaaataatgaaggtcatctgaaaacgatgcccaatatattcctcagttctatatctgaatgtatattggatttgttgttaatttacaggaatgtagcactagaatgttttgtaggttaaagatgaccgtgtggctcttgagcagtgcttctcaaccaggtgtgattttaccttacaggggacatttgtcagtgtctagagacatttttggtagtcacaactagatgtgagaggagagtactaccagcatctagtgggagaggccagagatactgctaaacattttacaatgtaccgggtggcccccacaataaagaattatctggccccagatatcacaagtgccactgttgagaaaccttgctcttgagtttgcatgctatctaaacctcttaatgtgatgcagaggatcttctctagtctacctgccttctgcagagcacagtccctggttttagcctacctgtatcatcagccaacagaggtatcggttatgactttcttctgtatcttcccatggatagttcatgaatatataagtatatgcaaacatatgtataaatatttttttttgtaagcacacaaatggtggcacactatgtattttctgtaccttgcttttttcacttagcaatatatatttcagtacatataaagttgccatattctttttatagctgcataatatttattgtgtgaatgtaccatatttaagcagtactctatgaatatccttatacacacatcagtttgcctttgtatgaggacatctgtatacttatttatttttaaaaatttaattttttaagagcagttttaggttcacagcacaattgagaggaaagtacagagatttctcatatgcccctgtccctgcacaagcacagcctcccccattatcaacacctcccccctcactcccaccagagcagtacatttgttacaattgatgatcctacattgacgcatcattatcacccagaattcagagttcacgttagggctcattcttggtgttggacattctgagtttagacaaatgtgtaatgacatgtatccaccattatagtaccatacataccatacatcactgccctgaaaatcctctgtgctccacttcttcatcacccaccaccttcaactccctggcaaccactgatctttttactgtgtccataattttgctttttccagactgtcatatagttggaatcatacagcatgtactcttttcagatgggcttctttgacttagttatatgcacttaagtttccttcatgtcttttcaagacttgatagctcatttattttagtgttgaataacattttattggttggatgtaccatagtttatccattcacctactgaaggacattttagttgcttcctaattttggcaattatgaataaagctaatataaatatctgtgtacaagt

SEQ ID NO: 75897 - DNA, 1842 bp, Homo sapiens
tgacttggattttggaggtgggtagctttgagttgttaaaatctagtgttactgtattgtggtcagaattcattgcctttatgatatgtttttgttttttatgagattctctttatggcttcttaagtgatccttttaataaatgtttatttaaaaagaatatttggatctacttcagggactgcttacatagacactaaacttttcttatatagtggaaaccttctggactactcagagattgttccttctctgatctctggcctgtcctgccttctcacattctaccttttcacatccacctgggactaggtagatgagagaggagattgggagcagtattagctatatgggacagtctgaggcccagacattatatgaagaacctcttgtttggactggtcatccttcaacatgtataaaactttcctaaattgttaccataaagggattgtctctttaagaacccccttttggttcatcttgactgtgcaagttttttaatttaatgaaggtaggtcattttagaaagaatttagtttatgataaaggacaaatcgcagcttttgctgtgttaattcttggtgcatgggctagaggggagatagagaaggggtttagcatgatgctttatgaatggagagtcatttgttcattttgtctgctttcttcctcctcttctgtgtttgcacacaccctgtgttctggaatagggtatcactctggtctttcactgtgtttcgtgttgcattgcacagtggtgaagggtccaggctttggagccaatccacttgggtttgaatcctgtctccactgcttattaactgtgtgactatgggcaagtcactgactctgtgttttggtttactcatttgttaagttagaaatagtacctactgcagaaggccattgaagggattaaaggagatataatatgtataagtgcttagataaagtgcccaataaatgtacccaatatattcaataaatgtaagttattatccttattccactggacaggtggatagcctgtttcacatttgtctatgacattatatcactttgcacaaataaaggataaatttcaactgcctaacattaaaaaataggactaagtgttaactgcctaaattttttgaactgctaagtatatgaatctcttgagtactattgcagtgaccacaaatgttaattgttgttgtcactgcttaaatgatgatgtactttaggaggaaagactacaattcatcgatgcttttataagttatatatgctatgttaaggagttcaacatgtagatagtctgatttttagactttattaaaatcactatatcaaatattgaattaattaaaatttccctaaagattttgacctgtaacgaatgttatattaataagctttttcttggccagggcggtggctcatgcctgtaatcccaacactttgggaggccgaggtgggcagatcacctgaggtcaggagtttgagaccagcctggccaacatggcaaaaccctgtctttactaaaaatacaaaaattagctgggtgtggtggtggatgcctgtaagcccagctactcagaaggctgaggcaggagaattgcttgaacaagacttcatctcaaactaaaaaaaaaaaagctttttcttgccccctttgcagcatcagtattcccattcggctgctaggtctggggtctgatttcgatctcgaaagattttagtaattaactgtgatggtcctgtgcatgaattagtcattggttaaggatatagtcatgctcataagcagccttatttcatttttatttatttattttaaacgcccaaagcaggtag

SEQ ID NO: 75898 - DNA, 1084 bp, Homo sapiens
ggtgacctttggtttttatttgtaaattggagagcatattgttagcttttgggaaagggaaactggagagcttcatgacacaataataataaatacatgttcgttgtctcatttgggaagaataattaatatgttattattatctaaaacttaaacctacctgcctaaacttgttcactagcttaaggctgattttatactgttgtaagttttaaaacgtgaatatttgtatttaatagaaaagtcaaccaatttttcttttagactgcaacttctcttaaacaaataactaaccatagcaatggaagtatatgtacaactctaatgggggttagttgctgttatttagcatgatcatcaccattatcatcattgttattggtatgccccttccctcctccgcagcaagactgttggggcagtaagactactggggttcagatactagctgcagcccttccagtgtgtcatgttggacaaatgacttagcctttctgggtgtcagtttcctcatttgaaaaactgggatattaatagtggctacacctaagatattctgaggattaaaagggataatgtgtgtcaggagcttagtacagtgctttatggttgtaagtgttcatgattgttattgtctctattctttttacctggaaatttcagtcaatacccacaccttcatctcatccttttgacagtattctatctgtgctagtcattctatgacacgttttgaacctttaaaaaacgtgtatgctaataatcagcaaagtgtttctcaagctctctaacagattggcaagatttctaaaagcagccaactcgacattcacctattatagccaaggccaagaaagaacgctttcactgttgtaaatgtttccagggaccttccttagcttggaaactaaaagttttcactgctagctttaaataatggagagaaagaatttcaaaggaggaggggatgaaagaaggattttagagtgcttactttaaaaacggtggtttttaaccgtagtgacatactgaaatcactggagtcacttttataaaatacaaatgcttagcagtgaaatatcac

SEQ ID NO: 75899 - DNA, 1026 bp, Homo sapiens
gtgtgtgaccccaaggacaacctcagccatctggaagaatgcagaatgggcttacatttctttttcaagttcccaattatgctgaaagaaatcgaattcatttgacatcttaaacgtttctgtgatgtttttccagaattataactgacagacttttgagatagtggacctagttgccgagcttagttttaactttattatacttattaaggtcaactcttatttctcatatgtggtctggctccttaagtggaagatagagttatataatatgttttctgaaagggaaagtcattttcagtacaatctgaagagaaaatgtttgtactaccccatggcatgtttagctaaactctgggttacagtattagacatagaatgctgaattatatcaaaattcagaaaaaggctgtgcttagaattgcactgtaagcatgcatatctttaggtttcagtgactgtcttacccttggagacggatgttttgtggctaggaaaccagcagcatagaaggaacatgttgtaaatagtgttttttttgtttgtttgtttgttttttttgagacggagtcttgctctgtcacccaggctggacagtggcaagatctcggctcactgcaagctccgcctcccaggtccatgccattctcctgcctcagcctcccgagtagctgggactacaggcgcctgccaccacgcccggctaattttttgtatttttagtagagacggggtttcaccgtgttagccaggatggtctcgatctcctgacctcgtgatttgcctgccttggcctcccaaagtgctgggattacaggcgtgagccactgcacccggccaataatgtttttaaatacttttctgttctgaaagtgttaagcttcccagacacgttcgctgtcctttttaaactctctgcattactgttctccaagttttgattttggagtcatatactcaaaactgttcatacacacatacatacatacacatatgtatgtatacacatatgtatacacacataca

SEQ ID NO: 75900 - DNA, 1035 bp, Homo sapiens
ggtattgtggcctttataagcctactcctgagaacagcccactaattaaatgggaggtgtggagatttggtccttgtaaatcaccatttagaaatggagatgtattggattcatattttgtgtgtgtgtacgtttgtagtaaagtcataaaacagactctactactctacagtctaagtgcttcctcttgttcttagttttcagctgttagtggacactagtcaggtataataaagtagcttcttattcagttaagtttgtgttaaatatgtgatcctatctgtgaatgtcatgaataagtaatttatagatgattttatgattactaattgttaatggatctaaaggccttaaaaatctaaggatagaagaacagtgatcaccagcagtatagggttctctgtgctggtaatacatccatatagtagggcattgaatgcctaaaaactactaatcattgattgattaataaaactattagttgggtggacagtagagtctgatttagaagtcagagtatggtatgtgatatttgaactgattgagcagggatttgaagcctccttattaaaggatatgttattaataatataaactttagcggaaggaggagtggtctttttgtagcctataagatatgtacttgaatataatctctgttactgaaatatacttttgagcaaagcatttatctttggtgaatttgggtttttcaattgcaaagtgagtatcaaacctagccagcttagctcactgggttggtaggatcattaaatgaaataactcattttgatccagtgttgtgccttccatgagaacaacaacaacaacaaaaagcaaaagggggggaaaaagaagaagaaataatacattttgagaaagcttgaaaaactcgagcattatacaggtttaagttagcattcttcctactttcaaatgtgagggcattgtttgtggaatattctgactccagcttgtgttaatgcttttactttttttgttgttgtttaggtttatcaatgacagatagaagat

SEQ ID NO: 75901 - DNA, 1337 bp, Homo sapiens
gaattttagtttgttgtcagtatggtgttaggtgctacatagactgagttaaacaggcagccacttcttacctttattgtactaaagacttaagttatgttttgttcagtgtctgttctaagtgtagacaaacaaaccagtcagttcatttagcaaggtgccaagtgaacggagctagaatatttagggacaggcaggtgaagctttcacctgaatagtacctgagaagttggctttatttattttttttactgtaaatgtgtgaggtagaaaaacaaggctgtccagcacgtggcagttctgaggatgatccttgaggggtgatgtctgcctccagtcttcgctgaggagaaaagcacccctcctcccccacccacagcaccatgggagagaggccctggaagttgactttatatagaagttaatcttccagagagctcagagtgtatctctgtgtgttttcatctttattatgaaatctgggaataacagactggagataggtattgttcttaatgatttttttctttctttctttttttgaaacagtctcactctgtcacccatgttggagtgcagtggcatgatctcagctcactgcaacctccttctcctgggttcaagcatttctcatgcctcagactcctgagtagctgggactacaggcgtccaccaccatacctggctaatttttttttggatttttagtacaagatgggggtttcaccatattggccaggctggtctcgaactcctggcctcaagtgatctgcctgcctcaggctcccaaagtgctgggattacaggcatgagccaccgtacccggccaatgatttctttattgagaaggagattggcatctagagaagttaagtgacttaatctcctctcagggtaagtcagcattggagccaggttctcatggtttctcagtgtgtacttcatatcctagattagtggttctcagagcatgctttggggatccccaaaggttcctgagaccttttcaggggtctgtgaggtcaaaactaattttatagtaatacttaagacattatatgtttttccctctcccatgaccgtgttttccagaatctgcattacctgtactgttgcaggaaattgaagcaaaagtgggttttgagaatccagttgctttctattaagccagatgttaaagagatgtataaaagtgtaaaatggtgccacttttctcactcatttttttgaggaaaatgtggtttaaagtagtttaaaaaatatttacaattgtattgaaatgaattaataaatattaaaaattttcccatttttaattttaatgtggtaaatattgg

SEQ ID NO: 75902 - DNA, 1068 bp, Homo sapiens
ctctgtgccctttctgcacgggctatttattctcttggctgggagagcccttcttcctcttgtgattctggccaaccccttctttttgctctctcaagagttggctcagatatcactacttctttgagggagaactaggtatctcctcctcattcccactgacagccttaatctcctatagtacttaccacactgatgtcataattaggcaaatatctatcttctttatgtctgcgagtgcattctgtttaaaactgtgaccccccctccccatgttcctttccttgctctgcttattttttctcttgcacttgtctgttttcaacatactgtatgattttttaaaaaaaattttatttatatttttaaagtacagatgagatcttgctatgttgcccaggctggtcttgaactcctgggctcaagcaatctgcctgcctcagcttcccaaagtcctaggatgacaggtgtgagccactgggcctggcctatattatgttcttatttctaatgtttattatctgtgcatcctgctagagtgtaaactccagcaggacagaaatctttgtcacttttgttcactgcggtattgtcggtacctagaacagtgtctgagccctagaaaatgctcaaaattatttgttcaaggaatgtgtacttgtatgttgagggcccagctcacagtaggccttgggtaaattaaactgatgatgaacaggttattctgttagattttctaggggctgtctgactatgccttgttttggtacttaaaagtaaatataattaaacactttttaagatttttatgcattcagataaaatgttttgttaacagtctggtttactgtatttattagtttcagatgtcggagtcagccagatgtgtttcatgccttctcatattactcccctttcttgcgtaaaccaaaccccaacaactaaataaataaagatttcaccaaaggtcatgttttcagaataccatctaaatagaggctaaaatcacgcgtgactcatggcaacagtttttttttgttgttgttgttttccaagacggagtcccac

SEQ ID NO: 75903 - DNA, 1052 bp, Homo sapiens
catcatgcagtcaaattaagtgctgtaagagagatgtgaatgaggggcccctgcagctcaaaggatgggagagatcacatcaggttcagggaatcagccaggaaagtcttcatgaaagaagtgtcatttgagagaaccctctaagggtggttggagagaaaggctggagtggaaaggggccttcagagttaacagaccaggggttagacatgggattagctgagccacagactgggacttaaagtttatgcgggatggtggggaaaaaggaggcaggaaagcaggaacaggataggaaaggaaatgggagggtgggaaacagtggagtactgtggaccacatgtgttttgcagctttatattctggtataacccaaatgatggtattggtaaacacttgtgatgggattttgtatctagtgtgtatataatttagtatacatttcaaagtaagaatactggcctatatacataatagatatttatgtatgaatgtgtgtgtaacttataccagaaaagagtgctccttttgggatttgttagggaacctaccatttgtgcaaatgtttctacttgtgagcatcatgaagaaaaattgctccctggtagaaatgtttaaaggatgtgtgtgtgtgtgtgtgtgtgtgtgtgtgtgtgtaatggggaaagaaagatgggtggggtcgggggaggagaaatcaggagaggggaggagagaagtgggaattgggaaaagaggacctagaactttaaaatgggattagggtacattttttagaggaaatgcctttaggggacttcgccatcaaaaacgtttgttgtcggccagtgcagtggctcatgcctataatcccagcactttgggaggccgaggtgggcagatcacctgaaatcaggagtttgggaccagcctggccaacatggtgaaaccctgtctctactaaaaatacaaaaattagctgggcgtagtagcgcatgcctgtaatcccaactacttgggaggtggaggcaggaaaatcacttgaacctgggaggtagaggttacagtgagct

SEQ ID NO: 75904 - DNA, 1004 bp, Homo sapiens
cagggatgctgctaaatattctatagttcacagaagagctgctcacaataaatagttatctgattagcttggcttggtggcaagtgcctgtagtcccagctacacaggaggcagaggcaggaggatcacttgagcccaggagtttggggttaaaaaaaaaaaacaacccaccaaaccaaaaaagagttatctgggcctgactatcaacagtgctttacacaaaggagttagggtgctctatcatacaactatctgatgattcttttgcttaaactgattctaccccatttcttatggctgcgtgccacactcacctttagtagatcagaattccttgcctagagcggctggctgctcttgactttgtgttgctgtttctagctttttcatgttttgctcagtggtagggacaggcaggccaatttagtagagcttgacaaagtgaagcctggtatcttctatgaggctataaacgttgtctaaagacgcaatttctggttctgataaggctcctggtaattcctggactggaagacttggctgtcattgttttgctgttaagtaccccttccactcaaatgcaaaagtaaaacacacacatgccaccatccttcccaaccaaaccaaaacaaaaaaattcaacaaacaaaaacaaaacacttgatgatcaaggagaacctatgataactcttcttattccacatttcaagtttgtacttgatctgtgccatcatacaagaaacccaactggtatgactgtcctgagtgcatttccagtgaagaggctgggagagtccaaaagaatgttttgagtcatcagatccttttaaaatgtcagattctttccatgggattaatttaaacctgttatgaccctttaaaaatttttataagaggcctcagagccataataacatggaatactgcttgtttagtagaagcctttctaaaggccacctttatatttggtttaattttttacattgtcaaccatcatgtaagag

SEQ ID NO: 75905 - DNA, 1055 bp, Homo sapiens
tatctttggagatggaagaggtgtggataatccagagatgatgcttgtagtcaagaaagagtaattgtggccttttgatggggagccaagttttatgaaatcccacggagtcagtcttcagatccagggttcttaattggctagagatcttgcaagttattttgccatgttgttttttgaagggaaaggaaatactgtcatacgtttatgcatctgtatataaaatggttagaaatggtatcatataggtattgcatgtttgtgatcataactgcctgaataaaggttaaaatgtcatgggaaaatgggaaaacttaagcaggaggaaatagagatagtttatttttagcaatttagaatgttccatttaaaagcagttaaactggctagagctgtgggcagggggaggggtactggggtggtttaaaggccatagctattatggtgagtgcctgacattttgatttgaagtgtgtctctgcctgtgtattttagaaccagaaaaattcttggaaaactacctttttttttttttaaactgtgtacccagataaaatagtttgttattccaaatctagaattgagattttaatttttattaatttttatttctgtcagtctttcaggcatttggcttctttgcttattcttttaagatttaagtcggagaagaaaaatcacatccattagttttgattactcagatcaataaattgaaaaggaaaattagaatcatttaaatttgactgcatatgatgagattctgctaaattaaactataaattacatgtttattaagcactttgtaaacacttattaaaacaatgttctaaattgaactatttccctctgtatatgttcttagttattgatgggttatggttcaagaggcgagctggatgaggtttcttaactctttgaggttggtttggcaaatttaattaagccttaagtggctcactcttttttttttttttttgagacagagtcttactctgttgcctgggctggagtgtagtggcgtgatcttggctcattgcaatctccgcctccca

SEQ ID NO: 75906 - DNA, 1117 bp, Homo sapiens
gacttgtcatttaatttgtctctaccttggtctcctgatttgtaaagtgggagataataatagtatgtagatgtagagttgtaagaattaaatgagttaacatgtggaaagcacttggctccaatttgtactctataaattttagctgctgttacgctaggatgtcatagtttttctttttctttttttttttagagatgcggtctcactctgtcacccaggctgattgtgtagtggtgcaatcatagcttgctgccaccttaaaatcccaggctcgagagatcctcctgcctcagcctcctgagtagttgggaccacagatgcaccaccatgcctggcaatttttaaaaattttcttgtagagacggcagtcttgctatattgcctatctatgttgctctattgtctcaaactcttggcctcaagagatcctcttgccgtggcctcccaaagcccgctgtgcccacccagggatctgtcatatttctaattggttcatttatggtcttccatattggtatttactgtttctgtgtcattaccagttaaccatacaagtatgtaacaattattcatatcagttttattattttgtcctaaatcctgagtttagaatttagtcaatgtaaacgatttcctgtcacaaagacttagctggtaaaaagaactgcagcatttggcattgtaagtatgcatcttcatttggcaccttggtgtatttatttgaatgagaggtgatgtacccatctgatttagttaaagtcaaaataaatctagggcgtcggtttctgaaaaccaagttttactttcattaaagtgaatttcaagaaaagttgcttttgaaactaattttttaaaaacacatttatttctcatagactttcaatatcaaaggggagacaatatgttcctataagaaaaattcatagtgcccaaaacatacccatcaccaccccctctatagatgggaaaactgctgaggtttaatttgagtgatgtgcaggatagttaaatgaagcttgagaaatacctgtttacaatagttacacattgtccaaataattttcagcataaataatgagtcaaatccagattaggatgtggcagagggattgtg

SEQ ID NO: 75907 - DNA, 1110 bp, Homo sapiens
agtgcttttggggaaggataatagtagggagtattgaaacagaacatctaaaacaactgtcttccttgcagtgttaacatgtgatataaatgtggtgttttttgcccttactgcttgccttatgttacctcctttgctctggaacagttgttttcagacttcagtgggcataggaatcacctgagaaattggttggagttgttgatttgctatcttttacctgggggatatgcagtccaggtggttcaaatgctttttgagcagactggatattgctttggcagtgtcatagtgcttgtttctaacctctacatagaggcctgttcctgcctgtcactccacaccccacgttcttcaatggcctcagtgcctttgctctattcattcctcctaagatggaaattcgtcttctgtctccttagggctcagctcaagaggaggccttcccaagaagctttgtctagtctagctcactctgatgatgcctttcccaaaatccctctgtacatacagtagttaaaaaaaaaatggctaactttccctgtttggctcttatagtatgtaattttttatttatggtctgtattgctcattggaccattcctgtatattgcactgctttactggttatctttcaaggttcccatgtgcaacttcagaggttgtgcagtgcataatattaatgtgctagtcctctgtctttgtatttttgtttctgagatgaggtttcttgctatgttgcccaggctggtctcaaactcctgggcacaagtgattttcctgccttggcctcgcaaagtgctgggattacaagtgtaagccattgcacccggcctagttattgactattactatatttcatgagctttcagacacctttttctgatagttttctactggtagatttgcttttataaaattttataaaatttcaacatggtaatatttatccttcctatagatggcatttgggtattgtggtgggagtgttttctttttcttttttatttttttgagatggagtcttgctctgtcacccagacttgagtgcagtggcatgatctcagctcactgcaacctctgcttcccaggttcaagcaattctcctgc

SEQ ID NO: 75908 - DNA, 1800 bp, Homo sapiens
agcatgttagccaggatggtctccatctcctgaccttgtgatccacccgccgcggcctcccaaagtgctaggattacaggcttgagccactgcgcccggccaatctttttgttattaaggtgaagaattctttttatattctgggtataagtcccttatcaaatatatgatttgcaaatattttctcccatttagtgggttgccttttcttgatggtgccctttgaagcatgcaaatatttacatgctcagaaaatatttgtcaaagaatgaatgaaagaaacactaccttttattgaaagccttgcctgactttacacaacgttgtgattttgtctcttggatacctagggtgtatatattttttcatattgattataatactccccacattgctttgtaatttatttgtagtattttctccctcacccagtgataccttgggaggcaggtgctgtgtctactatgttcctaactgagtttctggtgtgggtaatagggtagtatgtgacggtcactgaatgttgcctgaatgaatgcatggatttctctgtggaactctgtcaagtgagaggggatgcagctggtccagattgttggtcttcaatttttatgaaccagcttagattcagattgtagagtgtgtgcagaaggctgtgattctccagcttgcagtccatactttatcaaggactgcttggaggcagacgagcttgaagaactcagcctccttgcatgggcttcttagtgtggagaaggggtggggagagcagagtgaatggcgaagtgttcagtgtgtgagcaggttgtcattattaatgtatcgtaatgaccatggtgtttatgggatttcttcaattttaaagtggtcattaccaaggttaattatcttcttaaccttagaggtgtaaagctgcttttggcatctttggaaacttcttttggagctaccagattagatggtcttagtatttatttatttatttgacagagtctcactctttcctccaggctggagtgcagtggcatgatcttgggtcattgcagcctcggctgctggggttcaagcaaacatgtccggctaatttttgtatttttagtagaggcagggtttcaccatgttggccaggctggtctggaactcctgacctcaaatgatccgcctgtctcggcctcccaaagtactgggattacagacatgagccaccacgcccggccggtcttagtaatactttaagatttctttcagctctaagatttcataactcaaaactttgtcttcccaatgaaatctttcttgattactttagtccttaatgatccccatcttcttaacctaagtcatgcaagacatatttatgtgaacagcatggtatcattcattcattcagcaaacattgcattaggaacttggctagatgctggagtgacaaagatgaccaagacagcattttttttttaacagtgtttactgaacacatattttatgctatgccctgggggtaaagggtgactaagacgtgtaaggcacttgcattctacaggccattgcttttcatgggtataggttttctctccccagttagactgtaagccttgttttttgtatctcattcccccaaacatctaatacgatgagtaaatagtttctcaagcagtacttgattgacttctttttcctctttttttgaggtggagtctcactctgtcgccgaggctggagtacagtggtgagatctcagctcactgcaacctccgcctcctaggttcaagccattttcctgcctcagcctcccaagta

SEQ ID NO: 75909 - DNA, 1050 bp, Homo sapiens
ctttacttctttaaggtctctgtttatatgtcaccttctcagagaggctgtcaatgatacactacataaaataacattcttgcttaccagtctctggcttgctgtattttattccttagcacttatcaccacttgacagttgtttattttctatccccttcagttagactgcatgctccatgagggcagtgaccttgagtattttgtttgctgtttatccccagtgcctagaacagtgcctggtgcagggtgtatgccacctaagcctcagcagaatcactgtccagtgacattcatcacctggtcttagtggtggctcttccctagaagtgaggtgaggtctgtgtcccattgttgttgggctggaggcagctggttttctcctattcgttgatgctcagctggaccggtgttgtgatatttaaggaaagtttcatcctatccctttttgccaacagaattttaatttgatgactttatggtcatttttctttataaatacccatcttcatggatttaaatatataatcattgtatgcttatggtttacataaatatgagtattcatatgtttgtttttttgaagagggtggcacatggagcaaacactttttacttaggcatggatgctcaggtagtggtgttgatgccttctttgtgtactcttgaaattcctgcaagctcccaaaccttattatactcagatctacgtaccaaattgcttaggtcccagtgggccagacttctgctgagcgttagctaactcagggatagagttgctgtccttcaagtataatttgtctctcagatggctttcccatagctgattctcaggctttgaatatgggttctgttagtccacaggcattgactccatttgcaggtgtgtgtttgtaacatatagtcaaacctctaacatttggaataatgagatgagatgagaatgagtaggaggaggggcagtctggtttagtgaaatatctgatgcacagaatatttaaaattaggcctggcacagcgactcacgaggcctgtaatcccagcactttg

SEQ ID NO: 75910 - DNA, 2054 bp, Homo sapiens
agagaaatggcctagaaggagatacgaggaaacttaacactggtcatctttggggaataggagtggaagttttcactttctatcttaacattaaaaaaattaattaaaaacagaagggtagttatgtgtctcaaatctgcctttccaattaatagaaagtaacaactactgagaagaaaaatgatatctataaacattggtgatcatcacattaagcctttgtatgatcacttacagagtctaccagagactttcaatacagcataaatgcttttactcttaagtattatttgtggtatgtatgtttgtccttctatccttccatccacccatcatctatctctacccatctatctgtatctgctaaggaagagaagtgcagcttggtttcttttctataaggaaagagcgtaactgttcctctatctagatgatcttgaaagagcatattatttttgatgtttggcaagagggtaaagtacttagtaattttcaaaaatggtgtgtgggacattgaaaagatacattgtattggtgtgaaatcttttattttcagtgttctgagattcttttttttttttttttttttttttttaccgcagagtctcgctctgtcgtccaggctggagtgcagtggcacaatctcagctcactgcaacctctgccttccaggttcaggtgattcttctgcctcagcctcctgactagctgggattacaggggtgcaccaccacgcccggctaattttttgtatcttagtagagatggggtttcaccatgttggccaggctggtctcaaactcctaacctcatgtgatccactcacctcggcctcccaaagtgctgggattacagacgtgagccatcacacccagctgagattcttatcttggtaattttttgcacagagaactcagctctctatcatactacattttaatgagctacacggtgatttatgacttgtgctctttccttttctaatcagctcatcaacaccatacccattctatgtcagtttactttagaattgaaattttgccttttatataatgctgttaggtggcttgcattcgatttgggggataaatagattttgaatcagcttttgctgctcaacaaaccactccaaaacttggtggcttaaaacaacaggcatttatttagttcaccattttgtggtttggcaatttaagctgggctcagctatgtgatggttctcttctcctctgagctcactcatgaacatcccgtcagatggatagtctcactcacatacatgacggttggcaagggctacagggatgcctgggctttgtgagtctcatcatccagcaggttagcctgggcttctccacatggtggcttgtggggttctctaaagcctggggttctccacttggtggcttctggggttctctaaagcagtaagagagggcaaatgcaaatgcttaacaacttttgaaatctctgcatcatgtttgctattgtcccattggccaaagtgagttacaagtccagctaaaattccaaggatggagaaagactacctctttgtgggaggagctataaaattatactgcagtggcatgaacacaaggagggaaagaatttgtggccatttctgcaatctgccataaatgtacttgggacttctcaccttggttcaatggatactgtctttattttgaaatatgtctagaatccaaccacttctcactatcttctctgcctcctttgctacttcctagtccaaaccactatcatcttttgcctcccaacaggttccctgctgcttccaccttttcacgtgtgttctacacagcagccagagcaagcttttaaaaacagaagtcggattatgtcactcctctgttcaaaaccttccactggcttctcatttcattcagaataaaatttagattactttctgaggttacaaaactttacatgatgtggctctttctttgacctcatcttaactcactgcttttagccacactccctccttgctgtttctcaaacacactaacaggccgtagggctttgcattt

SEQ ID NO: 75911 - DNA, 1610 bp, Homo sapiens
aataaaattaataaaataaaatctatctgtaggctcagctatatgttctatggatgccactgtgttattaaagtacacaatcttaagtttttatgtgttttaattccctattttatgaactactgcttggaatagtggggaacataatgcaatagaattaattcattaagagaataaaagtttagaagattagatctagaattattgtcagtaccaactgaagttcattaaatgagaatgcaagcaacagtaaaaccgcagttaggtgaagcaattaacatcggtggtgttatggttactgtgaagactggaaaaataaataattgaaagtatttcaaatttgacaaatggaatgaagttaaaaattgaatccacctccttgtcactttctaattttaaattttcctgagctattataatttaaattattgagaattatctgcactgcattttgtgggtggtgaaaattgagtggagtgagtgcttttcagtaccagtgcttgaagcgaaactggatttgtgatggtttacgtaaggaagaaagcatcatccatgattatgtcagactctgacctgacagggtctaacaaaataaataaaggactgtggagtttggggtttttgatagtgcttaaatgaccactcttgtacctaaatagttaataaatttcaaagtgtttttagtcatttcatggctagtcaagacagtgtgcattcctgtgggcccaaatctatatttaatatcaaaatattcttggtgaaattatgtttcttcacagttttacttaatggaatattctttttcatttgtgtgttaatgtagggcactacacctacattacttgactaggaggatatcctatttttattttttattttttttaagcaaggctggtaataattatgtactgtcataacataatttcaccacctcagggtgtcatagttaacaattgatactcatttgtgcccacagatgcaaggatagttgaccagttctctgcctcttaaataatacatattttttgagtcataagacttgggtttcaagtggatcctataaagttgatctctttgtatgctacgtttagggaagtgagtgtttgtttttaaaaatctatttagttcatccatagactaaattgtttaagcaaaacaatatatcactatatattatatattaggtttgctattgagctctaaaaagcattcagaaagaatttttgagtgaagtaatatttggaagctgtcaaagttagtacattactgaaccgaaggattagcctagccaaatatgagctgctttgctctatgacagatgtgaaagcattgtgttcacctgtcttcccagctggtgtgtgttgagatggggaggttggagattggggaattggatgtgtgtgatgatcttggtatcttgcctgtgaaacatcgggattggtggtggttgccaaatgtaggaaatacgttgatgatacgtggacagataggaaatcgctattaacctaacacctttcattcagtgggagcatctaaaagtcttctaaacaagatccaaagaagttgctaggagttttgtgaaagtatctttgcagcaggtggcttagaat

SEQ ID NO: 75912 - DNA, 1050 bp, Homo sapiens
agtgcagtggcgtgatctcagctcactgcaacctctgcctcctgggttcaagcgattctcctgcctcagcctcctgagtgggattaccggcatgtgccaccatgcctggctaatttttgtatttttagtagagacgggatttctccatgttggtcaggctggtcttgaactcctgaccttgtggtctgcccgcctccgcctcccaaagtgctgggattacaggcatgagccactgcgcccggccaactaactggtgtttttaatagtaacccgtcttctagaaataatgctcatttcactttaagaaagtttaaagatattttaatcaaaaacagtttagatgaagttctaaaacttatgttgaatagagctatattgtattatatttagatttatgtcttaacattttaaaaggcagttcaagtaactgggatttattttaactgtactggtttagtgagatgttctagaaatggtatatgctttagatactcttgggcttaggagtggtagactgtattcatactcttgaattatggcaagatttgaataaaatacattatatgcatgtgtttttctttttcttttttttgagacagagtctcactctgttgcccaggctggagtgcagtggcgcgatcttggctcactgcaagctctacctccctggttcacgccattctcctgtctcagcctcccaagcagctggaaccacaggcacctgctaccatgcccggctaattgtttttttttttttttttttttttttttgtatttttagtagagatgaggtttcaccatgttagccaggatggtctcaatctgctgacctcgtgatccacccgcctcggcctcccaaagtgctgggattacagatgtgagccactgcacctggccacgcatgtgtttttctaaatgtatatgaagcaaacagctatgaaaggagtccgcctaggacctggctaactcagtctcctccaagggccttaaattctcatttttatgattgttacagtgggctatgcagttcagtccatttattcattcatt

SEQ ID NO: 75913 - DNA, 1007 bp, Homo sapiens
ccacctcccgggttcaagcaattcttctgcctcagcctcctgagtagctgagattacaggcacccaccaccacgcccagctaagtttttgtatttttagtatagatggggttttgccatgttggccaggctggtcttgaactcctgaccgtgtgattcgcccgccttggcctctcaaagtgctgggattacaggcattgagccaccacacctggccaggagctgacttctaagccttggttttcttctctctaaaactgggagagtaatagaagccatatcatagagtcagattaaattccagaaggcaggtaaaacatttagcctagtgctagatacactgtatgagttgaagaatattaactactataattataggaaaaagtacacaatggcaaatgtttactaacgtcttttagttgatttttgttcctttaacacgttacatggattctttgcatttaaggaagaaaaatatggagtatatacagctgtgagaattatacttttaaagcaaaaaggagaaactagttcttatggaacaatctcagcattactgtttagttaatgtcagtttgagacagatttcttgtttctggaatcagaatttaaagtggctaatgtaattattttcaagggaaattccatttatggagcattaccaggtaaaattattattagataaactttctttttttttgagacggagtttccctcttgttgtccaggctggagagcaacggcttgatcttgactcactgcaacccccacctcctgggttcaagtgattctcctgcctcagcctcccgagtagctgggattacaggcatgtgccaccacaactgactaattttgtatttttagtagaaatggggtttcactgtgttggtcaggctggtcttgagctgccaacctcaggtgatccgcccgccttggcctcccagagtgctgggattacaggcgtgagccactgtgcccggcctaggtaaacttaatttggaagttgtt

SEQ ID NO: 75914 - DNA, 1025 bp, Homo sapiens
taagaactaattgcttaatcctggccaggtgttgtgacttatgcctgtaatcctagcactttgggaggccaaggcgggcagatcacctgaggtcagaagtttgagaccagcctggccaacattgtgaaacctcgtctctattaaaaatacaaaaattagccaggcatggtggcacgcgcctgtagtcccagctactcgggaggctgaggcaggagaatcgcttgaatccgggaggcagaggttgcagtgagctgagatcacaccattgcacttgagcctgggcaacaagagcaaaactccgtctcaaaaaaaaaaaaaaaaaaaaaaacggaaaaatttcttaacttagggttcgtggatttctggttgggacagtgtatatctggatgggcttcagggtttctagaccctcctaaaattatatgtaaagtttctgtgtatgtgcattcttttttggaggagagaattgattgctttcatcagattctcaaagattcatcccttccattcacgttctctctctatagttaagagtttttggcttagactaaatgggaattgtgttgttactattttctgagtatcgtgttagctgctctgtgtgcacatatgcatctacccttaccataaaacactgtaagccataaacagcattcatcataatgtgcgtccgtccaggatgtaacctggatatttatatgcaatatttatatgcaagacagggcatataaatattgaagtgccaaatgaatgttctcataagatgaagtggtccttttctacctagaattttcttccccaacttcttatcattcaagttttagctccagtgggacctccttggggacttccttgatgactttagaaaacagtctttcggctgggcacagtggctcacgcctgtaatcccagcactttgggaggctgaggttggtggatcatgaggtcaggagatcgagaccatcctggctaacacggtgaaaacccgtgtctactaaaaatacaagaaaaaaacaacaaaaaaa

SEQ ID NO: 75915 - DNA, 1064 bp, Homo sapiens
tagtaaaaaggtggaaattggaaatttctctgaaaattatgaagagcataattttgcagccacaaacgtttttcaaccaaaaatttcaaagaagcagtttttaaatatggtgaatttaatataatagctattctaaacatcttcacctggagagttgcatctactgcattagtatcttgccatgttatttagtgtaatgctttttatttttaatttattcattttttgaatagataatacagccatatggttcaaattccaaaggttacaaaaggaagtgtagtgaaaaatcttccttccatcccttctcctagtttcccttcccagaagcaaccagtcattatactcttgtatagtaggtatagagattcttaaatccttggttggatttaaaatgcaatgagcagcctaaaattatgtgaacattttgtatgtgtgtatctattttaaaaatggggaatcaatagggatttttcagattctcaaagggatatctgacttaaaacgggttaagatctattgatctagtttgtacctttgactaatgatgtgtgttcttcaggcatctaagatttgtgtgtgtgtgtgtgttttgagatggaggttcgctcttgttgcccaggctggagtgcagtggccccatctcggctcagtgcaacctctgcctcccaggttcaagcaattctcctgcctcagcctcccaagtagctgggattacaggtgtgcgccaccacacccagttaattttgtatttttaatagagatggggtttcaccatgttggtcaggctggtcttgaactcttgacctcaagtgaccctcccactttggcctcccaaagtgctgggattacaggcatgagccaccgcacccggccgtgtgtgtgtgtgtttaaaaaataaccataagctttactttcgaactgaaagaacatctatatgttaatagatgttaaagttcagttttagaacctttgaaaaagtgtggtaataatttttttggggggaagcaattttaagatcttgcacaaaagcaagtgccaaactatgttatttttttttttct

SEQ ID NO: 75916 - DNA, 1004 bp, Homo sapiens
tctccatgttggccaggctggtctcgaactcctgaccacaggtgcgtccgcctgcctaggcctcccaaagtgctgggattcttggcatgagccaccgcgcccggccgccattgttatttcttgtctcacaattcattatacatttccgaggcattttgcagatagtttgtacattcacttttagatattcttacaactatgatgactagacggagtttagctcttgttgcccaggctggagtgtaatggtgcgatctcggctcaccacagcctctgccttccgggttcaagccattttcctgcctcagcctcccaagtagctgggattacaggcatgcgcctccatgcccggctaattttgtatttttagtagagatggggtttctccatgttggtcaggctggtcatgaactcctgacctcaggtgatctgcctgcctcggcttcccaaagtgctgggattacaggcgtgagccaccgtgcccggccgttttcgtgcctttttaatgattgcctttttcgtctatatctgctttgtgtatagtaaagtaggcacatgcaatataataccagatttttataacgagtgaatgtgctaaaacctattagaataagaatagtctcttaagaggccaggtacagtaaataactcacacctttaatcccagcactttggcaggtcgaggtgggaggattacttgagcccaggagttcaaggccagcctgtgcaacatagcaggcctgtctctaaaaaaaaatacaataaaaaattagctgggtgtggtggtacacacctgtagtcctaggtacttggaaggctgagggaggatagttcgagcccaggagatcgacgctgcagtgagctgtgattgtgccactgcacttgagcctgggcaacagagtgaaatgctgtctcaaaaaagaatagtcttttaaggaataatgtcatctattttagtggttactacactccatgtcgtgatacattgtcgcatgggttttgtt

SEQ ID NO: 75917 - DNA, 1040 bp, Homo sapiens
taaaaaattatggtaaaatatacataacatgaaatttaccatcttaaccatgtttaaatgtgcattaagtgccttgacattgtcatgcaactgtccctaccatccatctccagaaccttttcatcttccccaactgaagctctgtacctgttaaacactgactccctgtttcccccaccagcccttggcaaccgccattctgttttttgtttctatgaatttgactactctaggtacctcctataagtgatgccatgcaatatttgtctttttgtgactggcttatttcacttagtcaagtgtcttcagtgttcatctctgttgtagcaggtgtcagaatttcattcttttttaaggctgaataatttcagtgtatatacataccatatactttttaatccattaattcattggtggacacttgggttgcttccaccttcaggctattgtgaataatgctgctgtgaccatgatgtacagatacctgtttaagttctggctttcatttcttttgggtatgtacccagacgtgtaattgctggatcatatgttgaatttttcaggaattgccatacatattgccacagcaactggaccatttttcattcccattagcaatgcatgagggttccagttttctatatcctcaccatcactcattttctgctttttaattttttgatagtagtcattataataggtatgaagtggtatttcagtgtgatttttatttgcattgccctaatgattagtgatgttgagcatcttttcctgtgctttttggccatttctgtatcctttttctcacttttaaaagtgaagtctgctagtgttgccagttttccaagaactctgctttccaagaatgtgattttttgaacttgtatattttgccagtatgagagaattggagagtaacaggactatatactcacaaacctaattccagagtgactaacagtgattgttatgtagtaagcacattctgggtaaatactctggaaagtattctataaattagaaatccatctctgtctgta

SEQ ID NO: 75918 - DNA, 1274 bp, Homo sapiens
gaaaccctgtctcttctaaaaatacaaaaattaggcgcggtggtggcacctgtaatcccagctactcgggaagccgaggcaggagaattgcttgaaccgggaggcagaggttgaagtgagcccagatcgtgccattgcattctagcctgggtgacagagcaagactctgtctcgggggaaaaaaaaaaaagaaagtgcaggttggggctcactgtggcctctatttcctaggctcaagtgatcctccctttcccgagtagccgggatcaacttcccgagtagctgggactacagaagcatgccatcacgcccagctaatttttccatttttttgtagagatggagttttgccatgttgcacaggctggtctcgaattgccatggtgttcccatgccaggatttaggcgtgagccaccatgcccggcccaacacgtttttaatatgaagaattttttctaaattaggcatttcaacttttgtttgggtatgtggttactttttgtcccttttaattttcatcatgtttgcttcatgtttatgaacaggtgttgtttgaaaaatatcagaacatagcttttatagtgtggaaactatcagaatttacctttgaggtggatgtttatgtgctgaatactgaagaatgggagaaaggggatatgaacaacacaatgagctttagtgtggcttggaggaaaccaggcaacctggtttgctagttcattattgcagacttatttctgtaacagtttgtgaaatcagaaggtattataagaaaaactggaatgtaaccggaaaagatcctcaaaatttagcttaggatatttcaagcttctattttttccatatgaatactttttttaaaaaagagagagagattcataaataagattccaatgtttatacaaaatttttggaaactgaatactgattactgtaaagatgatatatctaccagtcagtaaagatgagctcctgtgagctttgggggagaaaattttgactagagattttgctggtaaaaatgaaaatagtcattatgaggctttggaaagaaaatgtaggaaacactgtagattgaactatgcttgaaatacaaagttgggagacactggtttttagtaatctatttaatctgaagtagatatgtaatgggtgttaacttctgtatctgtaaaggacttcattctgaggaagccagttaaatttttttttttagaattagaaggaatttaaaaacttacactaatttcttggatcttatggtaaacaatta

SEQ ID NO: 75919 - DNA, 1035 bp, Homo sapiens
tgaagagacggcgggggggtctccccatgttgctcaggctggtctctaatgcctggcctcaagcagtcctcctacctcagcctcccaaagtgctgagattacaggtgtgagccaccactcctggtagtgaattcagtattaaagagtgattgaattagaaggcaactgagttttagttacatcataggaaggaaatgattatagtattagaatacatttctgttgattgattgattcatgccagccctcagaggaaaatgttcttgatttaattgcaattttagagaaacttcaagttaaatttttttatgtgtctcccttgttaagcattaatttttatttttattattattattttttacagagttttactacccttggatgctgctgttgacatggaaaagattgaggaacaatttgctaatctgcacattgttaaatgttccttaggaaccaaagagcccacttaccttcttggtatagacacatcaaagactgtccaagcaggaaaggaaaacttggttgctgttttatgttctaatggatcaatcagaatatatgataaagaaaggttaaatgtactacgagaatttagtggatatcctggacttcttaatggagtcagatttgcaaattcctgtgacagtgtatattcagcatgtactgatggcactgtgaaatgctgggatgctcgagtagccagagaaaaacctgttcagctcttcaagggttacccttccaatatttttatcagttttgatattaattgtaatgatcatattatttgtgctggtacagaaaaagttgatgatgatgcattgttggtgttttgggatgcaaggatgaattctcagaatttatctacaactaaagactcacttggtgcatattcagagacacatagtgatgatgtcactcaagtacgtttccatcccagcaatcccaacatggtagtctcaggttcatctgatggcctggtaaatgtatttgatattaatattgataatgaggaggatgcactggttacaacctgta

SEQ ID NO: 75920 - DNA, 2004 bp, Homo sapiens
gtcccagctactcgggaggctgaggcaggagaatcgcttgaacccgggaggcagaggttgcagtgagccaagatcgtgctactgtactccagcctgggcgacagagtgagacaacgtctcaaaaaagagaaaaaaaaaagtcaataaaacacacctagaagtgaattaatcgattgttaccaaggtaaaatgatctagaggaaagacatcgcagtaggcaccagttactgacctttgactggacaagtcagcatcagctttttcacctgtataattgaaataaataccaaacttgactacttagagttctgaggattaaataatttaatagatacaaaatatgttaccgatgaaagccacgtgactgtttctgcttttcaaattctttcttgtggagcctggactgcactgcaacctatggccgagtaaaacagtggtaacttgcagtcaagtaccatttaagtgagaaatcctctgaaacgtctatggactgcttatctccttgttcagtattcaggaatactttcctgtgaatgcagctatgttacttacctggtttgtattcttaccttagattgttgtagctattgtaaagcaaaagtaagatcaagcccatgtaactactttttgggttcttttctctcactttgtaaatacagggtgtttttccagacgggagtgcggtggcacagtcttagctcactgcagcctcgaacttctgagctcaagtgatcctcctgcctcagcctcccaagtggcagggattacacacgagccactgtgccaaacccgtgaagtttttgagttgtacttttgtactaaagtcatgactactttttctgcaactgacactatgagctgcaaatacgactgaagatgctactgcttttttactttttccctatgtgctttaaagaactacattttcagtgatttccatgtgtttaagatattttcatttacttggtagaaaatacaagagaattttgataaatctgaactggaatggtctttatgttaattctgttcaatattttagggcagattatgtacagattatcgccaaactgtcaaaagggtgtattttgttcatatagctactgtaacaaattacaacagatttagtgacttcgaataacacacatttattctttctgcctttgtttctttcttttttttttttcctttggtgaaaagtacacacttaagaaaggggagtgcagatgtactcaagagagtcacctcttccttttttttttttttttttttggtagagatgaggtctcgctatgttgcccaggtgggtctcaaactcctgggctcaagcagtcctcccaccttggcctcccaaagttctggcattactggcatgagccaccatgctcagcctcatttattgtcttttagttctggaggtcagaagtatgaaatcagtttcactggactaaagtcaaagtgttgcaggcccaattccttctggaggctgtgagaagaaaatccatttccttacctttttcagcttgtagtggctgcctgtcttccttggcttgtggctcttttctgcacaggacatcatgctatcatcataccactttctcatctgtagtcacatctccctctgcctctcttatgaggacatttgtgattatattaaggacccccccagataaacaaggatactctctccatctcaacatactttgtaaagtcccttttgtcatataatgaaacagtcatagattccaggaattaagacctttgtatctttgagggccagtgttcagcctaccacaggaaggtataaagaagagtaaaacatcctatcccataaagtctcacagggactataagagaaaaacaaattcacagtaaatggttgctgagttagactttcttattactgtgaaaataacctaagtcaccacaggttggagcttcgccaatttttccactggaatatctttaatagcaaaggtaaatgaatattcctgtgatatttggaaa

SEQ ID NO: 75921 - DNA, 1447 bp, Homo sapiens
gctaccttgcccagccacattcttgtcattttttaaagcaatgtatcctcaacccctaaaataggggttggcactcataaatatttgttcaatgaatgaatgaatgagaaaagaaaattacctaggatgtatatcctgtgtggtcatggagataattacatacataaacatatgaaaatgaaaaccatttctttgaataataagtgtacttttccccagaaatcaaaactacacaattttagcataatttgttgttcagaatttgaatgtaaatttgtggatattatatatgtagttaatttataaaagggtagaattatgaaaatataaatccttttattattaatacagcttttagtgcctcttatatggtcagttaataaagtttactttgagaatttgacaactttaaaaaatttatgtatattcaacatttgaaatgtcaaatataaattattttttaaatgccaaaaatattcagtattatactaaacaacgatacttttatcttttcctaggatattattgctggattcctatataccattttaatcttagctgtcttctatccatttgtggacctgattgacaacttcaaccaaactcacaaatatgctccattcatcatcatcgggcttcatttagctttggggatcttttctttcactcttgacacctggagcacatcccgaggagacacagccgagatactaggaagtggtgctggaattgcatgtggatctcatgttacttataacatgggtctagtattagatccttctctagatacattacctttagctgggccccccattactgtgactctgtttggaaaagccatattgcggatcctcatagggatggtatttgtactaataatcagagatgtaatgaaaaagatcaccattcctttagcctgcaaaatcttcaatataccgtgtgatgatattcgaaaagcaagacagcacatggaagttgaacttccttatcggtatattacctatggaatggttggtttctccatcacattttttgttccttacatatttttctttattggtatctcttgatggagaagtattgtttatgataagaaaggagggtatcagttactgatacccaaaaatatattccaggtaaagccaggtcagaattaggcttttgcaggaatttaacttaaataattatttaagtaaattcataagagtcagtgcattttatcattgcacatccagatactgttttaggtgagctgagctatttcgttactgagaaaatgataagtatccatttagaatgttcatgtaatgtttggagagttttgtattatggattcaacttatatataatatatataaggtacataatatgcaattatatatctgatatatattatatataaaataatatacctaagtgtttttttaaactatgggagtgtattata

SEQ ID NO: 75922 - DNA, 1173 bp, Homo sapiens
ggccaggagcgcggggacagttcggggctgcgccggaggccggcccgccttcccgggggttccgttatcatgtcgctgaggcagcgcctggcccagctggttggccgtctgcaggacccgcagaaagtggcccgtttccagcggctgtgcggggtggaagcgccgccgcgccgctcagcagaccggagggaggatgagaaagcggaggcgcctctcgccggagaccctcgactgcgagggcggcagccaggggcgcctggaggcccccagcctcccgggagcgaccgcaatcagtgcccggccaagccggacggcggcggcgcccccaacggcgtgcggaacgggctggcggccgagctgggcccggcctcgccgcggcgcgcgggcgctctgcgccgcaactcgctgacgggcgaggagggccagctggcccgcgtgagcaactggccgctctactgcctgttctgcttcggcacggagctgggcaacgaactcttctacatcctgttcttccccttctggatctggaacctggaccctctggtgggccggaggctcgtggtcatctgggtgctggtcatgtacctgggccagtgcaccaaggacatcatccgctggccgaggcccgcctcgccgcccgtggtcaagttggaggtcttctacaactctgagtacagcatgccctccacccatgccatgtccggcaccgccatccccatttctatggtcctcctcacctatggccgctggcaggtagggttccttctcgtcctgttcagcctgggggagttcaaagaactcggagttctctttgctctctgcatttattttaattcgaccgttcccctccaaagcctctctttccacaggttttcacaatactcgcaaacaggccctttctgggttttgaaaaattaagtgattgggggaaactggatacttagccgttgaattctattttaatattaaattccaatttaatgccttagaacccaaaggacacacttttcctagagtaatacattgtcattgggctttggttgagttttttaaacggctttaattcttgtaatgcacagtggaagtgaattttttaaataatcgctatgtaaactaagacccagtttcaccgtaatatatggtgccttcttccctaaaactgtttcagaaaga

SEQ ID NO: 75923 - DNA, 1335 bp, Homo sapiens
atataaaatataacttactttaaatgctgttaggtcacctttcaaatcaccaacatacctagggttataatttaaagaccttgtgcatctcatttgttgctaaaccagttctgttagttaatttattacacaagtttgccagttaactgcaacagtgggcaaaaagcttctttttcttttttttctttttttagacagtcttactctgtagtccatgctagagtgcagtggcatgattatagcttactgcagcctcaaactcctgggctcgagcgatcttcccaccttagtctcccaacacaggttcatgccaccacgtctagctaattaaagcaattttttttcaagagttggggtcttgctatattgtccaggtgggttttgaactcccagatttaagtgatcctcctgccacaacctcccaaagggctgggattataggcatgaaccaccttggctggctggctggctggctggcttgctttctttctctctctttctttcattctttcattctttttattctttttattctttttttgagacagagtctcgctctgtcatccaggctggagtgcagtggtgtgacctcggcttactgcaaccttcacctcctgggttcaagcgattctcctgcctcagcctcctcagtagctgggactacaggtatgtgccaccacacctggctaatttttgtatttttagtagagacaaggtttagccttgttggccgggctggtgtcgaattcctgacctcaggtgatccagctgcctcggcctcccaaagtgctgggattacaggcgtgagccaccacacctggccctttctctctctctctctttttttttttttttttaagaggaggaagggcacagaagaactgagaatagaaattaacataggccaattttagtttggtaactatattaatctgttaactacttcatatgttgaatgctcatataaatgtgctgtgctaagtttctgtacagaatcatggggtaaatgagtagactggatatatcttgtccattaagagttctctcatggtactgtttaaggacatgggctttggagcccaacagacttgtgttcaagccagtcttgccagtaacttgctgtatggtttggacaagttatttaacctctctgtttccttaaatgaggtagatggtttctgtgttataggcttataacataggatcaaagagatggtgcatgtaaagtgtctggcaccaattgagtactaaataaatattaacaattttttctttttttgttggagagagggtctcgctctattgccaaggctgaagtgtagtggcacaatctcc

SEQ ID NO: 75924 - DNA, 1064 bp, Homo sapiens
gtcttctcggtaggtatccttacttcgtagggttcagtagtgaaacgtgagtctctgtagttaggttattactccatttaaatttatttattatatactgagtatccatctgaagggaggctttcagtttttgtattatttttagaagcattaaaaattatccaagcttagtgggttaggttacaaacatcgtaatggagatgcaatgtttaattttattcatttactctgtaaatggtgaaccccaatcatgcacagtggtctaggtgttaggagtacaaagaaataaattgggcaccttcaagaagcatgtagtctagatgtgcttttgcttgttgatgtcatgtggaagtgaaaaaatagcctgggccgcaaatataatcattcttaggagatgagttgaagtctttaactttaaagggttatgtttctaattgtggtatccattgtacaaattcaaccaaaatatgaccaaaaatgttgtctggaatatctttttatgtttcatttttatggaggtgaagaataaaaaacgtactgtatatagcattatttgcaatgtgagttataaattcctctcactgtaaaaatgaaacagtttggtcagaacttcactggagattgttgtcttcttactgttcttactcttgaatttcttctcatctttggatatcacttcctgcaataatctttcggagttcctcgaagtatgttgtaggtacatatgatattcctgagttgttattgccaatcaagtttctgaatattttaggttttcaataaacaattttattatgagtgagtggccattttctatattaaaaaaagttctatgaagtaccccaaattagaagaacttttgaatgttcatgaaaattgtcagataggatggaaacatgatttctttaggcttcaggcagtgaagtgtgtctatgatgtttaggggctcaatagtgctttcgtattctgtttatgagagaagactctgttctaccttataactgtgagtgaatgaagccatgtgaagtcttaggaagaggaacactattaataaaagcttctcg

SEQ ID NO: 75925 - DNA, 1107 bp, Homo sapiens
ttggaaatagctcaaaatggccgaggtttccaggtgggcatggattgggaagactccgtgggcacacagtggtcttattcactcagtttcacgctgcatttcacctcctctgaggttgttgagttgtgctcctccttcctgccataactcccctcaagtcagtgcatactctgtctcttggacctgatactattgctgattagtttcttttttacaccttatcatctagatggaaaaatctctcttggtcccttaaaaataaggaagagagtaatctttgtttttgttgttgtttgttttcattttgaatgtctgctctattgctaggaatggatagggccctctctgcttttacatgtgaccccgattagtgtacagtgtgtgcatataacttgatcttggaatcacaaaaacttgttctctggtttttttctattaagatataaaattagcctttgatgctttttttttttgggaagtggcaatacatgtttaaaagttattctcttctcatgctaggggacaaaacaatgaaaacattgctcagagattctaggagatttagtatagttttgaattataggacaaaattgtggtgctctggaattacttcgttgagagaaatttatataagacaggaataactctcaaaagcctgaattatccagttggctaatcagaactcaatttagttcagttagcaattattgagcaccctataaagtgtatatcagtagtctataactaatttaaactggtaatgcataaaaaatggaatggattaaaaaggaaaaaaattccagtgaggcttggtgcatctttaatctctaatcagttgcaatatttactaggcagttggaaacaccacaaaattccatttatgctgctaggccttttaattcttcaaccagagctcttgtctacttcaaaatttttctagaacttaaattagatgtcatacttttgcacatattgcaggccaaataccaacaatttcaattcactatgactattagatagagattaataaggtagagaaaagtccaaggaaaacaatgtagtagaaggtagaacagacaaccttaagagaaaggactgtgaactcat

SEQ ID NO: 75926 - DNA, 1024 bp, Homo sapiens
catatagaagaaaaaagttattattgtcaaagaactacatcttatgtcattaaaatatgtttaattagcactcttcaggaaagaaagtggtgtaacttttttatcttttatttttgaagacagggtcttgctttgttgcccaggctggaatgcagtggcatgatcatagctcactgtagccccaaactcctgggtttaggcaattcgcttgcctcagcctcctgagtagctagaactacaggcatgcaccattatgcccagctaactttaaaattttttgtagagatgaggtcccgctttgttgcccagactggtcacaaactcctagcctcaagcaatcctcctgccctggcctcctaaagagctgggattacaggtgtaactttttgaaaaggaaaattattttgttatgtacatgctgacattttctcagtggtacttttgaatgttgtaggctggagagaaacatgaaaaagaaaatgaagaattcacagggcaactaaaagtggctaaagatgttgaaaaactcattggacaagtggaaatctgggaggcagaagccaaatctgttttggatcaagatgatgtggacacctcaatggaagaatctttgaaggtatgtgtgtaaaagtattaagagggtactttcatggttgtgcatttatgttttaagttaaataagaagttttaaagtaagtagtaataagcctacagttttaattttctttgttgggagttttaaaaatgaatggattttatccctggatcatttgctgttattttgcttgaaagcagaggatagattaggagaccactgataatacctatgaatgttaagctcttggacttattttcttagctataacatgggggttaaaatattttcttgcaccagaggacaatgaggagacgagtgagttcagtctcattatagctcagtgcagagtacacgtaagagataatataatcaggctgggcgcggtggctcacacctgcaatcccagcactttgggcggttgaagtg

SEQ ID NO: 75927 - DNA, 1107 bp, Homo sapiens
tgacctcaggtgatcagcccacttcagcctcccaaagtgctaggattacaggcgtgagccactgtgcctggccgcagcttggtttttatggataatgtcttctttttgtggtttcatatttctgacccatttgaaatttatttttgttatgatatataaagattattttccaacagctattttccccagtaacatttattgaattctcctctccactactttgacatagaacaagatcattttaatatttattaccattgtctcaagtttctttctattgtcattgtattactttcattctttattttattgaagtgcttactgtataaagaatgatccataaaacatgttcagaatctgattgtatcaatatgaaatttcaaaatgactccttaaaatatcatttttcagaatgcaaatttgcctgattttggattaataatgaacttttttggtttcctgagattgttttgattaatgtttagcatataatcagaatgtttattgtgatctcacttcaatttgttttaatagcatcttattgccaaaggctctatgtttgatgagcttatggcaagaagtgaagatatgttacaaatggatatacaaaatatttcaagccaggagtcctttcaacatgttctcacaactgggcttcaggcaaagattcaagaagctaaagagaaagtccaggtctctctttaatattccctatttagtaattctgttctctaaaactgaggggtcactgagtgggcagtgaaggggggtgatagccctgtagcttggaaatgttttgtaaaatattacttttgcattatgttttatttctttataatttaaagcgtatcagaaaatataagtatcataagtatcatagtatataagtatcaatttggatagatatctaaatttagatagatttataatttagatagatttatcataatttagatagatatctaaatatctttgtctagtgggaaaataacaaagtatttgttaacttaagaatttattaagaattggtccccgtgttaatttgagaatttttttgtcttcaagatcaatgtggtaaaactcattgcagcgttgaagaacttaact

SEQ ID NO: 75928 - DNA, 1029 bp, Homo sapiens
agtaattttaaaatatttctttgtgttattttatttttcttatttttttgtttgttttttgtttatctttgtgttattttatttttaatattttaggacagagtgtcgttctgtcgcccaggctggagtgcagtggcgccatcttggcttgctgcagcctccgcctcccaggatcaagtgattctcctgcctcagcctcctgagtagctgagattatagacacccgccaccatgcccagctaattttttgtagttttagtagagatgaggtttcgccatgttggccaggctggtctcaaactcctgacctcaggcaatccacccgccttggcctcccaaagtgctaggattacaggtgtgagccactgcgcttggcctgtgttattttaaaaattaactattgtgatgttgcatttcattttgcccaggtatgatacatacagagatattcttgaacaccacctgcaaaacaacaaattcaggattacttctgatttctctagtgaagaggacaggagtagttcttgtctgcaggctaaactgacagatctacaggtaattaccaaaaatattatttctctgattatcttgtttattagaaaatagtaccactgtgagtctggacatccccttttctgttgaggtcacatatgctaaatgtttccaaagaactctctttgctggattgcatttctagtgtcaccctagtccataaagtgattttctttcaggtaccaaccccaggaaaggctttggtttagggtcttaatttactgcttatactctaatctggtactccagatattgtggcttgaatagtttttgtttatttctttctttttatgcttcaggcttcaagggaattgatcaaaaacaatgtgtttgaagggaatttcatcctgctcctgggttgctccaaagtcaaccagccagtgactctgaatgtttgtttcagtccttcatcatctttaccaaattatcacattgtctaaaattgctgtacagtgattgctgactgtctgatgttgg

SEQ ID NO: 75929 - DNA, 1045 bp, Homo sapiens
cattgtctaatgtagcaaaggttcatgggatagtctgaaaaaagttttctgtttcctgttctctatgagacatttgtgtggttttctttaatactatagaaccccgctatcatacaggctgttaattagattttttatattacaaattaaattctctctaaattataacaaacatattataaaaacctggttgagtcacaaggtttgtgccatccttttctttggtataaacactttttgcttattttgtatttaaacatgtgtaatgctcttttagactccaggatgaccatagaaacctgaggaagtggttgactaatcaagaagagaaatggaaaggaatggaagaaccaggggagaaaactgagctgttctgccaagctttagctagaaagaggtatagctgatcttgtatgaaatacattacctgagattatggtttcttccatggtgtggttactcctataaactttaagtggtatttggaatttacagggaacagtttgaatctgtggcccaattgaacaactctttgaaggaatatgggtttactgaagaagaagaaataataatggaagcaacatgtttgatggatagataccagacattactgagacaactaagtgaaatcgaggaagaggataagttactacccacagaggaccagagctttaatgatcttgcacatgatgtaattcattggataaaagagattaaagagtcccttatggttttgaattcatccgaaggcaaaatgccacttgaggaaagaatccaaaaaatcaaggtataactatggaaactaaatttcagaagtctgagtgaactctagttttgaaaagatttagaggaaaactgtaaagatgtgcttcttaatggaaaatcagatcactgtggaatggttgaagaaattcagatcactgagcttacaaaaaagaagggttgtgacggatctaaaattacttggatgcacatgaaagacagaaagcatgtcctgtcttagagagagcagtgtgcctattgtccgtcttcaatgagtgcagaa

SEQ ID NO: 75930 - DNA, 1044 bp, Homo sapiens
caatcgcaggcattcagcaggctgaggcaggagaatcaggcagggaggttgcagtgagcccagatggcagcagtacagtccagcttcggctcggcatcagagggagaccgtggaaagagagggagagggagaccgtggggagagggagagggagagggagagggagagcactgtctcctcttttgatgggagagagcgtgaggaatttcagaagctgactggggcacggtggctgcaacataggaggcagatggcagaggagagtgacagagatgaggcctgagaggtaggtgtggctggctgtgccttacgagtcacattaacattttagatgttatactaagaaattggcagcctctgagactgtgttgatctggcttttggttttgtctctaatggtgatgatgtatgcttatgcaagagttgtttttcactgctttatattgtaaagctttagagaaaaaagaaatacatcctttagagctggtatgacactctgccccattgttgccaggttacaagtattggatttaggtttctgcctgtcacaaagttaccatagccatgggccatagcccctgaatgggaaaagggatagtgaaggttactgacttgcctcttgtgactgtgctaacatgttggccaagctggagaccatgctcagtcatttagagctcagtgttttcaatgctgaagtggaatgttcactttgtgagtcaggggatgtaaagatcaaaatgtcgtggtcctgcccttaggaggagttcatgatattcttctcacctcctattcttttccaaacagacccaaatgaaaggaaagatacatgtttgagaaaaagcaacattttaaaaaaagagtagacgttgttggccatgtagcccaaccatgctttgatagaatggtcattttccactttaaatttattattaactttgaacattttatttatgctcagaagctcaatatgtaggctttagtacactctttaaaattatactttgtcttgagtttatgctaagtataatttctgttttaagtagg

SEQ ID NO: 75931 - DNA, 1014 bp, Homo sapiens
tttttaatacaatgttatttgcttaaaaataatagtgtaatattgtcaaactgtaaaatgagaatgctaactcttataagactcagagacatgtatacatatgtaacaaacctgcacattgtgcacatgtaccctaaaacttaaagtataataataataaaaaaagactcagagacatattatctatgtaccacgaaaacttaagaatgacaggaattccaaaagtttgacaattttgtcacagcatttaatctcctattcactagaatgtcttgaatgatgcttatgaaaatctaacacgctataaagaagcagtcaccagggcagtggagagcatcacttccctcgaagccatcattataccctacagagtagatgttggtaatccagaagaatctttagagatgcctcttcgaaaacaagaggaattggaatccacagtagcacacatccaggacctcactgagaaactgggaatgatatccagccccgaagccaaactacaacttcagtatactttacaggaactagtttctaagaactcagcaatgaaggaagctttcaaagcacaggaaactgaggcagaaaggtaggtcctcttccaaaggtaatctttaagaacataaaatattgtttcaagatataattaaactatattttaatagttttaagaacataaaatataggtttttttctctgtcattaacacctatgcattagagataatttggaaaatatggttaagtagaaaaaaattacaatgtaaagaaaactctggtaaatattgtatttcttcttttttttttttcctatttaatattgggtacacacaacagattgtttataaaagtatatgcatggtataagtaataatgataaaactaatatctttgtacccaaaaggacatcgagttctcttgtgtgctcctcctctctcttctcagaaataaccattctcccaaattttgtttaccattttcctgacttttgttgtacttttttttttttttgaga

SEQ ID NO: 75932 - DNA, 1005 bp, Homo sapiens
ggttggctgagttgtgtctgtgatttagcaagagtgaggcagcatcctagtcttagaagaactgtagggcaaggtcctgaacaggaggacaaagtacagtccagtttttaaaatgaagcataaaatgagaaccagaatacttgcaaggctaacccagaactttgctgaggcccataacgttggagtagaactgattaaatcctttccacctatggtcagagttagtcttaaaagtcagaagtgtcatagcctagagcaggtgaataagtagccccagccatggggagcagacatctgcaaggcctgacacacccctgactaacagctattgactcttcatctaggagtcattcagctccagtaaaaggcatctgactaagtttggtcctgcatctctttcccaggccacagttaagatggaggaatatagtgaccttctgaagagcactgaggcttggatagaaaataccagtcatttgctggccaatcctgctgactatgactctttgaggacactgagtcaccatgctagcactgtgcaggtaagtgttcttccaggttttctgccactcatagcatctacataaagattcgtggcttagctgattgtcttggtgcttttttcctcctttcctgaaatacaaccttaccgctaaccatgtcagtggcagaaggaagcttgagagagtggcaagcagtagacatggattttggagaccaggattcagctcttactgtcctgataactactttatgactttttggataatttagtatatcttctatggacctcagtttctccccatgaaataagaatgtgggcggatcacaaggttaggagatcgagaccatcctggctaacacggtgaaaccctgtctctactaaaaatacaaaaaattagctgggcacggtggcgggcgcctgtagtcccagctactcgggaggctgaggcaggagaatggcgtgaacccaggaggcggagcttgcagtgagccgagatcgca

SEQ ID NO: 75933 - DNA, 1093 bp, Homo sapiens
cccatcacatgaggttgggtgtggaattttccacttctggcatggtgcataaaaagtttcaggttttggagcattttgggattttggattttcagattaggtatactcaacctctactaagtaactaatgagccgagtgctggagtatgaatatgctggacaaagggatgattcacatcctgggcgggatggagcaggatggtgtgcaattttatcacgctactcaggtggtgcaaaatttaaaatgtatgaattatttatttctggaattttccatttaatatttttgagccctgattgactgcaggtaactgaaaccacagaaagtaaaagcatagataaaggggcctgttacagcttgcttggatgaaggagttataggataaattatttgcaattttgttttaagaatagagttcgtccttaaggaaaatttttaattccttaaattcgctcaatgaatggaacttgttcttagtcacgcaccgagttttagtacaaatgatcatggtgctggaatgtgagtttgtctgttgctgctgacgtgagtgcccagccagctggcatgaccgagcaggctgctgagccccaggagagggcaaacttgatctgttgagcaggaatacaatgaccgagacttactgggaaacttacttcatccagctgatatatttttagatttgtgtgaattggccggttgtatcaataactaaatatttcaggttccaaattatttcttctatggtgttgtgagagtttggaggcttatttgtcttgagaaagagaaggaaaagagcaagggaaataattttcaaacagttacgtggaattcttttttaaattcctactccacacttggattgcaacataaaagattaggaaggtaggcgaggcatggtggttcatgcctgtaatcccagcactttgggaggcctaggtgggcagatcacgaggtcaggagtttgagaccagcctggccaaaatggcgaaacgccatctctactaaaaatacaaaaattagctgggcgtggtggcgcactcttgtaatcccagctactcgggaggctgaggcaggagaattacttgaacctgg

SEQ ID NO: 75934 - DNA, 1123 bp, Homo sapiens
acacatctactaagtggtaggactgggatctgaaaccagatagtctagttccaagatctgtgttcttaaccactatcctctgctggatacattctgctatgttttgtaaggcgactatagagtcatttacttaaattattttacagagtgacatgtgtaattgggattggtttggttgcatccctactgaaaagtacaagaattctgtggaagtttttgtttttccagggtttcttccatcctgtgtttctgggacttcttgtatacacttaagtaaaaagagtaagtcttaacttgtttgcaggcacaatacttcttcaagaacaacattatgaataattaaatgcttttatttcctaggctatgctaacagagattgagcacaaggttgcctttctgttagagacttgcaaagatcagggcctgggagataatggagccactcaacatgaggctgaagcgctttccctgaaactgaaaacagtgaagtgcaatttagaaaaagtccagatgatgcttcaggagaagcacagtgaagatcaggtaaaaaatgactatctatggacattcatcttgatacacatatgtggcagacctgccagaagagaactctggttggaagtgatgaaccagctacagagaaactgtactaagtgtgaaagaatttcacacattaacaccatagatgagtacactggcttgttatttttatttcattctactttgcagttttcctgtctaggttgttgttggtgatggcggtggtttggtttgtgttggtttaatgtagctgagtgttcttgttggcagtgaggtctagtgtaaggcttcttcgtaaaagaaggatgtattataaaggaattttgtgactctaattgactggaaaacaaagctttcatagatgtgactaaaatttgacatcagaaacataaacctgtttccaggatactttgttattcatttgcaagtatttatatatataatcaaagtatcatataaagtgttctcatgatttttaaaagcactctgtgtttataaatgcaaatgtgcatcttatgagtagatcttactataaaagatttgcatgtgcttatgagtggttcctacttagagatttatgttc

SEQ ID NO: 75935 - DNA, 1047 bp, Homo sapiens
tcctctgcagcctgctcctgtttttaagacactgtacctcctctttgtaatcaaccccttcaagcttctcttttgtgacttcttttccttctcccagctatacttgatttcattaaccgctttctcctacattagaatgtggagggtgggaaacagtggtaaaggagacagtgtaatttatctgggaccacactttcacctggatcgccctgctaagggatccttcatctcatgatttaccttttagttccatgcagtactcaaataactacctaacgttgagcttcttaaactcatttttctccaagtttaacatcgtaagtttatttatttgttctgctacctagttcacaaagcgtttgaagcaacttattacaaaagaagcataacataaatcataaactataatggaaactaggcaaaatataggtctaggaaggcaaaggtatcttaattttctttttcttttttcctcttgattcaggaaaatatgacagaagaagcatatatcaatttggataaaaaattgtttgaactattcctgaccctcagtcagtgcctcagcagtgtggaggagatgctggagatgcccagactttacagggaggatggttctggccagcaggtgcactacgaggtagggcacttctcacgagcccatgtgttggccattacagcagccccgtgagttaagcccacgtggaagcctcttgaggtcagagctcattcattgtcttccttcctctccactccagacgctggctcttgagttgaagaaactttatttagcgctaagtgacaagaagggtgatcttttgaaagccatgacttggcctggcgagaacaccaacttgctccttgaatgttttgacaaccttcaagtctgcctggagcacactcaggctgcagctgtctgtagaagcaagtccctgaaagctggcctcgattacaaccgcagttaccaggtatgattccgagcacacagcctattttggcactgttttaagttacagcatgaacccctaatgcctattcctattcctggtg

SEQ ID NO: 75936 - DNA, 1083 bp, Homo sapiens
gtaaagagaaggatctttatcttttagaaatatatactgaaacgtatactgatgaaatgacttgagacctgggatttgcttcaaaatagcctgaaggaaaggagattaggtacagttgagagctggagggaggatgtagagggaagaaggtcagccatgaatcaataattgttgaagtttaatgatgataaaatggggatttctctatttttgtatttgtttgaaatttctagtgtcacaaaaattataaaaaccaactaaatataaaaaaagataatgaaggcctaaatgagattgctcagtttccgacatttatcttacagaatgaaataaagagattatatcatcagctcattaagagtaagacatctttacaacagtctttgaatgaaatcagtgggcagagtgttgctgaacagcttcaggtaatcaagtcaaaataattcagactgacttaactttgaaccacagagctttgcatataagccgtgcttctgaactactttcctttgtgagcagcagcaaggcttaagtaaataaataaaaaatgagaactatttatgttgactttttaaaaacatctcctaattttctgaagcacaatgtattaaaacaaaaggaggccattttcacttatcaaccatgacaaaatgtgtatgtccagtgttggtaagggtattggaaaatgagaccctcatcctcttgccaggggagccctggggatcctttgtctgtatatcagaattttaaacatgaatactctctcttccagcaataatttgacttcatgtatttagcaaatattaattgaggatccactatgttccagcactgtttgaagtgctgaacttgtactcctcctaaggatataagacaagtgcataaagataaatattttggccaggttggtggctcacgcctgtaatcccagcaccttgggagactgaggcaggtggatcacttgaagccaggaatttaagaccagcctggccagcatggcaaaccccatctctatcgaaaatacaaaaattagccaggtgcagtggcacacggctgtagtcccacctactccggaggctgagg

SEQ ID NO: 75937 - DNA, 1010 bp, Homo sapiens
caggtactagaattcatttgaaatgtgctatttctcttcacatattcttttaccttatttgtcgttgtagttgttttcgtcctttactcatggagactctctataccaaacactgaaaagttgctgagaaaaattgaagtaaattagaagcatttcaagtcccattttatgcactcaataattagaggcaaagccaccaattccaacgtcattgacaggctgcaaatccacttggttatctttgttttgtctaatgtactcactcagacataaatatctccataccccaaacccaacagagtatctggcattgtttcctggcaagatatacagaaacagtgatgaagcagtgtctccatgtacagggagatgcctcagggaggaagtgatcctgtatcatgtagcctctatgagctaggagcatagtcagctccaggaggactctaaagtttggaagaaacactacatggtgttgaagagagagtataaaggaagaaagggtgcaagacatctaataatcttacaaaaggcatgtcaatgtcagcattttaccccttccaggaggagagcaccaaaagagagcgagctcaggcatctctagacattgcaaccttgacattttcccacaacagaggaagagaactaaaaatactaaccaattataccaatcaattggtataatctatcaatggtataatctataccatcaattatagatatgtccatgtttcctagagaaccttcattgtgggttgtcacctactaaaatctactttcaaccatttgtaccaagagggaatagggaataacctgcatgaaatccataggcaacactcagcctcattcctcagtcctcattcccccaggaatgtagcagaaaaatagagatgagcttattcagtcatttgttaagcatacattgtgtgaggtactgtgctcactgccagggttacaaaggtaaacaagaaaataaatgaatcctaccctcaaagaactcataggctagtgga

SEQ ID NO: 75938 - DNA, 1046 bp, Homo sapiens
tttagaccagctggccaacatggtgaaactaaaaatacaaaaattagccaggtgtggtggcaggcacttgtaattccacctacttgggaggctgaagcaggagaatcgtttgaacccaggaggcggaggttgcagtgagccgagatcatgatactgcagtccagcctgggcgacagaatgagactccattccgaaaaataaaaaataaaaaagcctattttctgtattcttcggtgacaaaatctgagataactttctatttcctgggctgtttgggtgctggccgtgttgcaggttggtattctagaaggcacagcattgagatagctgaattcaggtcccactctaacattagcaagctgtttgactgtgggcaagtcatttgcctgttcaggccccagttttcctttatctttgaggtaaggagggttttttgtcatctagatatcttattggcatccaaaaacctgtacttcaattttttaaaaatagaatcatgtgctggcactgacagcccaatcacctgatattgaacatttgaatgaagtgagcctcaagctcccacttagtgacgtagctgtgaagacgttacaaaatatgaaccggcaatggattcgggccacggccacggcactggagcgctgcaggttagaacatcccttctctgtcgttgtttcaattaaggtaaaattaacggcttcagctcgggaatggcattgttaacatgggtgtgttttgttttaaacctttgtagtgagcttcagggaattggattgaatgaaaagtttctttattgctgtgaaaagtggatccaacttttggagaagatagaagaagcactcaaagtggatgtggctaacagccttcctgagctcctggagcagcagaaaacctataaggtaaacctgtgttctctgccacccttgaaccgctcatctggggcaggagtcagggaaagatagctttaaataaaacacagggagtgtacctatcagtccctaaacacagaatgtatacctttaagcaaattcagttgtcaattggtc

SEQ ID NO: 75939 - DNA, 1054 bp, Homo sapiens
gcataacactaaggacatttaaacggctgtagttttcctggtccatttgcattataaatgtttgattgacattctatctggattaatagtttttaagttaaataggacattgtccttatgttggtataaggatttgattcgttgttataagggcaaggatttgggttatatcttcatctagcctttcctgtttctaatttttactataaccagatagtaacacacgagtattggataaaaacaatccttccaatcagctacatttcaggtacagtatttattttgttattttttatgacatttatcacaggtgtaaggaacttctgttgatgctaaaccctaggtttagaagaggcaaaaccagacaaggttgagtgcggagagctactgattaaaatgaatgaaactcagtttttttgagggagagaagggggtgctttccttcctggctatactcagctgccaaatgtattttcatttgcaggtggccatacgtaaacaggagattgaagacagactcaatacatgggttgtattcaatgaaaaaaataaagagttgtgtgcctggctggtgcagatggaaaacaaagttctacagacagcggacattagtattgaagaaatgattgaaaagttacagaaggtaagggaggacacccaggtggatgtagttatgactaccatggaattgtcggccctcctcactcctaagcccaaacaggggcaatgttacgggtgtttccagtagcattttagaaatttgaagggacttcactattttcgatccttttgagagaacagttggaagagaggaggttccagagagatgggagtgtgagaccattgtcagtgggcatggtaccgaggagagttgctttctctccattagaaagtttcaccagggaaggggcttacatatccttacatgtcagctgataccccaagtgagttagggtttctctagttgttattaagaagctccccttggcctggcgtggtggctcattgctgtaatcctagcactttgggaggccaaggcgggtggatcacctga

SEQ ID NO: 75940 - DNA, 1090 bp, Homo sapiens
tcccattgtttctgatatctgtatgacaggctaatctcactgtaattctctccttggccagattttggaagaggttgagaaatggaaatttgccttccctagtataacagcaccagtgaatattattgtgtcagcaaaagcaaatgcccattcgtggcttattatgggaaatgttctgttcccaacaagttttgccatggcaagttctttctctcacacctaataacagtaaatgtccacccgtgtcaaacttttagaattattttaattggaaaagccagtgcccgtgagggggaatatagacaatcacttaaaattcttaaaatgtcattgtcacttagttaaaaactaaagctagagtagtaggtgaaggaaaacaacaataatgacatttggatgcttttctatggccctgttagaagaaacaggcagtggaagctcagggtaactttctttgaaatcctttctttctcctctctcaacagggcttccaacaggaaattacattaaataccaacaagattgatcagctcattgtgtttggggagcagctgattcagaagagcgagcccctggatgctgtgctgattgaggatgagctggaggaactccaccgctactgccaggaggtgtttggaagggtctcccggttccaccggcggctcacctcctgcactccggtacgggcactgctgcctagaaatggcacctgggctgctcagagtttacgtgagaccaaatttttaaagaattaggggacctgtcttataatggttaattatggtttattttttggttgaaaagaaagggctatatcaaaacattttaatttccacttttattaatatagagccacagtaacttacaagttcccattccccagtggaaagcatggcacttctgaggcgcatgctccacgagtcgcttttaagtattcctcagggctgggcttgtctggcatgcgtcactacccctagaattcttgaagaactcttctggcttttattacattagtaacttaggaatgtatttgcccttccctctttcttagaggctggaagcttttagtatttgtgcctttctgatgctt

SEQ ID NO: 75941 - DNA, 1049 bp, Homo sapiens
gatttttttctccatctaactgaagtcctttggcatgggccaagctttcttcatggtggcttggtttggaactgtttccttgctttactgggatcccctggtggaaaggggtggggggttggggcggtaaagggtgctgatgatttgccacaggagggaaaaaaccttcctttccttgatttgcagctctaatcctcatccttagccccatccctatctgccatggtgggtcggggagagccctgaggagccttttggttcccaagtccatcttgatgttcactcttcccctcactcctgagaggccttctgccatcttggtccccagacccggccttgccactcagtgtccctaccactcgagaccctggctccaaaacgccactcatcccacagcaaatcatgttggtcgtgctccgttgtgtacccatctagtgaaggcacagtgttgctgagttgcatgactcatctcattctcttctgggacatactgacattttgcaaacatgcatgctttgcaaggaaagctgcagaactcattttcatactgtaacctgatgccatgtcacccgtgacccgttcagtaggagagaatagactgtcgcttgctgtctttcgtttcaggtaaatccatttcggatggccactcgtggcatgttcccgacagcccttcctgtcccgagcatcactacaagcaaatggaaggtgacaggaatgttccacctgttccccctgcgtccagcaccccttataaaccaccctatgtaagtcttaacttcactgggagtacagcctatgtctgtgagtcatacttacatttgcaagagagagagattttggtgtaaactgcgtgtattcattccccaggcatattttgagttggttttcttatggtgacagtgtctctgttgagctgtccatacttcattagaaccccggcaaaaccgattagacttagagataggttctggccaaaaaccatctttctgtatgttggtgtggtgtaacagtcattattactgtcgagtcaggtgtctgtgcaaatagtg

SEQ ID NO: 75942 - DNA, 1116 bp, Homo sapiens
tgctcactgcaacctccgcctcccaagttcaagcaattctcctacctcagcttcccgaataactgggattacaggcacctgccaccacacccagataatttttgtatttttagtagagacggggtttcaccatgctggtcaggctggtcttgaactcctgacctcagaggatccacccgccttggccccacaaagtgctgggattccaggcgtgagccacagtgcctggccatgactaactcattccattgagggtcttttctcctgaagttttgtgctatgacttgatatttcaaaagaagggaaatagatgtctcagtattaaatttcaaacgggaagtttaacctgtatattggcttatttagggtaagagtgaagctatcctggacaagaactttgacaggacaatactattcactctgaaggaccaaaaaatgagcagaaaatttgggataaatgtcaacaagatttgaaccctaaagaaaagcaagcatcgagttagacagacgtccatattcattcaactgggaaaataaaactgcagtcccaacatcagaatttccttggtcagttggttattgcgggacagcattcttctgcatgacagtattgtctccttaccagccacagaggaggctgtgagagagaggatttgggaaattggtgcaaatgagaaatcttggaaatctgtaagtatatagatataaaagttattctttccagtttgattcttttatgatgtagattttaatatccgtcaatttaggaaactctgtggctctgaattatagttataattctagttttactattacagtgaaagaagagaagaggctgttcattattatattggaagtagtgtagcatgtttattaagagtgcagagccccagcatgaagcctagctctgccatttgccagctgtgtgtgctcttgggcagactacttatcctctctgtgcctcattttcatttgtgaagtaggggacggtgtgtagttcccacctcacagagtggttgcaaggaccaaatgggttaatacatgataaatgcttagtttagtgtaagttcaataaatatcaaaatagtggtatgttaaagatagtgtttacatgat

SEQ ID NO: 75943 - DNA, 1189 bp, Homo sapiens
gacccgcccaaaactccctggaagccaggcgattcagaccccgccaccgcgtccccagagactgggcggaaaccggagactcgcctcccgaacccgcgaaactatctcccgcgagactgccccgccccaaccccgccccgcaactctactccctgattggctggaattacggccggattccggagtcctttccagctccctcttcggccgggtttcccgccgaatacaaaggcgcactgtgaactggctctttctttccgccaatcatttccgccagccattcatcaccgattttcttcatcttcccctccctcttccgtcccgcagtccccgacctgttagctctcggttagttaagggactcgggtccttccgaactgcgcatgcgccaccgcgtctgcagggggagaagcgggcaggggcgcaggcgcagtagtgtgatcccctggccagtccctaagcacgtgggttgggttgtcctgcttggctgcggagggagtggaacctcgatattggtggtgtccatcgtgggcagcggactaataaaggccatggcgccagcagaaatcctgaacgggaaggagatctccgcgtaagcacctgacattgttgttgagtgtggggctgtggacgagggctctgagggtgtgcaggtcccccggacccattttttgcgggagggacacttgtagcggaagagttaggcccataacacctgaagacctgcagccaaagaaagagaacccgggcacaacctgcgtttgcaagtggactgcctagtggctgtagccgctggctcctgtgcttcggggaaaagtcctgtgccgactatgctcccaaacgcgcagctgctggtgactttctgccgggagagtgggtagttgcggcttcctggagcccccctagtcagaactcagaaatccaatctacttaattcccgttaatttggaggtgagtagatggagactagtgaggtgacaaggcttgacaagactacaaggctgataatgacagagggtccttccagctcatagcttttcccactataccatagtcttatcatacgctaagtgaaatctaatacatttttcctttctcttcaatctcgtgcttctctctaacagccatctctctgccctggtcctagagttacttgaaacgtaatttggctcctgagtcctgagaatat

SEQ ID NO: 75944 - DNA, 1434 bp, Homo sapiens
tgaaggagggaaagatatattctgtgtgaccttactgagtttgctcttgggacctttcacatcacccgttatgtaagtaactgttgccagccacagcagttactaaattgtaattgtcctgtaactcctaactttgtaataggtttttgagtgaattacaaagtcatcggtggtgaaaagtccgggcccagtggctcatgcctgtaatcccagcactttgggaggccgaggtgggtggatcacctgaggtctggagttcaagaccagcctatccaaaatggtgaaaccccatctctactaaaaatacaaaaaattagccgagtgtggtggcaggcatctgtaatcccagctacttgggaggctgaggcaggagaatcacttgaacctggggggcagaggttgcagtgagctgagatgcgccattgcactccagcctgggcaacaagagcgaaactccgtctaagaaaaaaaaaaaaagaaatcacaatacttactgcttagtgcttttcaacatgtggcttgctaaactgtatttctgctttactttctgtttttgtttgcttgtattcaaacttacttccttttccagtggctttttgttttaatataaaaatcttccttttagaaagactgattgtgaagagataatttagtgcataataatagtgcagataatttagtacaataataatgcatctgggccagtactgagaataggtgctcactgaatatactttcgttaattggagagcaaattaaatatgtttatcaactccataagggcaaatacatgtattgtcttatttttgtctatatcctaaacacctggaaaccctgtttcctgccttactacttgtgtggttttaagcaaattaattaacctttctgtgccaaagtttcctcaaatgttaagtaaaagtaatgtctaggtcattgggatgttagtagaattaaatgggttcctaacagatgatcatttataattcttcctggcacataataagtattcgatatatgttgtattaataatcagtaattagttaatgtatatatgaatgattcattatctttttttttttttacatggtagctgctgccttgagatctatttttttttttgagatgaagtcttgctgtgtccaatcttggctcactgcaacctctgcctcctgcatacaagcaattctctcatatcagcctcctgagtacctgggattacaggtgcccgccatcacgcctagctaatttttttttttgagatggagtttcactcgtcgcccagactggagtacaatggcgtgatctcggctcactgcaacctctgcctcctgggttcaagcgattctcctgcctcagcctcccaagtagctgggattacaggcgtccgccaccatgtccagctagtttgtttgtttgtttgagacagagtttcac

SEQ ID NO: 75945 - DNA, 1589 bp, Homo sapiens
ggtttcgccatgttggtcaagctggtcttgaactcctgacctcaagtgatctgtccacctccacctcctaaagtgctaggattacaggtgtgagccactgcgcccccgctggcgctttgctttttctttacagtcttcctctcattagcatgtttcccaccctgctgagaatgctatccctgactcgtcctcttctattattattctccttttatgccttcctgggagctcggacatcaacaaagttcagcattccagattccttctctacctgctctactctgtgggaaactgggtacttacatgatggatttagttgccaaattatctttctttggaagtaacagccccttttctccctcacggggaattctaagtttgcagcctgaatttgacaaccgggggaaggtctgagagttagagacaagtatctgttctttgtgggtatttattcacttactcaacaagtagctgtatgtgtcccctaagccaggcaatcttcaaagctctgagagtctaatagtgaacaaaacagcccaaatccctaccctcatgaaacttgcatactgatgggtagagacagacatttaaataggtgaaacacattgtgagctggtgggaagcacaaagagaacaccagagcagaaaagagggacaggagtttctgtggtatggtggctgcaattttaaatatgggagtcatagtctttgtaaaagtgacttacgggcaaagacttgaaggaggtggagccttaagcctgccaatgttgtgagggaaatagctcctgaccaaaaacacagcctgtgccatagacctttgtcctcaccagttactaacttactgctttggggggtcaatggcaatggccctgtgagaagctgaccgagtggaggctcctgagtagaggaacctgaccctgccctgggcagaagggtggtgtcttttaaaagattatgcaaagtgggagaaggatgtgcattagtgttggaagacccaccttgctttgtaggcaagaaagcatagttgttctataagtgggcctttcaaaggggggcttactacatttatatgatttgtttggtttttccttcccttagtttgctataattaagcctgctctctccattggtggcatttttcttgattaagtctcctttctaaagagactggttgtgaagaggcagatggtttgagtaggtgctgcgagtgtttgctggccaagtgcagggcaagttgggtatatttgtaagctcgctgtggatggtagctccagagcctaagcacggtgctgcctcctctgtgcatcactgggtcatgcaatttacctctgtgccttagcttctgtatattggggtagtaatgtcacctaactcataaggttgttagaattaaatgagtttaatacctataaagcatttagagaagttgttggtacatggtaagttttaataaataggtacttagaaagtactcattgaataaaaaagtgatgtttgtgtttatccaggctgtacctttgggagctggcttataatcttgagacttaaaattagaatttatcctagtgatcaaagataaaagtttggaa

SEQ ID NO: 75946 - DNA, 1058 bp, Homo sapiens
tagctataaaagggaagaatttttttaacagtccttccaggtaattgtgggtatttttctttgatgttgtaccaggactcagtaagtaaattttaaaagattagttgcaatgtagaatctgaaactctatcagtgaactttgatactttgttacatcttctcagacttgcacactttgttacatcaaaatgttacatttggaatgaatatttaccccatgcatggttttgtaacatcctttgttcctcatttggaaaataatagttcccggaattatgcagatcttccaaatgttaacatttcattatgcaatatgaaagaattggaatcattaacatcaccaacaagctcatcagagaagttttcaagtattgagaagctgtcaagctcacaggggtggataaaaaattttaattttcacccaaaaactcacattttatcattggcaacaaatacaattaattgtttcccttgaaataccagtttcactttattcatttttgagaaaatatttgtcaaatactcaagcctgaataatcattgcttgtcagttgttatttcaagtaggtgtttcatataaaaatgcatctgtttcagctaacaaggcaaaaaagcacaagtgcagcctggacaacaaagtgagatcccatctccacaaaaaaattaaaaaatgagccaggagtggtcgtatagaggtgtggtcccaactacatgagagggagacaggagatcacttgagcccaggaagtcgaggctgcagggagttgtgttcatgccactgtactccagcttaggtgacagtgagatcctgtctcaaaaaaaaataaaaataaaaataaaaaagcactaatgctttagtaacaaccacaaccactgtacttctgtatatagcagaagtgcattatgagtgcttcccaattccttacatagactattaaaaacacatgcactcaagagttgaggtttatttatatatatatattttttacttttttgggacagagttttactgttactcagtgcagtggcacaatcttggttcactgcaaccttcatct

SEQ ID NO: 75947 - DNA, 1014 bp, Homo sapiens
caggggtgtgatcacagttcattgcagcctggatctcccaggctcaagctatcctcccatctcagcctcctgagtagctgggactacaggcatccagctaattttagtatttgagacagaatttctccatattgcccaggctagtctcagactgagctcaagtgatccacctgccttggcctcccaaagtgccgagtcaccgcacctgactgattttggatttttgagttagggatcttcaacctgtactacttatatagagtgtctacaataattcaaattgtttgtttatatttctaatcgttctatgttttatactaccctacgatgtaggagatgtccccttatagccatagtaactcatgctcaaagatcttgggtagcttgcccaaagccagtcaggaagggactgagtctgggaaatgaacccagatctgtctctaaaacccatttgttcttcccctttgttttcctaattccttagcaatgcattcaagaacattcatgatctggcccaagtatatatttaaaagttgagttttcatttttttttaataaagtggatgagtaacttcccaaataactgaatatttataggaaattaagacttgacttttcattataagagatactaatgggctaggcatggtggctcacgcctgtaatcccaccactttaggaggccaaggcgagtggattgcttgagcccaggagttcaagaccagcctgggaaatatagagagactttgtctccaaaaaaatacaaaaattagctggttgtggtggtgcttgcctgtagtccccactactgaggaggctgagctgggaggattgctcacgcctgggaggttgaggctgcagtgagctgtaatcgtgtcattgcactccagcctgggtgacagagcaagactttgtctcaaaaaaaaaaaaaagtttctggtaaggtgatagaaatacagcctcagccccatagcctcattagtatctctcactctctctctttttttttttttt

SEQ ID NO: 75948 - DNA, 1013 bp, Homo sapiens
tacaagtttctccctgtctctctcttttttttttaagagacaaggtctctctctgttgcccaggctgcccaggcatagtaccatgactcactgtgcactggtgcaatcatggaaaaactcttgacctcaagtaatcctcccaccttggcctcctgagtgctgggactacaggcaggcaccactatgcctggctaattttttgtaaagatgggggggggggtctcactatgttgcccaggctggtctcgaactcctgggctcaaacgatcctcctcccttggcctcccaaagtgcagggattatagacctgagttgctgcacccggcctcctctctgtgttggggccagcagattgccctttgtcttgcctggctgtttattctgtgtaaactagagggaggtccttccaccctcctttctattgtctgtgtggcggggccagggagctttccattgcccctgcgggtgggggagagggtgtggaatgtgccctctgggtgctcctgcctctcaggcatttttcttgcctgatgacagtttctcagccctccatactctgtttttctggtatggcagcagaaatcccacatgtttctagtaggcctgcagcatccttgcttagtttccagtgcagatgcagatatcctctactttctgtttggggtttggcagtgggaaccaggtgggccttgtttaggggaggggctgtaacaccatctgtgttcacataatccctcctgcccccacagcctccctatactcctgtaaaagttctctgcaacaagagtcgcatgattaaacatttcttttattaaaactaaaattgtagaagcttttctgtgcactttgcctttccctaatcatctgatttgcatgcatttattattctaggttggcaacagagatgattccaatctttatataaatgtgaagctgaaggctgctgaagaggtaacgccagaagagctgtgccatcaccctccccaacctccacctgggtcctatcgattacc

SEQ ID NO: 75949 - DNA, 1795 bp, Homo sapiens
aggggaaggtacattctgaaaggactataattaaagtgttggggggaaatagggcaacctaatttttgccttagaaagtgtttcttcctaccttttgatttctgtgtgatatacaaattatatatggtattacttttaggtgatgaagtacattacatctttgaatgaagactctactgtacatgggttcttagtgcagctacctttagattcagagaattccattaacactgaagaagtgatcaatgctattgcacccgagaaggatgtggatgggtaagtgtggcttggcttcctatgtctcattgcatgctttcatttataatatgtttctatttggggaatacagcataaatgtttctaaagagtaaagacatctaattgcctttatttccttcttatttccatcacttttttaagattgactagcatcaatgctgggaaacttgctagaggtgacctcaatgactgtttcattccttgtacgcctaagggatgcttggaactcatcaaagagacaggtaaaaacaacaaaccaaacaacaagaaagcaccatttcctgaatcctggtcttgacatgtggtggcatagaggaggtacattgtgggccataaataaatggacttgattggcagaagggcctgtctactaaggatgttacctaaattttctctcaattttctcagcaactctgtgaagtaggtactgttattgttcaactgctaagaaaataggctcaggccaggcacagcggctcatgcctgttatcccagcactttgggaggctgaagcgggctgagatcacctgaggtcaggaattcgagaccagcctggtcaacatggtgaaaccctgtctctactaaaaatacaaaaaaattatccaggcagggtggcatgcacctgtattcccagctattcgggaggcagaggtgggaggattgattgaacctgggaggcggaggttgcagtgagccgagatcacctgactgcactccagcctgggcaacagagcgagactctgtctctaaaataaacaaacaaacaaacaaacaaacaaaaccagctcagagagagcaagtaacttgtctgggagacaacggaaccaagatttgaattcagagttatctgagttcaaagcaatttattttaacctatacagtaataaaaatttggatagtttaaaaggatatgaagtgaaaagccccacctccccccacccccaaaatgggcactgaatctccacagtagttccaggactcgacagatggctggaaatgggtctcctgcacagttggccatattgtcccgttactagttagcaccttgctattttaatttcattatgaatacttttagcagaggttattttttacaaggaaatgggtcctggtaaaaagaagtaggtcagaagtttcaagtggaaagttttggccagcataaatgaaaattttctgtggttggcaagaaaaggtcaaaggtcaagctttgacagttcatttctacagttaaatgtatattcttcagcatatttagcaaacattgtagtgccttgcttaaaagaaaaaaatcccacgaggacagcacctgaaggcctcccactgcctcttattgagtgatgctaccatttgccctgatgcagctttaactcttctgctgaatcctaaaaagtatagaaagttaccttttaaaactttgaggtctttacttctagatgttcatgatgttcacattattataagagtttatctttttctgaaaaaaaatgattttatgcgagaagcacaatttaaaccc

SEQ ID NO: 75950 - DNA, 1452 bp, Homo sapiens
aagtcgtcaacttctctctgctttcttctttgtggacagctcattttcgggctccactttgtggccacaaacacctacagcctggttccatcctcatgcctaacagtcatgggattggatcttatcagctgagggaagaaatatggtcccctgtccactactgggtactcactcaggctgtctttagtagagtatgagtcagccctgaaaaggacattggtatattgccagaaaaatggatgctgtgatagcaaaaagaaagctttgctgccacagttcaatttcccctttatcacttccctgcaagtaaccctatggctcaggccctaagccaaaagagaaatttgggtgaggaactgtataaacaaacttaccaaagttagaaggaattaccgatactaatctaatttcttacacatctctccagcctgttacatacaccctatttgttttaactttttttccccatgtaatttaatctgatgtcttcttccgtatggctgattagctgtatgtcagggtttcttttttctttgagtgtaggttttcttcccactcccctatgactcaatgaatgatcttggcttaagctgctcccaaaaacccacggccagaaggacacaagtacaagtcccaatttatagctgaaaccctagagttgagaatattattgccaaagaaggaatgcttttaggaaggtttctgtttgatgttaagaacctgtttttgtgcacttattctaatttctccacgtggcatgcgaaggagggcagcttctatcctccaactctgatgcaggctggcttttctttcaggggtgccgattgccggaaggcatgctgtggtggttgggcgcagtaaaatagttggggccccgatgcatgacttgcttctgtggaacaatgccacagtgaccacctgccactccaagactgcccatctggatgaggaggtagggtgtccagaggagaggtaaaggtgttacggtggggagggtgggtgtgccagaggctgccatgtcctttacactcatgacctcatttaaccccatcatctcatttttacaagatgaaaaaacaaattcaaattaaaggctgagtggggtggctgacacctgtagtcccaacactttgggagtctgaggcaggaggattgtttgagcccaagagtttttgagaccagcctgggcaacatagtgagacgctttctctgcaaaaaaaattaaaaattagccagatggggtgggcacatgcctgtagtcccagctactcgggaggttgaggcaagaggattgcttgagcccaggaggtcgaggctgcagtaagctacgatcacaccactgcactccagcctgggctacagagcaagaccctgtctcaaaaaaaaaaaaaaattaattaattaaaaaaaacataaaattaaaagcatgctgaagtttatacagagtttgtt

SEQ ID NO: 75951 - DNA, 1587 bp, Homo sapiens
ccatgcccgacctttgtcttttttcttttgagacagggtcttgctctgttatttaggctagagtgcagtggcagtccatgagagcccactgcagctttgaactcctgggctcgagtgatcctcctgcatcaaccttctgagtagctgggactacaggcatgtgccaccatgcctggctaatttttaagctttttgtagcgacaggggtctcactgtgttgcccaggctggactcaaactcctggactcaagcgatcctcctggttcaccttcctaaagtgctgagattacaggcgtgacccaacatgcctggcctctcaccaagtactttctaccctaatctgcctcgtggtggacagggattagcagtacaggcactcagattgacctctggcagccagatcccatgtgtgtaaaagtggtggcctcagagtgaaggtgctccagaggcagtcgtgggcagtagtctgctaatagctatggcagcttgttctagatccctgcatcagattcctgagcccaagaatgcgcacacacacacacgtgcctgttgacagtgcagtctcttaaatgtggggagagagcaggagagaggcctagtactttctcttttaatcctcccaaagtagtgctctacattctgtaggagaaggagcagtgtctggacataacacgcagggccccaagcctgtttgcccctctgccttgcaggttgacactgatttccctattgggtaaaatggctggtgaaagggagctctttggcatgtgtagaaatgagcacggcatgtgaagggctgtcagaaacagtgtgtggcttacatttgaggccttaacccaatatcttatgaaatagcttatgacacttaagaatttaatacaaagctcagggatatccttttcatttctgggtttttttttggtgtgtatttcattatttcatttctgatgtccaaatcccctacccctaggtaaataaaggtgacatcctggtggttgcaactggtcagcctgaaatggttaaaggggagtggatcaaacctggggcaatagtcatcgactgtggaatcaattatgtcccaggtgagtgttgttggaggagtaaggtggctgctggtattgaggatggtatctaggtcatcaaaagaagcctgagagagaagcttgtctcattttatgcttgtagtactaaggtttaggagactgactagcccaagggtgcacagagttagtagatagaagagttgccacttgcaggcaggtctgcctggtgccagagcctttgattttcatcatgtgctgtacagcttccaagatgactttgtccagggagaaagtgagagggagggcaggagggatatatcactttatcttcatgtagagatcaccctttattttagcaaagttgatggatggatttaaaatacagtataattattgcaaagtgctatgagagtccagaagagggactcattctgccaagaggagggctttacaaagaagatatttgacctgggtttttttctaggctgagaggataaatctagccttttaatcatgtccaaaactgtactcggcatcctcatcc

SEQ ID NO: 75952 - DNA, 1359 bp, Homo sapiens
cccatctcctctctgtcatgtctgttattccttccaaaccttgtttgatttccccttatcaagggatgatctttccttctctccctccctcctctcccatagaacatgtgtattgtatcttttgttgcatgtgtctcatgtacggcgtcctgtgctctcctgcctagatagctcctcaagggcagtggtcactgtggcgccacatccagcttcctgccatctgaccactggcactcatatctattgaattgtcgaagggagttatagctggaagtcttttttctcccttcccatctcaagtttcagatgtagacgctgagctgccaggaacattagtcactgtcaagccttcaccgtttttaacctccctcccactctccctaccgtgcttttaagacagtagctcataattgatcactcattttcttgtagtgtaattatctaacaggcgataaagaaattgctctcctacaactcctcactttgaatacttgcgatatgacattcaagctcagtctttttatttatttatttttttaattttttttttttttcttgagacggagtctcgctctgttgcccaggctggagtgctgtggcgcgatctcggctcactgcaagctccgccttgcgggttcatgccattctcccgcctccgcctcccgagtagctgggactacaggcgcccgccaccacgcccggctaattttttttgtatttttagtagagacggggtttcaccatgttagccaggatggtctcgatctcctgacctcgtgatccgcccacctttgcctcccaaagtgctgggattacaggcgtgagccaccgcacccagcaagctcagtctttttaaaacctcgcatcttctgtatcatatttctgcttttggcattttttttttggattacatgtgagaaatggagaagaaaaacctgagtggggatcttgagtgttgcagataggtaggaaatgttgacttaaacatgaaacttgccatccttttcacattgattccttatgtagacaataaaatatgaataaaatcaaagcagtatcttcccttctggtcaacagtgtttttactgatcttgggcatataggcaaattaatgctgatacagctggatgttattgtgttccccaaaggatggcagaatcactcagttacagaccagcaaatgggctgcaggacctaaagactgatatttgcaaatgttcactttagaagcaaacttttctaccaccgagctacttcttggttcatattttgattatttaaatagtttgcatggtccactcagggataacattgtaagtcacttgccaaattaagaatgaatcaaggtgtgtatacctt

SEQ ID NO: 75953 - DNA, 2594 bp, Homo sapiens
gttgatttttgtacatgtgatttcccaaagaaagagaaattctagggctgggggtagataaccaaaaggtttgctcattactgaggtcatatgcttaggctgagtagtggtcactttttccactgaccacatcatcctatccacgaagcactgcatgtttagcagtgtctcgtcaaccctgacagtatttggtttaggagcaaaactgaactcaccagtgctgcgtttagtcatgtagtcaaagatatgtgtctcttacctgtgggaaaacgaaaatgactaacattaacacgtagaaatagatgcagcgggtatttcaagctaactacagtgtgaagacgattgaaacttgtacagagggcaaacctctatctatatttccttggcattttgaaatgactctaggggctgtaagaggaaatgttctgccagtttgctgctttataatcttctagaaacttgaaaccatcccaatgagttgtgttgaccagctccttttactccatataaaaaatatcttacgtatctgtggtggaaagagaaactcttgcgtttggaggctgctttttcaatttcagtaatgtacacattttctcattttgccctcagcaaatttgtgataggtagtgttaagccttctttgcattttggacttcagattaatatggagcccacaggagctgcagaactaacttttttttttgagacggagtttcgctcttgttgcccaggctggagtggaatgctcactgcagcctccgcctcccgggttcaagtgagtctcctgcctcagcctctgagcagctgggattacaggtgcccgctaccaagcccagctgattttttaatatttttagtagagacggggtttcaccatgctggccaggctggtctcggactcctgacctcaggtgatccacccgccttggcctcccaaagtgctggcattacaggtgtgagccaccacacctggccctaatttttaataaaagagctgatgctacagctaatctcttttttttctgagacagagtctcgctctgttgcccaggctggagtgcagtgacgcaatctccgctcactgcaagctccgccccccgggttcatgccattctcctgcctcagcctcccaagtagctgggactacaggtgcccgccaccatgcccagctaatttttttgtatttttagcagagacggggtttcactgtgttagccaggatggtcttgatctcctgatctggtgatccgcccgcctcggcctcccaaagtgcctgctaatctcttaattctggcttcttgcctccaccttggagcttcttctcagttgtggcgatctgatcagagagaagtggtgatgtcgctaaaactaccagatgcagcgcgggagccttattgcttcgaggtctaggcccgcccccagcccctcctggaagtgcactgaagccaagtgtaggatgttctttgtgtgagtgagcaatgatgcatcattgggttttgttctcttgaatagctattctttgctggtaagatttgtagttgttcttgtgtccttttaagggaagtgtaattatattctttgcctttagcatacatttaagtagctgtgtctttggaattggatgttgaattgttcctccagctcacacatggagctcacaaaatgctgacagttgctgtagaaacgatatctggcagctgtgacagagttggatctttgtgcacccaaaaaatttcctttgtaggctttagcaaattaacattttaaaatgggtgctcattatatactgggtagttggttttaagaataaaaaacagttggtattttatttgccacctgagagactacaaaaggattctccaggttctgtaaaaccacttatgcatcttgtgaatttttgcaggtaaaataattttctccctaagaaatagcaaacatctgtcattccatagcttttaagttaagtaggcactggagcctgatgggactaacacaccctacaattctgctgagtttttgtcgtaactgatcaccaggactgtgattctgagacttagttttgatttctcccccacttgaccagatgataaaaaaccaaatgggagaaaagttgtgggtgatgtggcatacgacgaggccaaagagagggcgagcttcatcactcctgttcctggcggcgtagggcccatgacagttgcaatgctcatgcaggtaattgtgaataaaagtttctataagagttctgaaaagctgatcgagttttggctgcttttctccccaagtagaaatgtcaaaaacctactcagaagtaaagatgtgaatttattgagaaaaagggaagggaagaatagagaaataagatcaggcacattaatagaggaaagtagggatggcataattccagtctgttttggaatataataactttgaaagaagaaaagtgcgatcacactggcttggccaggtctgttttggtttgccttccctttctttttttttttttttttttgagacggagttttgctcttgctgcccaggctggagtgcaatggtgtgatcttggcttaccgcaacctccatctccctgattcaag

SEQ ID NO: 75954 - DNA, 1055 bp, Homo sapiens
aagtaccagagtgattcttccatgtctatttcaagctctaaattactaccatactcgcactttaccttcagatttttattgctgcggtactaagaacatgtgtttttttttttttttttttttttttgagacagggtctcactcactctgtcgcccaggctggaatgcagtggtgtgatctcggctcattgcaacctctccaccttctgggttcaagagactctcctgccacagcctcccgagtagctgggattacaggcacgcatgaccatgcctggctaatttttgtatttttggtagagacggggtttcaccattttggccaggctggtcttgaacttctgacctcaagtgatctgcctgtctcagccttccaaactggtaggactataggcatgagccaccgtgccaagctgctgtcttaattaaaataatgtttattaattatgataggttcttagagttagctttctctgcttggtgagggtatcacattttgcttgttctagcaattactacaaatgttgacaccgggaacaccttcacccttccacctttttttttttttttggagacacagtctcgctctgttgcctgggctggagtacagtggcacgatcttggctcactgcaacctccgcctcctggtttcaagcaattctcctgcctcagcctcccaagtagctgggactacaggtgcgtgccaccatgcctggctaatttttgtgtttttagtagagatggggtttcactatattggccaggctggtcttgaactcctgaccttgtgatctgcccaccttggcctcccaatgtgctgggataataggcatgagccaccgtgcccagcccacccttccacctattttataaatgtaatcactttgttctgctcttgagcttgtcttaaccccctttcaacttcagcacgagctattccttgttctgcttattgaacccattattttccttttactcttactgcaaattgcctcactgcacggtctctgcctcacaaaaacaaaatacatattaatatatctctgggctgggtg

SEQ ID NO: 75955 - DNA, 2344 bp, Homo sapiens
tctgcctcccaggttcaagcaactctcctgcgtcagcctcccgagtagctgggattacaggcatgcaccaccacgctcagctaattttgtatttttagtagagacggggtttcaccgtgttggccaagctggtcttgaactcctgacctcgtgatccgcccacctcggcctcccaaagtgctggtattataggcgtgagccaccgcacccagcctagattctttattatagctttttctctctggagattagccttttttgtagagctcttagcggacaaatgacttgtttctcagcaaaagcaacacctagggggaaaacaacttaatttgcagacttgtgatacagcttggtttcaaactttggctttcagtgggaatgattattataagcaaatgaccaaatgaagcatggtatcgggaagcaccaacacacagcgatttcagaattcatttatgtaactgcagaaattggaacattacatagacatagagtcggtgctgctcccgtgcactcctcctcgctgttttgaggtgtgtcctcagtaacccagtgtggctgttgatcccagtggtgtggtatttgtggtctctggacatctcattttggaaaaactgcaagttctgtatttgggaggagattcttctgtggacagataattagtcttttatgttttctttttctttttctttttcttttttttttttttttaagacagagtctcactctgtcacccaggctggagtgtagtggtgtgatcttgggtcactgcaacctccacctcccaagttctcctgcctcagccttccaagtagctgggattacaggtgcgcactaccacacttggctactttttatgtttttagtagagatggggtttcgccatgttgcccagggtggtcttgaactcctggcctgaagtgatccgcccgcctcggcctcccaaagtgctggtattatagttgtgagctaccacacccagccagtcatttatgttttcaagaactccctatattgggtgtttgtccactaactgggctgccttcagtattccattggctttaaaatagggattgagctttgcaatagaatgaaagttggaaagatacagagcagctgggagactaatgtggcttctgttcttttgtagtttaatctccacctcacaggtgacatccatgccatcactgcagctaataacctcgttgctgcggccattgatgctcggatatttcatgaactgacccagacagacaaggtaggatgccaaagccccatgaaccccattgaacagttttgaaagtattgaaccatctgaattagtgttggtgtcttgggtgctgaggatgcaggtagcaaagcagtggggctcctctcattttaaagcccctttcttttctttaaggctctctttaatcgtttggtgccatcagtaaatggagtgagaaggttctctgacatccaaatccgaaggttaaaggtaagctttttttcttccacattttttatattgtatggaatctggaatctgatcattgattaggacataaaagtcttcttggagtagcctattttagatgaagttacatcagtaatcatagtcttaaagtcatgatatacatagcaaagatggatggtagaggttatttctcatttatctatagattagaagtggctagtgtggaataaatagaacactgacaacctgccctcagctaagaaagaaacgacacttcctttataacatgaacaagagtcaggatgtcactgtggcggcatagcagcctttggagtttgcatcattgggaccttaagcaaatttgttaaatgacttgtttctccgcttacttgtctgtaaaataatacttgccttgccctgaatagataagggtctgtgttaaacagttaaaaccatagttatatctatattttatttgaatttctgtaacaaatacatagttagtaagcatacaccataccacctgacccagaaatctcacccaaaataaatgaaaactctgttcacataaaaatctgtacattaatgtttttagcagctctattaataatttccaaaaactgggaactaatctaaatgtctttcattggatgaataaataaacaaactggtacatccatccaataaaaataaatgagctattgatacaagcaacaacttggatgaatttcagtggcattatgctgggtgaaagaagccagtctcaaaagcttgcatattgcatgcctccatttatatgatattctcaataagagaaaactatagtgctagggaacagatcaatagatgttaagggtatggatgaagggagggtatgaccataaa

SEQ ID NO: 75956 - DNA, 1025 bp, Homo sapiens
agtagagacagggtttcaccgtgttggccaggctggtctcaaactcctgacctcaggtgatctgcccatctcagcttcccatagtgctgggattacaggctcagccacaggctgagcttcacgcctagctgaagctctccttctttgctagtaaaatcttcccttccctcactaggcatatttgtggcatcccaggttataatcctcgttgctcattcctgaataaactcaacctacttggagataattttttgtaatgtctttctttaggctgacagtaggaaataacccccagctttcagtttttccttctgaatttaagatggtttgcatttcctagaggggatcccatttagaggtaggggtcaaaatttttgtcttacgtttattgtgcttctgtttgtcttattttatgttttcattttcctacactttcagagactaggcattgaaaagactgaccctaccacactgacagatgaagagataaacagatttgcaagattggacattgatccagaaaccataacttggcaaagaggtaccagagcagtatacaagccccgtttgttttggctatattgcacaccctacaccctccagaagagttgttaaaatgtgaggctcagaagcttccatgttggtattttaccagctaaggcatgaccaagatggtgacattatttctttttcttgccacctctctcagtatctctccttattagctatcatcaaatctctttgttggattggtcgaacattttgctggctattcagtgttgactgaaattagggtagttaaaccaaaaatcacattttacaaatttaattttatgcaaaaagttttagtgtcatgaagtagagaaattatgtttaatcacttcttgaatcatgtgtgacctttattcttagaactcttgtgtggcataaatgacttgatttttttctgtagttctctagcttacctaatctttttttttttgagatggagtctcgctctgtcgcccaggctagagtgcagtggc

SEQ ID NO: 75957 - DNA, 1031 bp, Homo sapiens
taagtgtgctatgtttcctaaatttccagaccaggcctggcacccagcgtgtttcaaaagatatttgcacttgccctgatttgatggctcctgcatttcttacggtggtggaaagtcaatgagtcatcatcccacagaacaacaacacaaacctcagtcttttgaaaaaatgtagactgctctgtttttcttatatgtggaatatgctttaaaatagattccagatttctagttaactgtttgaattctctagatgggataaaaccaagccattccacattcctttgctgtaaaaataactcctgtgtatttatggtatatgaacatcatttcttaactttaacacatattctagctttgccatccattttgaaatattgatagacaatcatgaaattagacttattgctttaaaactctgctgcttcctttaactttgtggtccttttactcaaaatcgttctatatcttgcctgtctgctgtagtgttggataccaatgatagattcctgaggaagatcacgattggacaggctccaacggagaagggtcacacacggacggtaacaatttgtccctttccaaggaaattagttcagaggcactagatcttgctgcttctctcctcctccatcctctctcatacgactgatactgccaggtgttgttctgccttctcccttttaaaatggaagtgagtaggtgtgtggcattgagcactcctgacagcttttgcaataaatcccatgtgtcacctgtgtgtttttcccccggcattttttcctggaggtggagagccccaagtgaatatccttgcatagaaattgattaaaattgcttcttttttgtggccatttcactgtatatctccttggtttaagaggtaccatattattcccttgtatatgaaagaaacaataagcgcatgattataagcggccttcatagggataaaatcatagctttttggtcctactataacatttattttaaaaaactgacaactcagggctgggcgtggtggctcacgc

SEQ ID NO: 75958 - DNA, 3921 bp, Homo sapiens
tttttgctattagaggattattttcattaagtattttgggtagtattctgttattctatccttttaagctatttgtttaagcctcagatgtaaaagaggatcacttttgcaattcacacttctggtttaacacaaagtttttgctagtacctcttttccctgcccacaggcccagtttgatatctctgtggccagtgaaattatggctgtcctggctctcaccacttctctagaagacatgagagagagactgggcaaaatggtggtggcatccagtaagaaaggagagcccgtcagtgccgaagatctggtgggtacccagacacgccaggcttggcgacatatctgtgtctgttgtcctagggtctttcagcagttattaataacaaaatgtaatgctgtacttaagacattgcaattaattcatcaatttaatcctattttgctaattacaagataattatgaaatgtttaaaaagtacatcagagtgaataatagctggtatgctttagtaatagatcacaagttccagatgatttgagtaacatcttcatcctgtgggcatctctaaaagtgggtgtatgacttcaatttgcagagaacatcaagagtaccattgctttatctttgttgctaggtagttcagctacactttgatggcttaatagagtgacctgatgttaaaagttggtattgaactcttgcgtaatattgcagtttcagctttggaagacacatattgagtttggtatttatagaaatttctgcccagataccagagttacaaataactgagtactctgggaacgagcattgtcgtgctctaaaatagtctagaatggatttctcacatcagtcagcagctgagcttgattaagatgcttgtttctagagttacatgtttttccagatattacatgtgaatgtcatttgtattctatctggcaactttggccaggcgtggtggctcatgcctgtaatcccagcactttgggaggctgaggcgggtggatcacaaggtcaggagattgagaccatcctggctaacacaatgaaaccctgtctctactaaaaatacaaaaaaattagccgggcatagtggcgggtgcctgtagtcccagctactcgggaggctgaggcaggagaatggcgtgaacctgggaggtggagcttgcagtgagccgagattgcaccactgcactccagcctgggcaacacagccagactccgtctcaaaaaataaataatttaataattggcaacttcatagcatatccagaaaaaaaccatgaatggtccaattcaggtgaaagtatcaattggtccaagatggctaacatgggtaagcctagaatgtcaaatattggtttcagaaggttgggtttttttgctggtgggagttgatgctgcacacatttgttttgtagggggtgagtggtgcactgacagtgcttatgaaggacgcaatcaagcccaatctcatgcagacactggaggtgagcagagtgactcctgccttcttgaattggttttggacagtcagagcagagtggttataaagcacacttgcaaggcgcggtggctcacacctgtaatcccagcactttgggaggccaaggtgggcagatcacaaggtcaggagatcgagaccatcctggctaacatggtgaaaccccgtctctactaaaaatacaaaaaattagccgggcatggtggcgggcgcctgtagtcccagctgctcggaaggttgaggcagaatggcgtgaacctgggaggcagagcttgcagtgagccgagatcacgccactgcactccagactgggcgacagagcgagactccgtgtcaaaaaaaaaaaaaaaaaattaagcacacttaacctgggtagtcaagaccttctccacttgctcatctctttcttctcattcttcctcacacctgtgactgggacgttactgaaataaaagagatgactttatattttccctctgggaagtattcttccttccgattccaaatcaattccataccgttgaatgtgtgatcccactttgaagcaggattggcagctcagctcacggtgtcctggtttccacagggcactccagtgtttgtccatgctggcccgtttgccaacatcgcacatggcaattcctccatcattgcagaccggatcgcactcaagcttgttggcccagaagggtttgtaggttagtgttttttgcaaaaccagtgaatagactgtatgtttcttttaacatcaggggaattgggatggcatttttactgttgctttcctctttacagtgacggaagcaggatttggagcagacattggaatggaaaagttttttaacatcaaatgccggtattccggcctctgcccccacgtggtggtgcttgttgccactgtcagggctctcaagatgcacgggggcggccccacggtgagtggtgggttgaagtatctgattatcggcagtgtgctgacggccaaaaggaagttggatgacttctgcctgtttcttcattgagttgctcttatcctcgtgattaacaggcagcaaaagcaagggacgggcagacagcccttgtgttggctgccttatcactcacaggcaccgtcagcgctcagcattttaagagggccaaaatcggctgcctggcctacctttcggaggacatctgacaatatctaaacccctccaaggacgtgtactcggctagccccacaaaaaactgttttacgttcagactgttctttttaaatctgcatccctctgtatagtgacactggcaaccagccaaccaaaccagttagctgagacagaggtcagccccttcttgagtatactgttcatgctggacagggcctccacaccctagggagggagtgggggagaggagaatggcagatctgcccagggctgccctgggtaacagagaaacaggtggagactggctcatcctcacctccagcctgaattttgtatttctctgaattcctactgcttagaaattcctactactttttatcctagtattttaacaccttttctttagggcctacatgaaaagacatggtgctaggttttctgaaatcatttgaaaaactattaaattcctgtccaccaggagcttgtattataacttaggaaataaggactccctggcctacaggataaaaatcaaatttgttttggtcagggtttgtcctaatgtagcagttctctgttttggcctcagaacctctttacactcttgacagttattgagagcctaaaagagtttttgttcatatgggttatagctattgatatttaccatattagaaattaaaactgagttacatgtaaacataaagaactttgtaaacatgaaaatgcattatcttttcccagcaaaatttaggcattgtacatttttcagatcttctctgggtctggcttaattgaagacagcacttgatctgttgtgacatcacatgtctcataacctttggaaaagtccattatatgctcaatgagagaatgataatgagagtaaaagggccataagatgttacagaatcttatggaaatagttttgacttcatggaccccttcaaaggattgggtccccggagcacactgggaatgctgccataacaaccccagcacccctatccagtcttagttatccctgagtgccaaaggcactcccaacccagcacactcctttctgctagtagcacaggatagactcccttttttttcccagtcacaactaacattcctctctcttacacccctcactcaccctcacaccatcacacctcctttccttgcttcctcctgacctcacagtcaggataatgtcccataatgctgtgcatggaggggaacatttgcacatatggctctgtcaagagagtaggcctcct

SEQ ID NO: 75959 - DNA, 1137 bp, Homo sapiens
ccacacagccccttctggagttggagcacatagtctcactgcaatggaagagggcagagcttcttaatcactatccactgcccatggtggggcccatgaaatggacaccttcacccatttgctcatttctgtggatgcagcagggctgagccacggcatagatcaagactgggggctggggggcggggcggggaggcaccagacacctccatcctttagatatactctacaaaagagaaagaaaatccttctgtattgttttccctcttgtttgtattgaccctgcaccacggttcagctccaccaatgctaggttggcactgtggaccagttcatgaaaccatggcagggctcatcacgggctctatcgacagacatcccagggtgacttccgcaggcccgaccgcttcctctttccccacactccccttgacttccaaccccactgctatggccttcactcgagtcactgcacctgcttggtacacccctttccacctctcctgccatcgatccggtccttctcacctccttaattcaggtcatagaggtcttccacgctgcccaaagcagtcgattttgttctgtgctgtgtgattggtcacataccctaagtccttagggcaggaaataatcttatactactgtacagcctgcaagcattgcagcgtcttgcctttaacacatgaaaagcaccattttaagctaggagatttaaataggaaatgcctctgactctgtttcttttccttccaggtcactgctggactgcctcttcccaaggcttacatacaggaggtaacctgagttatttctcatcacgtgtcctagaaagcaccacaccttgaatcagcatttctccacctggcccatgtggaaatgaatgggttattgctgtgacccagggtgcagggtgccaaaaggcctgcagtgtgctgaggagttatattaaatgagtagatagggaagatgtacctcacaaaatagaattgtcccacatagggtgtcaataagccactgccctagaccagtggttgattctcaacagctgattttgaccccggggacatttggcaatgtctagagactttttttattattacaactggaggtggggagtgctactggaatctagtg

SEQ ID NO: 75960 - DNA, 1297 bp, Homo sapiens
attatccagctcaaatgtcggagtgtgaggctgagaaaccctgtcctagactaatagcagttcccttccattgtcttccctgcattggctgggtaagttccaaatgccattcagatcagaagcaagtagagaccttttttgaaatggcttctcctctgccgatttaaatccatattaacgggccaagatatatggtcaggattctggttgtttttctagacaaagcttcctggatatttatagcatcaaacaggaggctagagaacaactgtgagctcaaatcttttcatatttatgtcatttaccatcaaagaaacatctctaaagccagtttggggtggttacaggaaagacaggccatcagataaggtggcaaggtcacctgctgtcactgctaattcaatttttctgcctttttggaaggcttttaaattatcaagcaatacagggtcactgttcaggccccaaatgaagtatttcaaaactggctagaaaaaattgctggtaccttcagtctgcctgtcttctgagttatggtttgccttttatggtcatttgtctgattcacgcgtaggaggggaattcacagttctggccctcctgccaccccacagcctttcctgtgtctaattacagtgactgcccctagctggcccagctggtgtcttcatttaagaaattctacttatttaaaactgttcttgatcagcgttacatattaattggttttcatgtgactagaggtaaagaattagcagtgttctttagaagctcaaataaatcataatctcagttttcaattattaaaggaaaaaagcataaatcacatttataatgaacctagttgttttccaccttttatcctacctatttctgcttttttgggatcaacaaacattagtgctgggttttgctcgatgattcagtatatgtatttttatagaagactcttttatttttaaaatatttaatgtattgttaagcctacaatagtaatataccctttgtaaaaaataataattaaacattataagaatgtaatatatgtgagttgagtccccttaacagttcggtgcatatttctcgacatttaaaaatttttcatgaattatatacatgtatttttgtgtttgtcctaaaatggaataattaagctctccatggttttgcacctttagtacatcttggacaggttccatgttaacacagatgggtctcactttcataacatctgcatgataaatatttattgagtgtatatgtcataattcattggcccagtcccccttggaggagg

SEQ ID NO: 75961 - DNA, 2386 bp, Homo sapiens
tctgaggcttgatattaaaagaaagtgttcctggctgggtgcagtggctcacacctgtaatcccagcactttgggaggccaaggctggcagatcacctgaggttgggagttcaagaccagcctgaccaacatggagaaactccgtctctactaaaaatacagaattagccgggcttggttgcgcatgcctataatcccagctactcgggaggctgaggcaggagaatcgcttgaacctgggaggcaggggttacagtgaactgagatcgcgccattgcactccagcctggcaacagagcgaaactccgtctcaaaaaaacaaaaagaaagtgttcttaacccaatcatcaacctcaaactatttgcttatgtatatgtatataaaaaccatcttctgccccttttagggactctgacctagaatgtggctatgtcctggttaaatgtcctcacatgtgtccagtcatggtgtccccatctctttcttgtgcattagctcccagttgaggataaaatcaggatcattgcacagaagatctatggagcagatgacattgaattacttcccgaagctcaacacaaagctgaagtctacacgaagcaggtagatgtttggttagtttgtcctttcaactctttgcaaagcaggacttggagtcacaatctctgggtcctcccagccctgccaagtacccgttgcttcacttctctgggtggcagccttctctcctctgaaatactgagtttggattaggtggcacagtccctggttctttatttacccataggcgttatatgaatgtgtagaaatccatgaggaaatacagaatgtcttaccaaaatattgagaacgtctccagtttttgttattttgagatagggtctggctccattgcccaggctagagtgcagtggcacaatttcagctcactgcagcctctgactcctaggctcaagcgatcctcccacctcagcctcctgagtagctgcgcctacaggcacgcaccaccacacctggctaatttttgtgttttttgttgagatggggttttgccctgttgcccaggctggtcttgaactcctgggctcaagcagtccacccatctcagtctcccaaagtgctggaatttataggcatgaaccactgcacctgaccctctccaattttattctcatatctactccaaactattattttaaattagttttatgttatttccatagatggaaataaaatattcacttgtggactacagttgtgagtacctaactccctcacccaacagttctttttttttttttttggcttaataaataagctggaggacagcaagatagagatgtatataaagggagttggatgtttcgaataaattgaagaatccatgtaatcacagggcccagatggtcattgctgggttgtcatcttttcatttgtcctccctctcttcccttctttccccagggctttgggaatctccccatctgcatggctaaaacacacttgtctttgtctcacaacccagagcaaaaaggtgtccctacaggcttcattctgcccattcgcgacatccgcgccagcgttggggctggttttctgtaccccttagtaggaacggtaagtgcatgctgcaagggagtagtgggcgcatctgcacttctcgtctgaagtgtgttgccgaaaccatcaagcaaatgccaagtgagcagagttcactgcccagaagaaaattggaatcgggcctattatgattgctgtggatcataagctataaagcaggagctatatagctcttgctgtggaccatcttggtgtcaaatcaagaatgatgccaggactactcatactgaataaaaaattctgtttcccagggacagtatgctcttcactgaatctaggatgagcccagttgataggctggggtagtgctaacataatcacagttaatgtttattgggagccttacatagattaactcagtccccccacagccctaggaggtagggacagaggttttactgacaggcctagaacttacgtctgaaattcagggggttcattatttttaagtaaggaatttccccattaaaaaatgcaaatggacccttgagatatgaaaggtgaggttgcttatttacgcttcaaggtgaacaaggtgtccattgctttcttatcttacagattttatgcatattcaaagaagaatattgccagttgggaagcagaggggagggatgcttaaggacataatcatagtttgggctgacattgttccaaggttaacttggatcctgaatctaggttatcccctaaatctgccctgtatcctgtatctacagattgtactgccatgcaatacaggactgaaatattaaactaaatcaa

SEQ ID NO: 75962 - DNA, 1579 bp, Homo sapiens
cagtgtgcacttatatccctagacacatcctgttgaaactgcaaaaatatcaaacatgaaaatcctaacatctttctccagagacgaaaaaagtggcttgcctatgaaaagaatgagaactagacttaacgcccgtcttactggcaataagaagcttttagacaatggaggagtgtcctgtaaggtcacagggaagatgactttcaacatgtgctcacacctagccgaatctatctggatattttcagacgtgcaagggtttgccaccccacatctcttcctaagaagttatttagcaatgtacttagcaaaatgaggaattaaccaagaaaaaaggaagacgtgagttttgggaaactgaaccctcatttggacattagcgaaggggcattctgataaccatgcaaatgacctgaagttacaaatcctgtgtggaacaggttgggggagcacctgagaaaaactagaaaaagctagaaaagacaaggatatcaaagggtcatagtataaaacaaaagctcttgcattatttgagaaagttaaggtccaagtagaagcaaactgtagtttgatgctagaacactattctttgagagggtatgtgtgatactcgaaatgcagtcatggctcacggcttggtctggtcttgaacagtattcacacagtactatggaaataccatgcatcattttcaagtccatttatggacacgccctagaagagctggtggcaggaaaggatgtaaatgttaacagctttggcaatgtgagtgggtaatggtgcagtatggaaggaacaggaaacatttcagtgcttgcttagagaaaacatttatttcttgtttttccttccagatcaccatccatcttcaagaagctactttgaaagtctggccagtgtctattcaggcccactgggagttaggaagtataagtaagccaagagaagtcagcccctgcccagaagatctgaaactaatagtaggagtttccccagaagtcattttcagccttaattctcatcatgtataaattaacataaatcatgcatgtctgtttactttagtgacgttccacagaataaaaggaaacaagtttgccatcttggtgttgcaatatgaattacagccttaacagactgtgccacaggtctctgccatcctttgtgagctcatttgtcaggcagacccttgggctgaagatgcaagttgcagtgtgccctttatgatactgttgtgtttagagggaaatgtatgcatgcttgtgtatttctgagaggacacataattcaggggacctcctgagagggttgggttggaagttgatgacttaccttttaatcttatacctttctatattgttgaattttgtttttctaccctgaggaagtattgcttatacaagtttttgcctgaacttccttggaattcccatttctgtcacagctttagcactgtctatgtttagagtgctcaagaaggatggtcatgcagcattagccttaggtgagcctctattctgttggtgcagcaagtattcattgagtttcttctaaatgcctgggctccacccttccctac

SEQ ID NO: 75963 - DNA, 1017 bp, Homo sapiens
tcagcctcccaagtagctgggattataggcatgagccaccatacctggcccagactttctttttcctaaaacattaggttggtaaaaaccacaattacttttgcaccaacctaatattttttttcctcctcttctggctgggcgtggaggtggctcatgcctgtaatcccagcactttgggaggccgaggtgggcggatcacttgaggtctggggttcaagaccagcttggccaacatggtaaaaccctgtttctaccaaaaatacaaaaattagctgggtgtggtggcaggcacctataaccccaggtacttgggaggctgaggtacgagaattgcttgaacccaggaggcagaggttgcagtgagccaggatcatgctgctgcactccagcctgggagacagagctagactctgtctaaaaaaataaatcaaatatttttccttctcttcttgttctttatcttctatctctgttcttcctctcccatttgtttccttccctttttccccttgtctccctccactggatccttccagaggatgctgcatcccactggcgccagtgctaaacactgctgatgttggcaaagcagtatttttcccagtgaccttggttttattatttttaattccctaggtccatgtcaatgttgtaatacagtcaattttacagtccacagaaatgatagcgctgccttgagaggcatatggcaaaggggtcacagtgcagagccccagctctatggcagagagcctcacccacctccctgcctccacatcctcaccatggaaataggagcactgttggtacctacctcgtgagggcggttctggaattactcaaacacatcatctaagatgctttgtacagggcctggcacattgtaagcacttgtcagttcctgttgcacagcatcctccaggccctgtttgcagagttaattgcttctggtactttttttttccttttttttttttttttttggcagggggggtaggggggttgggacaagag

SEQ ID NO: 75964 - DNA, 1055 bp, Homo sapiens
ttaccacataatagaaatattgaaatgagatgtttaggagtctgtcattggaaactaacctggattgcgcaaagacaatcgtttgagaagctcacttgaatgtatctcacatactagaaataaaacgaatacccaaacagaaacttaactaacgagggaaaataatgcagtctgtagacaataaaactttgcagaatgtcagactgcaaatgattcgctcttaaccagcaagggtagctttatcgcctcaggaaatcttaaagtccctgtgctcatttcctgatggaattgcaagtctcatgtcacagaaaacaccccctttcctttttcccttgagcagccagtacccgaggaaagcaatgcatctttcccagcaccagatacggaccacgaagcttcctcctggaggaaggaatctcgaattctggcttgacgccccttatggcaggagacagagcgcaggataaagtactcaaaaaggaaaatgccgggggcgtggaacagataacccagcttcaggctgtctgcagaattataatgtaatggccagaaacccaaaatcacatttctcaaagagggataaagaaggaaaaaagccaccggcaacccatgcttctaagacaagctgtaacgcgaaggggataggtgggcagacctgatgagggtcgccctggccgcggattccagcggacaagcgacctcccgcgttcttactcccagcacctcagagggctcggataccccgtatccagtgggcacctcttgcccactccgcggtccgcggaccggacattgcccccgaccctcctcccccgcaggctccccgccctgcctttacttacgtagggcgtcggggtccttggccaacactgctcccgaggtggcggcgcgctcgcggggcccgccgcccaggcctccagggagccgcggtcgcacccggagcaaggcgccctctgcagagcccgccgccgggtgcgccccctccccaccgcgcggggacagacagcaggcagcgccaatgcgagcggagcggagcgggcgggcaggggcggggc

SEQ ID NO: 75965 - DNA, 1038 bp, Homo sapiens
aactgattttcagggttccagttccttctacagttcataaaattatgggttacccaaatgaaacttcagtgaaggatttacataaaaacaatataaagaatgagtccctttgcttattttagggcatccacccactaaaattcataggatctttgttggataatcacctcccatttccattctttggtgccatcataccattctaaggattaaattttcaatacacctttatattatctaagtttgccaattgcatagtttgccaacttatttttggcttttaaattagttcctgaaccaaaaaaataaaatataaagaatttcaaaagcttggttttcaaatgacaagaactcagtctactcgtggttcaattatgagttgataagtgccttatggttaaatgaccattaatcaattttttaatttttttactaatgaaacactgcagattagtatccccaaacaattcattttctgacgaaactcttaaagcccagtttcagaacataagctttaagcaacaagcaatcttgtgttaatctgagctctgttacagctctgccgtaatctcagccaaattgcttcatctgtacgtggtgataccaccatctttgtaatattgtggtgaggattagagatgtatgtaaaagtgcatgcactgcctaatacccaagaattgctcaataaatgtcagctattactactcttactgacttccaactatgtgcagattatggtggaaacatgtgatacagcagatacagtacttaaatgaaaatgtcaaaattgtacaactaatttaagagtgggaaatgacagtaatgctaaattttcctaagaatatgtatgaaaaatagcacttccttgatggaacatacatttttagaacagaaaccttatgttataatggtaaaactagagagtcaaagtctctagttctaactctggctatgaccttatctagttgcatggcttttgacaagacaactgctcccctctggagttcagttttgtcatctggctggatttgagtaatc

SEQ ID NO: 75966 - DNA, 1050 bp, Homo sapiens
acttcctccaatccagaagtgactgcatttcagtggtagagttttataaacttgacttaatctttagcacttctgcgctggaattgtaccttttaagttctagagatgataaatctctcatttgttactgagtaagaaatgccacaaatgtataaaagaattcttcattaagcttgttttttctgccgtgactctggagagtaagtcactgtagaagattgtttattttattatcatcagaggccatttcattaaccagctgttctattgacaactgaatagcattcttgactagagaagaggctgtttcaattaagagtgtttcatattgttctgaagttctatcctcaaaaccattatcattagcaaaaacccctacttgctcattttcagctgaaattaagaattgcttagggacatttttagattttgtaacatcaaattcactgatttcagtgtctgtaataataatagcaattggctccattcttttgctttcttctgatttggatttctcttcagtgatcccattttctttaaaatctgattcttggctcaattcagtatcttttggcttagtttcttcagctacaatctctgtactttcatagtcttttccatttggtgcactttctagggtactgttactggcttcttccacaatttgttgatctggaattgcaggtaaaggaggaacatcagaaagtactggctgctgatggtctgtttctgaagtttcaagtgggcttgcttgctggggttgaacatcttgtttttccttgatcgtttcaatttcttcaaggattagagttcccgtttgaatagcagaatgcccattatctaatccaagttctactgaaatcactttctctccagaagttgtgctattgctcacatttgattcacagacctcatcaccatctttccgtgagatgccttcacttagatcctgggttgacttagcctttgttgcctgatcattcaatggggtctgtgtttgtatatccaaaatttcagcttcttcctggactttgatgctgcagtctgagt

SEQ ID NO: 75967 - DNA, 1048 bp, Homo sapiens
cagacactgaaatcagtgaatttgatgttacaaaatctaaaaatgtccctaagcaattcttaatttcagctgaaaatgagcaagtaggggtttttgctaatgataatggttttgaggatagaacttcagaacaatatgaaacactcttaattgaaacagcctcttctctagtcaagaatgctattcagttgtcaatagaacagctggttaatgaaatggcctctgatgataataaaataaacaatcttctacagtgacttactctccagagtcacggcagaaaaaacaagcttaatgaagaattcttttatacatttgtggcatttcttactcagtaacaaatgagagatttatcatctctagaacttaaaaggtacaattccagcgcagaagtgctaaagattaagtcaagtttataaaactctaccactgaaatgcagtcacttctggattggaggaagtcagcacagattgcagtgtaaaatgacataacatacagggagttgctaaaatggcatatggagattggagtgctttgggggaggaaggtgtatttattgagcacttatggtatgccataagctttttaatgacctctgatataacaaagtctggtttccttttgataattcagctctgtgtataggctaacatcacattaagtttttaaaaacttattttttacagtgcacatatatgtttaaaatggtgaataaggtgagctacttttgtgaatgtgatttgtaattgttacattcctaagcagcaggcttaactcaaaaaatacattgcattttcccaatttcagcagatagtgtgcagaatatgcatattgatattaaacgtgagtggtttcctagtcttaagtctcttataagcgctatttggccaggggcagtggctcacgcctataatcccagcactttgggaggccaaggcgggtggatcagctaaggtcaggagttcgagaccagcctggccaatgtggtgaaaccccatctctactgaaaatacaaaaattagctgggcgtggtggtgcacgcctgta

SEQ ID NO: 75968 - DNA, 1057 bp, Homo sapiens
ttaagatttagagttctttaggttcaaattcctatgatgttttattgggtaacatgaactctcttatacataattcaaaatttcaatccatggtatattttatggtacattttgaaaagaaaatttgtaatgctccttagttacaaaaattagaaggaagctacataaaattcaggtgtcctaattaaattcaatttgattcaacacacgtattaggcataactcatacctaacactatttgataagggagacaggctccctgccatccaagaactcaacctagggagcagtgacaacagaaaccgggttgggttaaggcaaagagccatggataatgctgcaacatgagtggcacagaggggagtacacagagagagcaattaatttggtgtggggaaggtggtgatctgaatacagcagcagtttgaaagtgttccgtttttaaataaacagtatgcttattttgatttgtgactaggtgtagaaaaaagcctgcatagtgttacatatttatagtagttctttgtaaaaatgttaagtggatgagctattatgaaagtaaaagtttcattttttctcattaaaattagtactaaattactatggatcagatgataatattaaatagtactctgtagaaaaaaggtttcaagttgaattaatttatgtactgattattaatacagaataaatgttatattgactcatgtttattcagatcttttaaaagaactgtgggcaaactatgttcatttcctataactgtaaagatcacattgatggaactactgagttcgcactaccaaaagttctactctgctaattgggaattggacagagattttacaacaacactcctaaaacagtccttcagcaagacaaatataaacacctacaatgctgaactaattcagccaaaagggcagttctgaatttgatgacatttgtgaatttgacaaaagcacactgttttcatctcttgatatactcattattttctgcattaacctatgaattgttcatctttatgatttttcaaaagactaatcaatgtga

SEQ ID NO: 75969 - DNA, 1886 bp, Homo sapiens
aatttttataccaattctgaaaaagaaaatttgcgtggcatttttaattcataaattattttcctcctcaagtttcattgactttttttcttcacagcttatccatggttttaaggttgtatatattagatcttctcataagacatattaatatgtggctattaaaatgtaacattcaattactactgtgaacttttcacaaacgaaataacaatttagaaatcagaaatcaatgtagaaatatggaaaccttaaatagttatttatagaattctaagtttttccagttatagaatcagtaaaatcaaattgaatataaagtaaatgaaatctgttttaaagcatattctaaactatcacttctgcctacatttcacatgaattcactcctaccaggattatttttaaatattttcttccatataggaaattaatagttactttaatgcataactgtatgttatacatatgttataatgtataaaaatttattttaagatataccaaatcatgagtagttttattttttaactactagctccacaacatcttacctacatggcttctctttactttttaacattgagtatacctctttttttttttgagacagagtctctctgtgtcgcccaggctggggcgcagtggcgcgatctcggctgactgcaagctccgcctcccgggttcacgccattctcctgcctcagcctcctgagcagctgggactacaggcgcccgccaccacgcccagctaatttttttgtatttttttagtagagacggggtttcaccgtgttagccaggatggtctcgatctcctgacctcgtcatctgcccgccttggcctcccaaagtgctgggattacagatgtggtatatctcatttttaataaaaaaaacagttaaagggagaagagtcagagagacattaaaaaatatttaagaaacagtaagatatacacacatagataaataagcatgcagagacagagactgagctagaactgcattgactaaaaaccccagggttgttaacttggtctagagtgttttcttagacaccttaaaaagtaatttgagattttatgaccagaggtttacatgagttgaaagagaatgatgataaaatataaatcatgtttctaccctcagcgtcaggatttttggggcttcctgggttgattttaattttctaaaaatcactgaaaaagtaatttttcagtggcacagttttcacttttttcctgatccataaaaccagcaaagtggatacattcagtgttctataactacatttaagatccatgatgttagcttttcctctataaatcaacttaactctcttttataatggtgacacttacaaagctaaaaccccaggaaaattaaagttgatgaaagaaataacagattccccggctctatatacctgggaaatagctggttaagcttcaccacaaaggatagatctaaattgtttctgaaatgtttaaatttcaaaccccgcatagtcaaggataataaaacagactcatctttttttgccctcttgttaaattctaagcttcacgggcatttgaatacatctaaaaaatttggtttgtgagccttagaatttaaccacttacaaaactcttgagctccctccacttctgaggacgtttcctgacacattcaacagcatcagcgtccaatcaggagggagctcaaagagtaatccagctaattctaaggacacaaaggttttctctaggtaaacagtttaggtaaattacaaagtggtaagtttttcttgaggattgaatgaagaaagctactggatattgtgtaaggcagttgagtttctgccttaaacaagtgagtaaaggctcctatggttaagactg

SEQ ID NO: 75970 - DNA, 1051 bp, Homo sapiens
tactgtaagtaatgttgcagtgaacattggcatacaggtatctgtttgagtccctgtttttagttcttttgatcgtttacttgatagactgttaaattccttaagagcaggtacctattttattcatcagttttctaccgctggcatctagtatagtgcatatcacttaggagtcacttgattaatgttgaactattcagaatgtatgtctgtgtttcctaactttaggcagtagattgaatacatgaagactttttgctaggccataaagttggtataaaatgaaagtttaagcctttgttgccatgttttattaaggcagattgctaggttcgaacttcttaggaagaaattgctttagtctcagactatactgttaactgaaaggccagctaggttgtgtttcatttcttgtgggtctgtttttgtttttaacagtgaatgcataaaaatacaaccaactgacatccaacctgacatattcagctatttgttgcacattatgtacacggggaaagggccaaaacagattgtggatcatagtcgtttggaggaagggattcgatttcttcacgccgactacctttctcacattgcaactgaaatgaatcaagtgttctcaccagagactgtgcagtcctcaaatttatatggcattcagatctcaacaacccaaaaaacagttgtcaaacaaggactggaggtcaaagaagctccttccagtaacagtggaaacagagctgctgtccagggtgaccacccccagttgcagttgtctcttgctattggtctggatgatggcactgcagaccagcagagggcctgtcctgccacccaggccctggaggagcaccagaagcccccagtttccatcaagcaggagagatgtgacccagaatctgtgatctcccagagccacccctcaccctcatcagaggtgacaggccccacttttactgaaaacagtgtcaaaatacacttatgccattactgtggggaacgttttgattcccgtagtaacctaaggcaacatctccatacacatgtgtct

SEQ ID NO: 75971 - DNA, 2221 bp, Homo sapiens
cagctacttgggaggctgaggcaggagaatcgcttaaacccaggaggcggaggttgcagtaagccgagatggagccgttgcactccagcctggtcaacaagagcaaaactccgtctcaaataataataataataataataatataacttggggattattccacatcagtacattaaatatgtagttttaatagagtctgccttttttttttttttttttttttgagatagggtcttgctctgtcacccagggtgaagtgcagtggcatgatcatggcttactgtagcctcaatcttcctggctaaagctatcctcctgtcacatccacccaagtagctgggactaaagcatgcaccaccgtgcctggctaatttttgacacataggaagcactataaaatgttagctatatttattatattactgatcacttagctgtctgctgcccaagccactgccaatctttagacggctaaccctgcattacatcactgacctccttagaccttggtctggctggctggtgtggaaacctcattctctttttcagtgtctgctctttcaaaggatgttctcctggccacccaatgatgccctttatactacagctaccttctgcctaaagtaccagggctctctccacagtagggtagagaagatgatgtacagtctgccacctgcctgaaaccagggcacttctgaatgtttttgctgcttatactcggcttcttggccagaattctgcatgttcttcctcatataggcttccccgcagttgttccaccttgccttttacttcctttgggaacctacattataatatgcgtctgaatccagttgagatcagttctttcttttgtgtgtgtgtgtgtgtttttgagacagagtctcactgttgcccaggctggagtgcagtggtgtgatcacagctcactgcagccttgacctcccagtcttaagtgatcctcctgcctcagcccctcaagtagttgggagtacaggtgcatgccaccatacctagctaattgttttattttttgtggagatgacgtttcactatattgctcaggttggtctccaatacctgggctcaagcaaccctcctgcctcatcctcccaaggtgctgggattacaggcatgagccactgcgccagcttaagttctttctcaggaggctcttgggccacaagtaaattggggatgtggcttgacatctattttaagagttcctgagctactgtgatgataagtcccccaaacatttgatgagagttgggaagccagtatcccctgagcaccagaggatccctgaggaggagtgacatctctagctcagccaggataccgtgttatgttattaacatttatagctaacatcgaatagcagtttccattacaacatgattttcacataagttatttaactctgaggcaggaatcagtatctcattttcatttttctaatgaggaaacaagattagaaacattgtgttcacatagatggaaaaggacaggtctgtcttcatgtgtcactcataccaagctatcttcttaccagatgaaaaagggtcatattttatggttcagcagagtttatatcagttgtcataatggaggaatttagtgttagccgtgtttgcagtgaaagtaataggattgaaaacttgaataatttcatttaaatttagatctccttgttactctgtaggtttgtgtgaactgtagacaattttgtattaataaaaaataatgcgtatatacatacacacctatctacatttatcttgtcctttttttcagaaccacaatggacactgccagccatagccttgttcttctccagcagctgaacatgcagcgagaatttggttttctgtgtgattgcacagttgcaattggagatgtttacttcaaagcccacagagcagtgcttgctgctttttctaactatttcaagatgatatttattcaccaaacaaggtaaggatgtgtttttgtaaataagaatttttaatattgtgatttatataagctttattatagtatcattttggaaattctttgttacggagtcacactaagaagtaaaattataattttttttttttttttttttttttttttttttttttggcgacagagtcttgctctgtcacccaggctggagtgcaatggttcagtgtcggctcactgcaacctctgcctcccaggtacaagcgat

SEQ ID NO: 75972 - DNA, 1035 bp, Homo sapiens
ataagttagatactgtcattgtccatattttataagtgaaatggaggcccagagagttaagtgtcttgccaagaccacgcagctagtaaatggcagagctaaaattttaagctgtctgattttagttcaagctttaactaccacgctctgttctccctcccacagagtaagttaactgatcatgctgttcttactcaaacatcttacatagttcacttcaaacacgacactactttttagtcttatattctgtatgctttttgaactgaccacatttcattatttctgttactttttttttctatgccaagctgaatccttctgttatctaactattcatattcttcccagtaattttattcattttattttttctgcctggccttgtttcccatcaagttgcctgtgtttatctccctctgatagcatgttctctaactgctctgtgctactgaatgcatttatttcatattataattatggtttgatgttttatctttcctgtgagcctgtaatcttgagtgtagcatcttgtcatttttttctgtctccacgccttgtacaatgcaggcttttacacattttttctttattaaattgctcttcaaaaatatctgttgaataagtgaagaatttaactgttaccaacagaccattaaccataagattcctgtatgggtggcttattagtgtgctatgtctcatttccctatggttcagtagttcaatataatgggaagaactggtgaaaatgtttatgatccgagggtttggttttgttttttttttttgagacaacttatcaggctagtttaagatgcttcaatatgaaccatttcattgattctaagacacgtttttcacatgctgaaattgtcaatacagatttttagtttgttaggccgggcacggtggctcatgcctttaggaggctgaggtgggcagatcacctgaggtcaggagtttgagaccagcctggccaacatggtgaactcccgtctctactaaaaatacaaaaattagctgggcatggtg

SEQ ID NO: 75973 - DNA, 1062 bp, Homo sapiens
tgctaccacacctggctaatttttgtattttgagtagagacggggtctcaccatgttgttcaggttggtctcaaactcctggcctcaagtggtccactcaccttgtcctcccaaagggctgggattacaggcgtgggccactgcgcttggcctagcctctggtttctaatatcccctgcagtcagatatttggcccttgctgctttcctgtactattgtcagaggttaccaggaatcttttggtcagtacactcgacatgtttgtaatgggcctcacccccatgtttctcttcagtgttttgcaccattgccatctcctttctgcaaggtcattgcctttcctcaatgacgatgttttcttttttctcctcctctgtcttattttgtcttttctgttttccaaagattcattcttagcttttttccctcttatttcattctactttttagtctactttattattttcatacttggttacttcagccttgtcgtttcagaggcctcttctccctctctggctctgctctctctagagccctgtcctgcttcttgtccccgctgatcactaaacatttctacttagatacctggtagacacttggagctcagagtgtctgaagtgaaacccctattcttcttcttcttttttttttttttgaggtggggtctcagaacctcttatcaagacggtttctgtacttcttctctaatgttctgggactctgcctttatatcaacacctagcacatggcagttactctgaaaatgtaatctgaaggaatggatgaattcttccaattacccaagctggaattctgagactcacctttgatttgatctctgtggtgacaagtcatgtcagttttgtgtctgatgtatctcttgtattccttccttcattcccactgcgattactttgataccatagtaggctcctagccagtctttctccatgccttttcccttgctaatattttttatatgttgctgttagagcagtctttactcacgcctaatgatggtgatgatgataatgcctagtatttattaggcactaactg

SEQ ID NO: 75974 - DNA, 1013 bp, Homo sapiens
gagagaaggcaacatttgatcacagctgtgtgtgcctcactctgcctggggatggcctgtggtgattcatggactcatgttctctgttcacattactcaggttggtaagaattgccaggtagaggaaaggggagtgttttgcattgggctgatttaaaattatttgattaactgggctgctattttaggtttgtccttattaaatacttactgtatcatggtgggctatttttcatactttgttcatgttaatgttgttgcccagcctctgatggattgatttacagcagccaaacacatgaaaacaaaagcaaaccctcacctttatagagagtttcataatttataattaggaaggagtgggtatacttgccatgaagaccactgccaatatatccctgtgctgatatgggatggggttcctcttgatcagcaccaaagattgcatgctgaacatatggaaaggaaattggacgaaagaagggtcaatgaccgctgttttcagatgtggcatggaagagactgatactggggaggaagcggcagggtctcactccttagccatgtgtatttaagaagaatgaactgtgaagaagttgatgatgatctaaaaacagagccccaaaatagtacatagaaagttaattacaacattggttatttgagagtgttggggacgtgggtggtttttatactactctgtctttgaatttaaaatagttttcaaaataaaatttgaagattaaagaattaaccagattttcttttgtctatatgagatgcatgcagtcgtttttagagatgagttccatccccactttgaatctgaagtattagaagaggcatgctctggtggacagtggggagttagcagatggaaggggatttagggaagggactggacattcttcctgcaagatggagcagtaagagaatgatgagagcttttagattcatgaaaaaggtgactctaggaggcttagaatgttccaaaggggcacttcagctaatag

SEQ ID NO: 75975 - DNA, 1674 bp, Homo sapiens
tacaatgttcctgactgtttagaagacatccaggatgcagattgttctagttcaaaatgttcctcttctgcttccagcaaacagaacagcaaaatgatatttggggtaagaatgtatgaagatactgtggctcgaaatggcaatgaagccaacaggtggtgtgcagagccaagttcaacggtaaatacaccacataatagagaggctgatgaagagtctttacaattaggtaattttcctgagccactatttgatgtatgtaaaaaaagttccgtgtccaaattatctactccaaaagaacgtgtgtcaagacgctttgggcggagttttacctgtgatagctgtggatttggctttagctgtgaaaaattattagatgagcatgtgctaacctgtactaacagacatttataccaaaacacaagatcttaccatagaatagtagatattagagatggaaaagacagtaacatcaaagctgaatttggtgaaaaagattcttccaaaacattttctgcacagacggacaaatacagaggagacacaagccaggctgctgatgattcagcttcaaccactggaagcagaaaaagtagcacagtggagtctgaaatagcaagcgaagagaaaagcagagctgctgagaggaaaaggattattattaagatggagccagaagatattcctacagatgaactgaaagactttaacattattaaagttactgataaagactgtaatgaatccactgacaatgatgaattagaagatgaacctgaagagccattttatagatactatgttgaagaagatgtcagcataaaaaaaagtggtaggaaaactctaaaacctcgaatgtcagtaagtgctgatgaaagaggtggtttagagaatatgaggccccctaacaacagcagtccagtacaagaggatgctgaaaatgcatcttgtgagctgtgtggacttacaataaccgaggaggacctgtcatctcattacttagccaaacacattgaaaatatctgtgcatgtggtaaatgtggacaaatacttgtaaagggtaggcagcttcaggaacatgctcaacgatgtggcgagccccaagatctgaccatgaatgggttaggaaatactgaggagaaaatggacttggaagagaatcctgatgagcagtccgaaataagagatatgtttgttgaaatgctggatgattttagggacaatcattaccagataaacagtatccaaaaaaagcagttatttaaacattctgcctgcccttttcgatgtcctaattgtggccagcgttttgaaactgaaaatctagtggttgaacatatgtctagctgcttagatcaagatatgtttaagagtgccatcatggaagaaaatgaaagagatcacagacgaaagcatttttgtaatctgtgtggaaaaggattttatcagcggtgtcacttaagagaacactatactgttcatactaaggaaaaacagtttgtttgtcaaacatgtggaaagcagtttttaagagagcgtcagttgcgactgcacaatgatatgcacaaaggcatggccaggtatgtctgttccatttgtgatcaaggaaacttcagaaaacatgaccatgtacggcatatgatttctcatttatctgctggtgagactatatgc

SEQ ID NO: 75976 - DNA, 1031 bp, Homo sapiens
gactttaatagctctctaagaatatgacctctaaaggaaaagatgattttttacaatacatacttctggaactttgagatttgagaaagcttccatgtatattgataaatctaataaaataaagagatcaattataaacctggttgttctataaaagtagagtgcacaaaaaaatgtcttgtgttttatactgtctaagatttggaggaaatgtggcaaattgcagtttatcgccatattttattatcatttttttctgtaaaagactataaaacttgaggattataaaataatcacagagtatatcaatggaaacagtttatcattttttcagttaaagtagtagtattgttagttgttgctgacacagggtctacataattacatgtgaattaaaacattggcaaaactgacccaccaataaacacatctattgaatagaatgccttttaatgtgaattacttgcaatgtagtacccttttcataatgaaagggattttaattaactcctaattttaaaaatataaatttgtgattctgaacactaatagcattgctctttttgttcacatcatatttaaaatatgcaaatcatattttgtatacaatttacataaaagaacaagttgccaaaagaactgagagacatactggtgagtacagatttagttgaaagcattagagcaccatgtgagctcagatttgtggggatatgttgaagtgttaagtaaggataggaacagcacaggaaccaagtgcagaattcaaataacgggaagtaggcaggggacgggtagaatacacacaaaaattaaaaatttaacagcaaaagcaggaaaagtgattcatcttacccttacttagatacaatagtttatcaagtaattaaatttgaaatccaacttaaaatgaaatgtggtatgtatattactgataggaaccagataaaagttctctaacccagagaccatcagagagtggtataaagagatcagataaaccaagtttccaaactacagtatatagtatc

SEQ ID NO: 75977 - DNA, 1019 bp, Homo sapiens
ccccatctctactaaaaatacaaaaaaattagccaggcatgttggcacaagcctgtaatcccagctacttaggaggctgaggcaggagaattgcttgaacccaggagatggaggttgcagtgagccaagatcacaccactgcgctccagcctgagtgacagagcgagactccatctcaaaaaaaaaaaattagccaggcgtggtggcgcgcacctgtaatcccagctacttgggaggccaaggcaggagaatctcttgaacttggaaggtggaggttgcagtgaactgagatcatgccacagcactccagcctgggcaacagagcaagactccatctcaaaaaaagataataatacacacgaaaaatcatgttttactgtagctgaaaaatatatgaacaggatataaaaattgaataaaaaacatttgaaaattataggtgagatgagtagggattaaaaataatatgactataattatagaatgcctatggaacaattttatgaacatgccaaggatatgcctaaataattgagatttttgtaagtaatgatgagagaggaaaaagtaattgagatattatcttttatattctaaaaaaaagtaggaagagaagctggtggtggttgacaactttttccctggttaaacaatactcatttctctaagtcagtagttaaggaactttgtatttaataaatttctggaaaatcttccccaaaaccagtttagccattgtaatatttaaattaaacataaaacttgtgtcgttgttaacaaaaagccaaatcactaccaaaagaaaaaaatctgagtgtatgtgcacacatggttaagaataaagaaatctggtatacctaattttaactgggtttttatcatgaattaaaagttaaaacatttttcttttcttttttttttttttttttttgccattcatctattttgatcagttagttcctcaactttccttactactcccatctcctttgtaacatatacttctcagtaataaatgg

SEQ ID NO: 75978 - DNA, 1095 bp, Homo sapiens
agaattataaaatggcagtatttatagagatcttaaagataatcattagttgaatttcagtttgctcaagggccctcaaattagaggctgttattccatcttttcttcaggccaacattatctccttaagataatctacaacccttgtgaaggttgttcctgggtagagactgagaggattttaggaaaattcacgagttggggtttttttccctagtaattctgcaaaaatgtattattgctcagtctccttagggcaggtctaacacccaggcacatagttttaggccgtatcttattcacctttgtatctctagtacaaatattttcagatatgaatttgtttcaacttttggtctctgcagtgtcatttagtacagaaatataagaggtaggcagtgtatcttcctactataaagaaaaaaactaaattttttttttgttaaataatgtgtctcaggtcacttttaataaatactaagctagtgatttactactgctttccaggcactcttctgggtgctaggaattaattacagaggatttgacatatgttaaagctcttgttttttccaccatttaatctgtggagccttagtctttggattttaaaaatactttgaaacaccctagtatttataatctgccaaagagagagttcacttgttgaaaatcagcaataatttctatgtaagactaatagactttgtttcaactgttgatatggtttggctgtgtccccacccaaatctcaccttgaattgtagctcccataattcccatgtgttgtggtgaaagataattgaatcatgggggcggtttctcccatactattctcgtggtagtaagagctgatggttttataaggggaaaccccttttgcttggttctcattctctcttgcctgctgccatgtaactggtggtagtgagtaagatctgatttttttttcagcatccaaaatctttttattaagagggtaggatccaaggttagtttttgtagcctcggctggcctgtcggcctctgatgcactcgaacttccagcccttggagcagacatagggtttggtgtggctgtgcggggttcccggg

SEQ ID NO: 75979 - DNA, 1242 bp, Homo sapiens
ggtaaggaaaacaaaatcaccatcaccaatgacaaaggtcgtctgagcaaggacgacattgaccggatggtgcaggaggcggagcggtacaaatcggaagatgaggcgaatcgcgaccgagtcgcggccaaaaacgccctggagtcctatacctacaacatcaagcagacggtggaagacgagaaactgaggggcaagattagcgagcaggacaaaaacaagatcctcgacaagtgtcaggaggtgatcaactggctcgaccgaaaccagatggcagagaaagatgagtatgaacacaagcagaaagagctcgaaagagtttgcaaccccatcatcagcaaactttaccaaggtggtcctggcggcggcagcggcggcggcggttcaggagcctccgggggacccaccatcgaagaagtggactaagcttgcactcaagtcagcgtaaacctctttgcctttctctctctctctttttttttgtttgtttctttgaaatgtccttgtgccaagtacgagatctattgttggaagtctttggtatatgcaaatgaaaggagaggtgcaacaacttagtttaattataaaagttccaaagtttgttttttaaaaacattattcgaggtttctctttaatgcattttgcgtgtttgctgacttgagcatttttgattagttcgtgcatggagatttgtttgagatgagaaaccttaagtttgcacacctgttctgtagaagcttggaaacagtaaaatatataggagcttaaattgtttatttttatgtactactttaaaactaaactgaacattgcagtaatgttaaggacaggtatactttttgcaaacaaatgcataaatgcaaatgtaaagtaaagctgaaattgatctcaaagttactgtcttggagttttcaattttccttcctttatattttacccatattcgtcttttaagatgttagtatgatgtgaaatttatctaaccaatcttgtttaattcccagatgagggtgctgccttgaattccaacaacttaaggggagaagaatctgggtaaacttcacccacccttaaatacagaaacctgacttggggtcttcctagtgtactcacactcctacaacttaagtgtccaaatgaaaattcacctgaatattccaggaaaatatgagctatattctggggttaaatgtaaaatgagcctttaacaaaagctgggcagaagttgtcttataattgcc

SEQ ID NO: 75980 - DNA, 1070 bp, Homo sapiens
cataccatgcttccataggggaaagtgcatgaggaacagcctgagggaggaaatcttcagttctgttttgacgggtaagcttgatatgccgattagtcacccaagtacagatgtgtgcgtctagggagagatgagagctggaaatacagatttggaaatagctggccatgggaccagatacaattacctaagaagagaatgcagatagggaaaaaggtaaaggacccagctttcaggtcttctacgtgttagaatgggcagaggaggagcaaataaaatgcattaagttccttgtggtctccaacaacccaaatcagcttcagaatgtgctaacagccagcaagatatcaggaaaacccagagcatggggagtcatgggacaaaaaactgtgtcatcaagtagacaatgggaagctgagtagaaatgctgcagagagaaccagtaaggtgagaacagagaagcggctctcagacttgggaatgtggcggtcaaccatgcaggctcagaggtgtgcagccttcctgaaatgggctgagtagagaaaggcaggtgagaaagcagagaccaagactatggacaaatcagttccatagtccttggatttgccgagcagggaaggaaagaaatagcacagtagctagaaggcgttgtgggtcaaggaggtgaggagtttggggggttattttggcttttggcttctcagagacaggagatactagaacacatttgtatgctgatgcacatgacctagtggagggggtgggtgggggagaactgctgatgcaagagagaggggatgcttggaggaaacgagaccttgaggaggtgaggtttgggatggaaagcacagggtggggttgccttgaatgggaaagcagagcaggtgacgctgtttctccagttctcctgaggctcttagatgcccaggggacccctttatgtgcatcacttgagcaacacacagtccttgaattttcagtagaagaatcccaggtagcaaaaattcttaacccaaagaagtatgtccctaatggtggactttcagagactgcataacgaagacatagct

SEQ ID NO: 75981 - DNA, 1025 bp, Homo sapiens
gggtaggttccttaatctcaagctgcctcagtttccccatccaagaagttgggagggcaatagtctctgcctcctacgtgtgtgggaaggatggcatgagatgatagatacaaagccccaaggagtgtgtgattattggctgatcactaaggatctagaacagacccctggagaggatccttgactctattcccagccgtttaaaagactgtctcaaacttatcgttaaatttatagttctgctttgagtcaactctgtcaacaacacatggtgtctatgttaaacatctcactgacacaatattttaggcataatgtgaaaattgcctcattctatcacatttttatatcacaaaattatatatcttatacaccagctgtggctgccttgcacacaatacacatattcaatcacatggtttgcaaacccggatgtggcttatgagaatatttggttcttggccttttgattaccaaatgctccttatcacataccccagagcatatctgtgcctaaattttgtgttactgtgccagtttaattcaattcaaataaattgcattccattgaactgaacattattaaggacctgtgctaggcctctagagagacaaataactcttgttccctgcctttagagatttcacagactaacaaggaaaggaagaaacaaaaatagctccttttactatcaagtgatagatgccatatttcaggtgcaaattgctatggaagcacacactttgattgatggtttttgcctggggaaatcactaaaggctcacagaagcccacttacatgagcttgcagaaagtcagggagagaagagggcatttctcaaggtgaagctgagaggggggtctagggagtgagagtttctgccaagtccagggacaggcactcgtggctggagcacagagcatgatggtacaggcaaaagtcacctgccaatggtacatgggtcattcattccaggggctggttgcagcgggtgatactccctggctctgctagagccctgtt

SEQ ID NO: 75982 - DNA, 1003 bp, Homo sapiens
actaattatggcccacacccgcttccatctgttgtggtttctgagctaggaatggaagtgtagttggatgttttatcatcactttggaacatgggcctaaaaaagcacaaccttccctgtaatttccacccctctaggcttctgttcagccttggtttttgctgaaacagcacattaagcaaagaatagacaagatatgggtcattttcagaagtgccacccacctccctatcttattagaaaagccaatcaaatgacggagccagtttccatctttaatcatccatccatcaacaaggaagcagatatttaccccatacctgccaagatgccaagaggccgtgggagattcacaaaggtagaggtctgccctctgccccaagtagttcaccacctagactgtgcagtcagaacatagtctcagcatagacccatgaagctgatcaagaacagatcaatactcaacccaggagaagacgcacagcaatatggagttacatttgttgcatatgcggtggacagctttacaaactcagagcagtttgaggtcactgtggcctggagggctcatggaaggagaatcagaagagctctttgaactgagtcttaaaaatcaaggaagagaggccggtcgcagtggctcacgcctgtaatcccagcactttgggaggctgaggagggaggatcatgaggtcaggagattgagaccatgctggctaacatggtgaaaccccgtctctactaaaaatacaaaaaaaattagccgggtgtggtggtgggtgcctgtagtcccagctactcaggaggctgaggcaggagaatggcatgaactcgggaggcggagcttgcagtgagcccagattgtgccactgcactccagcctgggcaacagagtgagactccatctcaaaaaaaaagaaagaaaaaaatcaagcaagaggctgagcgtggtggttcacgcctggaatcccagcactttgggaggccaaggcaggaggataac

SEQ ID NO: 75983 - DNA, 1067 bp, Homo sapiens
gcaggtggatcgcttgaggtcaagagtttgagaccagcctggacaacatggtgaaacccccgtctctactaaaaatacaaaaattagccgggcatagtggtgggcgcctgtaatcccagcaactctggaggctgaagtagagaatcacttgaacctgggaggtggaggttgcagtgagccaaggttgtgccattgcactccagcctgggtgacagagtgagactccatctcaaaacaaaacacaaaaaaactcattggtaattttcctaatgattgtcgtttcttatgcaaaaattgtattaattttaaagttaattaaaaagtcaaacattcctaaaaagttttttttttttaaacagaccactttaacccctccaagatttggttggaggggcaggcatcaggcaggtaggagatgctaggaaatttgaggggaaacttttattaagtctgtcctttgcctattggctaactttaatggggattgctaaatgcctactgtgtgccatgcgatatgatagacactatgtatagattgtattatttagtattgggccattttatggacaggaaaccaaggcttagcacagtcaacttgtccaaagtcagctaacttacaagcagtagccaggattcaagaactttctgcttttctacttgaccacactgcaacataaccaacataacaaatctaaggtaagtgactagttgctggaaatcccccagtctttgtccgaggtctttattgaaatgcaaggacagaattatagttaattcctctgacttcctgggttctcaaatgctcccatgtgggaaatgctatacgtacaaggatgtcctatgactgtacctacaatcaggactggtgttcagacatggggacttccatgtggactagcaatgccatatgctattcaaaagggggatttgctcagcccatgggaaacacagtgaagccctgattccgactgcatgtccttttttattcccaacacacagaactcagtactctttgccctgttccctgtgcacctcctggtggctcttccttcccgctctccttcctg

SEQ ID NO: 75984 - DNA, 1081 bp, Homo sapiens
gtctcccaagggttttacaatttgctggctatgtcccacgtgtgtgccacaaggagacgttagataccaggagccattgttggatgtttaaaacaccctggtcttaatatctcagccccagagtaaacatttgccttaccaaatccgcagctatcccacggtcactgtttacgctggaagaggccaaaggccacggcctgcgggatgaccagggctggagggggaaggctcctctgttgcagaggtatgccttgcccgttctcttctcccagctcccagaaccttgtgaaggctccagctgtaagccaggggtgctgccacaagcccaggccgccctggccttggagggttaaaagtgaagccctctggctattctctgttgtgttgggggttgcagggactctgggagggtgttgcttttgcagctgcactgagggctgtcttcagctcctcatctgtgccccctcccccatctcaggccgcccctctggcccaggccactgctctgtcccgcctctctggccagctgcaagtccacaggcctttgttccgtggctgcaaacccgccctactccatcctccctcctcagcagaagccctccagcgggggccctggcagctggaaatcacaactgccaggaggaaggggctactggagcccccagcggacctggcagatcctcatttcctcttgtcaagctcatctgggccccacaactcacctctggccagattcccacaccgtcttttctcatctctcctttcttctgctgaatggacggatcaccttttcctcccagtactcatgccccttagttctattttaaagtactctattcattcatttaatagttaaggagttagcacctactatgtatgaatgccagatgcagaagacacagcagtgaagaaaatatacaataattattgacccagtggagctgactttagcagaagtgacaataaacaagattgaaatagcaagtgtgttagtgataaacagaaataaaaaatatgatagggaaggtaggtgtgaattgtcatggaaggggtgaggtgacagtttagatagggtggccag

SEQ ID NO: 75985 - DNA, 1010 bp, Homo sapiens
cagccccaagcatgttagtgttgggtgacctgaagtcaggagaaagaaaactggacaacgtggactaaactgatcagcagggggcccatctagagctgctggtagcccctctgtctgtcagctgcctggggataaaggttggccatgctaactgggttgctatctggggacaggaatggtgctggactcatctttgtgcccagacagcattgagaatggtacaaagtgtgatcaacagggagtgatgggcttcagccgtggtcccacccttagagtaatctgggcttgtggtctcatttgctacagcttttgttccatgggattagggagaagaaggtagtgttagggtcgagtccagccctaggtgggctgttgccatctgggaatgcaagcactagggagaagagggctttatacagttctggcggctggcctttggggagggagccctacgtaagctcaaggaatggatttttaaggacttgcactctctttcatgctgagcagacttgggctgaacacaacccaaatagggttctcgtgggcacagtggtagctgtgcatgcagccttttgtgaaacacagtttgagggtcctagaagttgatctgattattgccagaatcggagctgggactggaagggaaagatgcaggaggaatgaagtcgattttaccttgggaacagggtcccaaaaggagagatggtttctacaggtgccggaagctcttaaaaactcacatcctttacttcctaggctgtgagactgtgtgtgtgtgtgtgtgtgtgtgtgtgtgtgtgtgtagtattagaaaggaaccagtattctcatatagcttctattccttcagttcattgctacatccccagtgcctgttgtacagtaggattccaataagtatttgttgaataagtaagtaaaaccctactgtgtgacgagaccttaggaattaaggaaatgctcacactatgaatgttctgttcctgacagagaatgtccataagattcta

SEQ ID NO: 75986 - DNA, 1056 bp, Homo sapiens
aaggaggttattcccctgccctgtctcctccctggtgggcagcggaccccgaccctggcacccaccacttcatagttcagagcagcaggagtgtggaggtcggggcagatcgactgcaaatcaaggcctcacttttcaaggagtagacgctgcttcctcggccgtgtctctacacgtgtgcaccccagaattgggattgggtaatactgccccaccggtctgaattctggtccatgtacgctcccagctgaggcaggaagtgcccctcctctacccaggaactggttggatgagtttcttaggcgtctctggtgaggccccttagtaggggaagcggggaacatgggggatgggggaaggagctatgggtagagaggggccccctgggccctgtaggataggggaagtgtgtgtggccctgctggctgaagggctggccgcctttgggaatttacacgtgtgtgtgtgtgtgtgtgtgtgtgtgtgtgtgtgtgagtccataaggtctgctttggaaaatccactttcctaacttctctgggtcaggcaccaagcccaaggtcagagcccagggcaaagaaaggggatgtgttggagctcttctcttgctgtatcaccttcgaagaagaggcgaggcctgagggagggggaaggccagggttgtctacataactttctgggtttggatgctcatgcttggaattgggaagggagttgtgttttagggaattgccctggcagccttgcctccaagccaccattctgatgggcttgggaagggaaagtgagaactgggggaaggaaaaaacccttgggtagtaagatgcacacaaactcctcccccagcccagttgagagctgctggcctgaaattcctctgagagatttcttccatttaagaactggcatctcagttttctagggtaggtgttctcttcctgctcctagaggcagttaatttaaatgtagtttcatctcttgacgttcatattgggtctcatttcttccccctttgcaagggttggaatgggtctcattctttctagctaatgttcc

SEQ ID NO: 75987 - DNA, 3089 bp, Homo sapiens
gcccttagaagatcatggtctatatggatgttgagatcatagaagatggataaacacacgggtggtgggggaaggttaggtcatgctggttcaccaagtttaacttgtatcattattattaatttgagatgtgggtcaaacatggtaggtacaaggcagaaaaatctcattgtcttgatgcttgcagaacaaataagtgatttatccgttatcatcatcaccaccaccaccattctcggtgggcttactgtgtgtcagatgtacgggttacttacttgtgtcatctcaaccttggagacaacccagtcaggttggcagtattactgtgcctattttcctcatgaggaacttgatgcttggtgaggtgaagtgacttgcccaaggccacatacagccaggaaaagtggagggcctggaagtcaaatggggtctgcctgactccacagcctgtggatgagtttactgcatttgacctctgtgggctctactgcatctgtgcatattctcttttctgccgaggaagcagagggacccagtgggggcccctccacacccacttggttcccaccgagattctccagtgcctttgaacctgaggcagtagtaaaatgcagcttcctcctacccacccaccccgctccagcctagaggcctcaaaacaagcagcccctgaaatggggatgaggccggaaagatggcgaatttgcagggctgggttcttgaactttgctggtaagtagcagcggtcctgtgaacctttttgacctcaagatgagagaggtggggcctctgggaactttggatctgtctgtgatttccagggggtaatttctagtaacaccttttagggctttctttggctcttccggttttggggcacattgcatagtgacaagttgtgctggcagccaagttacctctacactggctgtgaacaagagcaatttataataaacaatacttgcccccatttggctttagcatatgtttacatgaaacttcctggcagattgcttttcctgggacatttgcagggagaccagatcatcacagccccttttctaaacttggctactttccccttcctcccagtctcttgtggctggtcacctagtatgtagcccagcggggcagctatgccgtgctctagctccctgtctggggccaagtaggatgggactaccggggtgaatgagcagtcatcaatcctggcgcttcttggttgatcggaaacttgctggcagtgactaatgtggagactcattaggctaggaggaactggctttggtcttgacctcacccactgtttacctttctcttgactgtgtgagtggtgagctcatcccggcgccatctcagagtccttccagcaggcatttattgaacacctaatgtgccttgctctctggggctgaagggaaggtatgggaaagaaggcccagcccactgggttttactgtattgtccagaagagatgcatgtacatatcaagccccaagaccaatgctttaagtgatagggtgtttcgagttcagaggagtatattacttccctattgccactgtaacaaattctgcaatcttagtggcttaaatcaacacacatttgttgtcttaaagttctggaggtaagaagtcagactgggtttgcatggctgggttccttctgcaggatccagggcagaatttgtttccttgctcttcctagcttcccaggctgcctgtatccttggcttgtggccccttcctccatcttcaaagccagcagtgtagcatcttccagttcccttctctctgtccctctgcttttattgtcaaacttctgtctgactctgactcctgccggattcctcttacgaggagccttatgatcacatcaggcccaccgggctaatccaggataatcttccatcttaaaatccttgatttgatcacatctgccttctatgtgtcccttttgccatataaggtgacattcataggttgagggtcaggctgtagatatccttgggtgggggcattattcagcttacactagtgtgtatgttgggaaatggttgaggaggcctttctctgaaggagatgattgctaaatgtgtataggcagagggtctggggacacattccaggtttgggagacaacatgggcacatgttgggtaggtggggacaggggggtgtagatgaacagccctccctctgagctaggtgcctggctttcctttccttccaaggtcaggccgagggaactttctggacttcagttgcaggcccaggctttctcctggagtccatgtgggagggctcccctggcaacacaatccttttccttcctggcagctgtggtcctgctgcaagggacccagccagactacatgggccctgctgctcttaggtggtgggaaaatgcattcctgagggaaaatgaatttgaaccagctgggctgggtttgggtggcccagaaaccttggtcacactgttggcacagcctctgcaggcagtcacgttgctcacatgcacacaaagtcactccccggggagccttctctcgcgctttattacggtgctcagggctgctgaatctccaggagggatgggaggggtcagagtgaggaaactgctgggaaagggggcaagggtcccctaggagggggtcctcccctcccccaggagagcccctagggtgcagggagcagtgggaacacacaggcaagagctgggcctctggggacagtttgggagccgggtggcccagagtggtgccgagctgtgggtaagagcacagccgagggatttcaccatcttagttgagatcttagttgagagagatctctctctggaagttcacattgctcccacactgttttttctggaaaagttatagcttttctctattgcttccttctggcaccctttttgaagggattccgaaagtgccgtcttggggattgtttgggggaaggacaaaagccgctgggccaccctggctttgagagcccttggaatgtttagcagatgatgtagttgagggatgaaggccacacaggagggctgcgccatcgccgttcctgagtgaggactttctttctt

SEQ ID NO: 75988 - DNA, 1024 bp, Homo sapiens
gattgatgactgactggattgattcatgttgcaagatggaagaggtcatggctggggcatacttaagagaactggagacccgtatgtggtaggatggggtaggcgtgggtacctggtttgagggtttggttgctgcctgcctcatcacctccttctctggcctcctacttccctagcagacagggtcttccgagatgtgtttgaagacctgagttctcatcctggcttgggggaatcttatagtatggagtggtgctcttcaggtaggaaggaaaggctgaccccgcccggggagcaccaggggaggcactttaactgtctctgtgggagtctgagctacacacacataatggttccaatccggtgtcttagggccagaatgcactccagctgagtgcagtgcactcagaatgcactctgagagcgatgcctcttatccgtcaccatcaaacggtgcctcctgacagtctgcactagtgtcctgctttgtactcagtgcctcatttgttcttcagccctccctttcttgggctcttggctcttttccagcaagtcctcctgcccaagagagagagagccttgtgatcgtgggtctcctggtcactacagggcttctctcgtcatccaagaagtttatagtccaatcctggtgacctcatactttctccctcttcctttctgcttacccatgacctgtgatcctttgaccgggaatctgtattttaccatattgttccagccagagaatgaatggccaaaggtcacatagtagcaggcccaaaaactgccctaaggaatcttgactcagtccttccgagtgtcatgtcataagccccaatccttcaggtcttcatatgtcccctgcagcttatgctgaagcaaagccatggcagccagggctgtgaccaatcctttgcttgtggccctgtctggtgtgtagtccattagggaggcagtgggcaggagagcatgaactctggagcctcagtgcctgagttcaagtccaggctctaccacttactac

SEQ ID NO: 75989 - DNA, 1049 bp, Homo sapiens
cctgcctgggaagatggctctagagagcctgtgccacagagactgaatggagtgaagacatgggctctgggcctggccccatgcatcccctgccctgttgtttcctggctgtgcggagcctcaggttcctcctctgtaagaggaagcgacacctaccttgtaggtgaagggcacggaagggcagctgtgtggctgccactgaggaagccctctgccccactggctcagggcgtggattagtttcctagggctgccttaacaaatgaccacacactgggtggcttaaaacagcaaatgtgttctcactcagttcaggaggccagaagtccaaaaatcaatgtgttggctgggttggctcccttcagagcctctgagggagtaggcattctatgcctgtcatccagcttctggggtcctggcagtctttgacattgttggcctggagatgcggcccagcaccttcccatcacctttttctttgtgtctctctgtgtcctccttctcctcttataaggacagcagccactggatttggggcccaccctaaatcctatctgaagtcatcttgagatccttaactaatggcatccacaaagaccttatttccaaataaagtcacattctggggttccaagtggacatgaattttggggtggacactgtctcacagtaggcaatgtccgtgaagtggtgttacagcagggccgaaacgaggtgtggctagggaaggtagtgggcagggttgtgccgggggctaggttctgaccacctccctccacgcaggactacctcttgaagatcattgacacacccgggctgctgaagccagaacaggtcagcgccctctttgggaacatagaaaatatctacgcgctgaacaggtgtgtgaatgggcctgacactcaccatgttctgcctgcgaggcccacctcagggcctagggaggaaccctggatgtccctggtctcatgggcctgtgacatgtgggcctggggcctgatctctgaggacagggaagggttgtccatctctgtgccctgggctgatct

SEQ ID NO: 75990 - DNA, 1032 bp, Homo sapiens
tatttttgatctcttcttagagccaagagtttgatatctacactcagtattgcaacaattaccccaagtgagtaattggggtgagagggaaggcagagccatttggtgagtccagagccccccacttcctcatccaggccttccccaggtggtgactggcccttctcccactcccagctccgtggccgccctgacggaatgcatgcgggacaagcagcaggccaagttctttcgggaccggcaggagctgctacagcactcgctgcccttgggctcctacctgctgaagccagtccagcgcatcctcaagtaccacctgctgctccaggtagcccctcggtcctcccaagcacctagggcctggggagggcagggccttcgggtcaggggcacctaagcgtctatcttctgcgcaggaaattgccaagcattttgatgaagaagaggatggctttgaggtggtggaggatgccattgacaccatgacctgtgtggcctggtacatcaacgacatgaagaggaggcatgagcacgcggtccggctccaggtgctctggggctgggacgctgggggaggggcagggctgggtgggccaggcttccgctgggaagagggactgtggccaccctgctgggatgagctgggcagtggcattgggggagcctttgtggcagggtttgcagagcctcctaaggccccagtggcctgactctagggattggggcccctctgctgcaggagattcagtcactcctcatcaactggaaggggcccgacctgaccacctacggggagcttgtcctggagggcacattccgcgtgcatcgcgtgcgcaatgaaaggacctttttcctctttgacaaaacactgcttatcaccaagaagcggggcgatcactttgtctacaagggcaacatcccggtaaccaggccctgccccatctcctctgccatcttctctccttcccaaaggatctgggctccccttcttgtctgcttcttggggctccagcaccacccttctgagatcac

SEQ ID NO: 75991 - DNA, 1135 bp, Homo sapiens
cacatggtaaggtaataaccaggtgtgtttccttccccttcaggccaaggaagccatcttggaaatggattcctattgtaagtgtacccttttctgcctgttttgtccctaatcgtgcacattgctaggtcaggctgcatcctggggaagctttacctgataattttattccaggagcagggagggcgggggtctcctgttaagggctggggggtgaactacatgattaaggatgctctcctgctgagcggtgggactctcagtgcctgaagctcccagctggaagatggagggagctctggaggctcctggccctggagctgggtgggtatagaggtctggctggttatggacagggtctagggtaggccaaggccaattgggaatcaaaagcttgatcgtctctctcctgggtgcagatcccaatcggtaccgctgcagcccagagcggctgaagaaggcttggtcctcccaggatgaggtgtccaccaatgtgcgccaggggcgccggcaatctggtaagagaagggctgtggaggcaggaggcctctccctcacacccttgcccagactggggaccgtctgcggcagtgtccagggctgtggctctcacctctgcggaaaccctgggaaaggctagagcggggctggacacacacctggggctcatcctctccctgtgctggtgctccccacaccaggtacccctgggccctcgttgcctaccaggtctggagcccacctttttcttacttttttcttttcttttcttttctttttcttttttttttttttttgagagatggagtcttgctctgttgcccaggctggagtgcagtggctcgatctcggctcactgcaacctctgcctcctgggttcaagcgattctcctgcctcagcttgccaagtagctgggactacaagcgtgcaccaccacacccaactaatttttgtattttttagtagagatgggatttcactatatgttggccaggctagtttcgaactcctggcctcaggtgatccgcccgtctcggactcccaaagtactgggattataggtgtgagccactgtacccgtccagcccacctttttcaaggccctaggaatacttgctcgctccggccttggca

SEQ ID NO: 75992 - DNA, 2435 bp, Homo sapiens
tatagtcctagctactctggaggctgaggtgggaggatcacttgagcctggaaggcagaggttgcagtgaatggatatcgtgcccctgcacccacccagcctggctgacagatgagaccttgttgcaaaaaaacaaaacaaaacaaaacaaaaaaagaaatcaatctgttgaacttgtgggaactgtagaccacaaaaagatcaggaaagtcactagggagggacttgggccacatgcaggcactttactgcctgggctcagccatctactctgacttccttgaggttttttctgcttctgcttcccactcagagagctgagatgagctgacaagtgtattctattgataattaagttctattgtttaatttaaattatgtctcacttattaaatattcttgataagttttaaaatgaaagaatagaacattttctacttttcactttaaaaacaattaggcatttacttacattgatacagatagtgtatgtatgttgtgtgtgtcagcagaaaagaggttcttcaacaggcctgcctgctgaggaacagcaagataccttggtagactttccttctgactccaggtgtgtagcaaatcatggcgatccctgggcctcccacttaccgccagctgggcaaggatatggataggcgaaggccgaggctctgtagaactggaccttgagacaaggtcctcttattcctgccctccagtctcaggtgtatcctcaaaaaggctggggtacacggtgatgacaccattggcctaatggatgtgttttgtatcctgtccccagagcctggtcactctccgtacagccgggcaactctccccagcggtcagcgaggcttcgtgatgcccagccttaagggccgtagaaagtcgggtgcgacctctgctttccagctgggatgctgtgaggggcttggcagtgggtgtagctgatgcgctgatatgctcattgccagggaggcaaggggcttgaggtggagccagggacctccggagatgttgctagttggtctgaagggggtagcatggaactgagtcccctccctatggctcctgcgcgagggccctgggccaggtgccctaatgcattgcatcatgggtggtactgctccggcagggctggtagtcacagcgggggtcctggagatggatgggcccgcctccctgtccgtaggtgcaagggggctcgccgacactgtggaaggcagcttccctggggcctatgactgcagggggccaagccagagtggactttgagctggtgatgggctggtggcgctgtgagcttgggacccagccaggcacagcagtttcctggcccgcgctgactctgctcatgctttcctcctcagagccaaccaaacacctgctcaggcaactcaacgagaaaggtgagtgtgtgaggtggccagccattcccagtgagcgggggaggaggagggaggaggggaagcagccgacaacctggggtgtgacctgagggtggaggattgtcagaatagtgtagagggaactctgcctccattccccccagaagagggcctcgcccctggctggctgaggagaggggctggagctctcccccatgcacaggcctcatgccctttcctccggaaacaatgagagccgagcaacaggcacagacctgcgctgctctgtggcccctgggcccctgctctgtcagtcattcttttgaaagcccaggagactaggtgagggttctgggagcaggagcccccagtgaggacttccccagggagctgtccagaggtctttttcctgcttactgatctcttcccctcccctcccctgcccctcgcccgtgtgctgggggacccggtggtgatgtctgcagcccgagcagcaggaatgaaggtaaaggccagtgggaggaggggactggctgacagaggagggtgggactgcccaggtcagcccccggccccttcagccctcattgtcttcattcattcaacaaatgcctactaagcacccactgtgtaccaggctgtgtggcttagggccacagagatgaataagacatgggccttgccctgggggcccttctgcaccctctgcctagaacagcaccctgctgggggcctgcccagtgtggacctactcagatttccctctccctagggtagacaagtaggcaggcctgtttgggttctgaagttttgaccaggtcccagcctttccaccatgagaatgcccacccctccctggaccccagtggcaacctgagttgggcatctaggtgtggctttctgtgtgaaggctccccccccgcagctgcctgcaggaggacgggaggttgcccaagaggctggtcacgagggggtcttgtgctctgaacagcatgcaggcagtgctggaaccctcctggactttgggcagccctcccgtactcggggcct

SEQ ID NO: 75993 - DNA, 1116 bp, Homo sapiens
ttcaggtctctctggaggacctgacagggcatgaaggcaacgagaagggggctgggccggagcccccaggctcagaggaggaggaggaggagcaggaggagagcctggcggtggcggagcaggtagccgactttgccagctccctgctggccgccctccactgctggcactatcgggccaacgctttacttttctcccggggcgctatggtgaggtgtctcttcgatctcccctcctccttgcatgctccctgggatgtgcatgcccacccgagggccccctctgctgccctcctcaccccaccctgccctggttttactcctcccctcagcacttaacaccatcgctcgctgtcacaccctggtgagcccctggcatgctctgttccagtactgggcactaatcaatataacgcccaacaagcatgacaagtggggtggggtggtgggggcagggagaagctagcacacagtggggctggaaaggtcaagtccactttggagggacagaaaggtgggctgaggttttttgaagctgcatgcctgacaaggctttccgcagccccaggcctggcagttcaggttggctctggaatggctcaggtccaagactggctctcagctcagcccagccccttggggcgtgggaggcactgcccgtgttgggatgcagaagggatcagcttccagttgtcttggagttgatgactgacctctacctctgcagggaaaggggcgcagggagtctgaaagctccaggagcagcagaaggcccagtggccggtctccaaccagtactgagaagcgcatgagcttcgagtccatttcttccctgccagaggtgagcgaccagcaggtgggatggggatagtaggaagaacttggagtccagattttcaagtctgcaaatagggctttcaggcacaggctctcccactgggcccatgggaacagagattccccacctcccaggactctcagccctgcatgaagcctgtttggcctagagtatatggtttggtgagcagaccacccctttctatgaagtagagaaaggctcccctttgggcagatgcagtcccatgtcaagggcacgcagctagtggaaatgaaccag

SEQ ID NO: 75994 - DNA, 1052 bp, Homo sapiens
ggacatcagtgtgggggtggccacagaggacagcccttctgtcaatgggatggagcccccaagcccaggctgcccagtggagcctgaccggtcttcctgcaagaagaaggaatcagcactctccacccgagaccggctgttgctagacaagattaagagctattatgaaaatgcagaacaccatgatgcaggcttcagcgtccgtcgccgggagagcctctcctacatccccaaaggactggtaagaaactccatctccaggttcaacagccttccccggccagacccagagccagtacctccagtggggagcaagagacaggtgggctcccggccgacttcgtgggccctgtttgagctcccaggaccaagccaggcagtcaaaggggacccacctcccatctcagatgctgagttccgcccatcttcagaaattgtgaagatctgggagggaatggagtcttccggagggagccctgggaaggggccaggccagggccaggccaatggctttgacctgcatgagccactcttcatcctggaggagcatgagctgggagccatcacagaggagtcggccactgcctccccggaaagctcctctcccactgaggggcgcagcccggcccacctggcccgggagctgaaagagctggtgaaggagctgagcagcagtacccagggggagctggtggccccactgcacccccgcatcgtgcagctctcccacgtaatggacagccacgtgagcgagcgcgtcaagaacaaggtctaccagctggcccgccagtacagcctccggatcaagagcaacaagccagtgatggccaggccaccactgcagtgggaaaaggtggcccctgagagggatgggaagagccccactgtgccctgtctacaggaagaggctggagagccattaggtggcaaaggtatgacagaagcggcaagtgggcccttccccaagtctagggactgaagagtcaataaggagccacttggctcctcggggaaagtgacctctaaggaggctctaccaaagggagaagctg

SEQ ID NO: 75995 - DNA, 1829 bp, Homo sapiens
cccctcagccccacagagaccttcagctggcccgacgtccgtgagctctgctccaagtatgcctcccgcgatgaggcacgccgagcagggggcggccggccccgcggcccacccgtcaacaggagccactcggtgccggagaacatggtagagccacctctgtcgggcagggtgggccgctgccgcagcctgagcaccaagaggggccggggaggcggagaggctgcccaatcccctgggcctctgccccagagcaagccggatggaggcgagaccctgtatgtcactgcagacctcaccctggaggacaaccggcgggtgattgtcatggagaagggaccccttcccagccccactgcagggctggaggagagcagtggccagggaccaagctcaccggtggccctgctggggcaggttcaggacttccagcagtctgcagagtgccagccgaaggaagagggttccagggacccggcagacccgagccagcagggcagagtgagaaaccttagagagaagttccaggccttgaactctgtcggttgatgctgactcctgggggagggaggagtcatgttggaggttggggaagaacctgggcatccttcccctcaagcctgggctcatggagcccctgcccagggccctcaggtgggcggaaagtccatcccctccgcccttcaggaaggatgctcccgtgtgcaggggtctcctgcctgtgccatccactggggctcgagacaatttcccactcacctgtgaggccggtgtggctgcttcccttgtaaatagttgttctctggtaagaagccaaatatttaagctcacttcttcccagagagaggaagctctgctcaggcctccagcgttggctggccatggccacagccagatggaggagcccatccccaggagactcaggcagtggcctggagaggctttgttctgtaacggtgccttttcttagggtccaggcaggaatgaagccaataatttattgctttccattctgtggtatgatgtgcgtgtgcgtgagtgtgtggcccctgtttattcccctcctgtcaagaatgaagtggattcagttcaggtacttttgagggttgttgtgctgaccctgtggttgtcgctgatgtacacacatttcattatttgccaatggtgcaataaccactgctgaccaacccactatgtgtgaactccttcctaggcttggctggggtagggaaggttattcatgggccagggatgtcttagggagatggagacatggaggttgttccttccacactcaattgtcacttgggcttatgaaacataaggcacccgggtactggtgggggaggtggggcaggaggatgtgagggcgggctttttctttctgctgcctagactcccatgggcttctctgtctagcagcagcctgctgtcctgtctagggtagggggtcccgcatgccagccttttgctcttttccccaagggccagagttggaccaagaaaaagggaggtggtgaggtggatagactgtttttctcataagcagatgctcccagtatctggtgccttttgcgtttctctccggtccccaggaaacatcctagaagacaaggattttttttttttttttttttgagacagagtcttattctgtcacccaggctggagtgcaatggcgtgatcttggcttactgcaacctccgcctcccaggttcaagcaattctcgttgtctcagcctcccaggtcgctgggactacaggcatgagccaccacacccagctaattttttgtatttttagtagagacggggtttcgccgtgttgac

SEQ ID NO: 75996 - DNA, 1343 bp, Homo sapiens
ctgccagaccaggggctatctctgccctgcgctgcttctgctcaagagaggttgtcactagcctctgatcttcccttgaagaacccgactggggctcttcagagggtggggcccaggaagttgtagttaaccccttccccaggcagtccttacacggccatctaggtatgcctgggaaccttgcaccaggtcggtggttctcactggctgcccattggaattatctggggagccttctggaaacgcagtgcttacattccatctccctagaccaacagaaactgccctctggaggtgaatcccaggcttagagattctgatgattctgcggtccagtgagtgctgagatctgtcctgagctctgtggggaggggcctggactgatcactgcttggaaatgattttgccctacagtaggccttcaagttgatcaaatgcatgaatgagcaagcttttcttggagtttgtgatgaagcccaggaaccgggtgcttgcagtcgtcccataaggctcccagggacaagctagagaatctggctgtccctctgtctccatggtgccagccctcttaggctcagttcaaagggagaggaggctagttaaataagaaactgagagaaacatggagcattattgatttattagaaaaactagtaaatgggtttcctctggttggtggaagcacggttgagcaggtggaggacaggacccagctggccccagggccagccccagattgcatggtctgtgcccaacagggttgcattcctctgcagccgccgcctcctcatttcctccctgagcttgtttgtccaagccaccaagccatgtggtcccgctggcttcatcctcctctggattcctgcccccctcccatgaagggaggaagaggattcagggtcagcctaggggaccctggctccctccgataggcaggaaggaggagggatgcggaggagaggctgagccttccacgggcctcctgttaggggtgttggtggaggccaggttggggagggaagcctaaggaccctccacacctcccacagccagagtcagttgaggctgggacaaaggggaaggagagagggaaggaggaccgcctgaccttgcccagaaggagcttcctctaaactgccctgggaaggaagcctggtatgctggtgtggactggagctgtgtcaacctcgtttgggaatactgtcaaaagactgtagagtagaataaggagagaaaaaaaaaaaaagaccttgctagggcactgggagagcttagccctggtgtggcacacacagggtctcccaaagctggatgcctgcattttcagtctagttggtcgaatg

SEQ ID NO: 75997 - DNA, 1027 bp, Homo sapiens
taaaggaacaaattttacaaatagggctcatgtcggccgggcgtggtggctcacacctgtaatcccagcactttgggaggctgaggcaggcggatcatgcggtcaggagttcgagaccagcctgaccaacaaggtgaaaccccatttctactaaaaatgcaaaaaaaaaaaaaaaaattagccaggcgtggtggcacgtgcctgtaatcccagctactcaggaggctgaggcaggagaatcacttgaatctgggaggcggaggttgcagtgagccaaaattgagccagttcactccagccggggtgacagagtgagactctgtctaaacaaaacaaaacaaaacaaaacacaaaaaaagacaaatagggctcatgtcaactggcatgtttggtgagggaatcaaactgataacaggtgggctagcccgagccgcttcactcacacgtgggaagcatgttgctgcatttctacagcaacagactctgtttcctcctcctcttcatcctcctcttctgtctccctcctctcctctccctcttctcccttacttttgagggcaggaaggtggagaaactagtagggcacatagggaggaagttctggaaggtcagagagagaaactgacccatacaaagctggctgcaaagccattttacgaagccccatttctgactccgcgctcagggatctttcctctggcagaaaggcagttactaagaaggagctgggtctttggagaaagagcttgccttgaacaaatgacttaacctttccgagactctgttatccccttggaaaatagaaacatcaatgtcacaggattgttgggaagattttatcagtcctaatataatgcctggcacatagtagatgctcagtaaatgttagtttcccctttctgggtagactctccatttaagcaataaataaacctcttcagggcaattgggcccccaaatggttcctttttggaatttggaatccctttcgtgagtcccccagacacatcctgcatgctcatgctgc

SEQ ID NO: 75998 - DNA, 1059 bp, Homo sapiens
aacataccctgcctgcctccaagccccaaggctagatccaggctgtagtgcagacgggaccctgggatgccaggtcactccagaaagcagctgctgggtgccccctcgttatcagccttctcgtcaggaagtcagggaaagctctcttccccaagggcagctcacagatgccattcttccgcgtggccttccagcactgcctgtgcagccagcagccctggagaaagggactgagtatctcgctagggctgaacgtaggagctgagactcctaggtcccttgcgtctccattcccataggattaaaggtttatgtggcttcagggaagtaaccagcacttacgaacgtgaggcgctgagcaggcactggacttgtagccaagaccacctcttggccggtgtctggctggctccagctgctgctgccccttggcaacctgagcacctcccccagcagcagcctccctggcaggcagccaggagctttaatcagcagccagtggtggggctctgacgtccttggatggaagagatgtgggtgtggagacagcagctgtgtttcttctcgcctgaacaagctctcccagtctttccttctcctcctgctactctttcagacattttgcagtgaatgcaaatcctatgtttgttggtaataggcagacccagctggaaacaacatcagttttccccaaaacctgggcatgttcctgtctacccagtatgcctgagtcagtgtggcaggggtgtgtctgcctatactctggcactgcgcctggctccctggagaaacctgccgtaggctctttctggacacctgcccgctgctgggcatgtccctttctccttgctgtggtcagatttaatattcctggcccctctgttctgacgactcttcctaagttcttcctttccagctgtgtttcagaacatcctagatactgatggcctcaggatgagactcagttaacattggaggcatctcagaaatgggtttgaagtggacgatgtgaccactgggtggcagatctggatgggggagtcagtgtcttctaactct

SEQ ID NO: 75999 - DNA, 1968 bp, Homo sapiens
gggagcagtggctgccaggcgaggccccacctcggagccacctgaacacggggccccacaggccgttctgcctggaacctggctcccttctgaagaatctgccttggcttttccgaagaagtcgctgggcggctccttgccaagcaccatccaggctgccggctgactggagggggagctatttggtgctcctccctgtgggcgcaggtgaaaagccaggcctcgcaggaggcactggcctcagaggggtgcttgtttctaaagagagactgtgtcttccttaggcctcaagaggaggaaggcgagacagcaggggaggctccagtttcccaccatgcggccaccgagagaacgtccccggtcagtctctggtctcgtttgtctagttcctgggagtcactgcagccagagccctctcacccctactaggctcagcccaggtggaggcgagatgagctggcgcagccccgccctccatcctccccacatccctgcagccacctcccagcagagcaggctacgtcctcactgaggtgttcttcatgagagtactagcctcctccactcctccccacagcgcagaggaaacaggccagcccagtgacatgacgttattagttttgttttacctaatgtaataaattttattgtataaatatatcaccatttacatgaggggaaacactagccagagatgattagtgcatttctgtacaccgtccttttccccattttccaactccttcctctaggcagtactcaccccctgcacccacacctacacacaggcacatgcccacacacacatgcatgcacacacaaatacacacccacatgcacacacaccacacacccccatatatacagacacctcacgcacaaccacacacccacatacacatacacacacacatacacatacacacaaacacaccacacccacccacatgcacccacaccacatccccatacacacatccacacacacccacacacgcatactcatacagaccacaccccccatacacacctcacgcacacccacacacccacatacacacatatgcacacacaaatatgcacacaccacacccatccacatgcacacaccacaccccatacacacacatccacacactcacacccacacacatacacactcatacacaccacacccccacacacacacacatgcacacaccgcaacctccacacacacacacacatacatgtgcacacaccacacccccacacacacacacactcacacacacacacaccccaatcactcagctgtcccatcccacctgccccaccacaggcatcttcagtggtgaagtgggggtgcccatccttgtaggcgattctttccccctatgcagagccctctcctctttccaccgatctggcctgaggcctgtgggtcagtgagtctggatatggagctggttctggggcaagaacagacttgaaggaagcctgcaaaattgaggagaatcccagggctttgagtaacagaggtcagccccccaacttgtcggaaaggaggatgagccagaggcctggctcaagggacagggagagcccaagacagcagctgccagaggcctagggcatgcgcctcaggaccttacctggagcaggccccttaggactccatggggtctgtgcagggagcctgggaggctgtcacccaggcttagggagctgctctggggagcagctgaccgagaagaaagcaagaattcagcacacggcttgcacggcttccccctgcatgtccccgctgtggcaggctgcactgggggccaagggagccacagatccttcctgcagcccacctctccaggtgtcccgtgagcccgcctgaacctgggggtgaggttaggaagactggcattccacatggaagtttctggtacaccagtcacacccagaaacatatacagatagtgaggcctccctttt

SEQ ID NO: 76000 - DNA, 1019 bp, Homo sapiens
gtatgtgtgtgtgtgtgtggaggttgcggtgtgtgcatgtgtgtgtgtgtgggggtgtggtgtgtatgagtgtgtatgtgtgtgggtgtgagtgtgtggatgtgtgtgtatggggtgtggtgtgtgcatgtggatgggtgtggtgtgtgcatatttgtgtgtgcatatgtgtgtatgtgggtgtgtgggtgtgcgtgaggtgtgtatggggggtgtggtctgtatgagtatgcgtgtgtgggtgtgtgtggatgtgtgtatggggatgtggtgtgggtgcatgtgggtgggtgtggtgtgtttgtgtgtatgtgtatgtgtgtgtgtatgtgtatgtgggtgtgtggttgtgcgtgaggtgtctgtatatatgggggtgtgtggtgtgtgtgcatgtgggtgtgtatttgtgtgtgcatgcatgtgtgtgtgggcatgtgcctgtgtgtaggtgtgggtgcagggggtgagtactgcctagaggaaggagttggaaaatggggaaaaggacggtgtacagaaatgcactaatcatctctggctagtgtttcccctcatgtaaatggtgatatatttatacaataaaatttattacattaggtaaaacaaaactaataacgtcatgtcactgggctggcctgtttcctctgcgctgtggggaggagtggaggaggctagtactctcatgaagaacacctcagtgaggacgtagcctgctctgctgggaggtggctgcagggatgtggggaggatggagggcggggctgcgccagctcatctcgcctccacctgggctgagcctagtaggggtgagagggctctggctgcagtgactcccaggaactagacaaacgagaccagagactgaccggggacgttctctcggtggccgcatggtgggaaactggagcctcccctgctgtctcgccttcctcctcttgaggcctaaggaagacacagtctctctttagaaacaagcacccctctgaggccagtgcctcctgcgaggcctggctttt

SEQ ID NO: 76001 - DNA, 1136 bp, Homo sapiens
gcacggccgagtccttccaccgggtgcacacagccttcgagcgggagctccacctgctgggtgtccaggtaccttcagccccctgccgcccacctgctaccaatttccaggagccctgggtgtcagtccccacctggctgtcagcaggaaaacctctaggataagtgccaggaggttttgcctccttagacagccaggagctcagggctgggagcagtggctttcagatgttccttagcttcagaagtcattctttaaactgaatcctcacaaaaggccaatgcatacaatactatacggttgcagtttctccagttgtgcagtactattagtggacacacgcacagcacttttctagcaccaggtgctcttctgagcaatgtatgtagccgctggaccctcatggcagtcctctgaggcagctactaatattccctgcactttgtagatgagaaaagggagaggtagaagacccataagtttcccaggaacatgtaggtacgaagtggagccagggctcagaccctggcagtctagctatagaccccacatacttagccaccgggcacttcagcctttccacatgggagctggagagcccccaagttctactgttcagacccctgccccatcactggagtgccctccgcagatccgtagggtgccccagagcttggtgtgatagaaagggcaaatgcaagggggcccctgttgctgagggctcccccagcttccagtgcagcagggagaggtaggctggctgcgcaatcccaggccagccctgcagggcttggggacagaacaccagggttggctgggcccctggttcatccaaaaggggacctcttagggaagtgtcctccagctggagtggagggcctggtgtgtggctgttgcatttggggatgccagggcccctgagataggtgtagccccactgaggtcttaggagtgaggtttcactgtccccagggccagcctcaatcaggggatctggtgcaaccacttccttggagaggcagcacacagaatggttaagaacggggactcaggagcacggtgcaaatcccagctgtacccctttactagtgtgaaggaccctggaccagttacttagcttccttgtgcctcgtttt

SEQ ID NO: 76002 - DNA, 1028 bp, Homo sapiens
aaggaagcatgtgtggctctcctgcgggtgtcccacaagcctactcccctcctccctcgggcacctccaggagtgggggcacaacttgccaagggagggatcatggccagactgagctctggcgctgaccgtctgctgcctcctaggatgaagagggcgccattgtgatgctgaagcgacatttgcggcagcagcgtgcggtggaggactacggccggaacatcaagcagctggccagccgggcccagggcctgctgtctgcaggccaccctgaggggtgcgtgcgccccctgtggtgactcggtcaggagatggggattgagccaggggcccaccagccaacgtcccttcagatttaaaaggaaaatggaaagagttttcccatcaaatagggctggagaaaattgctgcgggactggtgatggatccaatttcattttatgccttggttttgtgtgaatcacttccagctgggccatcgaggccctggttttcgaaatgatcagagaaggggttagcaaaactaccctcttggtgacctgagagcaccaattttccgaagggttacaatatgctaagggacactgaagactactttagcttttatttttatggtccagaaggtctccaggacttcacagtccagacagaaccatgatgtaggagtgcaggtggaaacctgtgcccacatgggctgcgaggttttgtggatcctgcataaatggaagcccactgggccacagaccacacactgcccccagccatggccctgtcctcagctgccattagggtgcccaccactgtgggtcctcagcagccaccccagaggtttccctgggagccacattgtctgggcccctagtatgtcttttccctccctggagggctgagcagagctgttgctgcgggagccccactcaggtagtgctgctcccccagcctctctggaagaacaatggaggcgttccccatttgcacttgtccctgtaagcttgccagagtgaggggcaccatgggaagcacccctc

SEQ ID NO: 76003 - DNA, 1298 bp, Homo sapiens
tgtggccttgggcatttacttggttcctctagggcagctggggaccctatgtcctgaagcattcttgaagttaatgtgagccttttaattattttgatatttcataaactctggggaaattgtatatttgcctgaactccaactacatgcatagactttgctttcatgttcctttacttatggttggagtcacataattaattgccccctgctgatcaaaagatctgattgacagttatatatgtcttgagtaaaattggagaagtgaattttgctcacctacacttcgttaggtagatttttttttttctttttatcatacaaagtctgtggggggagacttgtgggaaatgtgggaaggggtcagggtctcctatgggaagaagagctaagggagaaggtgtctctctcctccgggctgtgtccccatccggcaggtggcaggcatttcagaccctggtgtcggagcggcgggaggctgtggactcagccctccgagtgcacaactactgcgtagattgcgaggagaccagcaagtggatcacggacaagacaaaggtagtggagtccacaaaagacctggggcgggacctggcaggtatcatcgccatccagaggaagttgtcagggctggagcgtgacgtggccgccatccaggcccgtgtggatgccctggagcgtgagtcccagcagctgatggactcgcaccctgagcagaaggaggatattggtcagcggcaaaaacacttggaggagctgtggcagggcctgcagcaatccctgcagggccaggaggacttgctgggggaagtcagccagctgcaggccttcctgcaggatctggatgacttccaggcctggctctccatcacccagaaggctgtggcctctgaggacatgcccgaatccctcccagaggctgagcagctcctgcagcagcatgcaggtatcaaggatgagattgacgggcaccaagacagctaccagcgtgttaaggagtctggggagaaagtgatccaaggccagacggacccagagtatctgcttctgggccagcggctggagggcctggatactggctggaatgccctgggcaggatgtgggagagccgcagccacaccctcgctcagtgccttggcttccaggagttccagaaagatgccaagcaggctgaagccatcctcagcaaccaggtagagaggcattcagggctgggacaggcgggtctctcagggcagtagctcttgtggtgagtccacaaatgtgctgtaagactcagggaccacattactcttgt

SEQ ID NO: 76004 - DNA, 1127 bp, Homo sapiens
ccaaagaaagggtgaagagtacagctcacccaccccccaacttcctctaaagctgaccttggcaacattgatggctcctgagctgaattccaaagcaggttgatggtctgtcctgaaaggtaccacagctggctgctctgtacctggcgaacacctggtccacctgagacccatgtctcatggacatccccacaggaaccctccaggcttttatgtggtttgtttattgtgattgcagacctcttaggcacccacagtgtaccagaaactcacccattggtatagaccctcatgccagattccttccctctgctagatccttagctcttagagtataggtaccatttctcattcatctctgtgcctcatgtttagtaaagacaatggctggcagcctttgactcctcatgaacatttaaaaataaacaaaaccctggccccctagtggctggcatcctggcacagcaagcttaccaatcttctctagcactggggaggggaactgcacccaacccttaacaggccagctcgctgccgattggcaagaggagggcctcacccaattccagtctactccttctgccctaccagcacacttgggctcagggaacaaacccagcctagagcactccagggcttaggaggtgggagccccatttcgtggcaccttgattgtggtcctcattgatatcctcagtggtggcattgcccttctgatgagaataagtaagaagatgattccttaggttattgaccatgccattgagactgagaagatgattgaaaagtacagcgggctagcctcggacctgctcacctggatcgagcagaccatcactgtcctgaacagccgcaagtttgccaactcgctgacgggcgtccagcagcagctgcaggccttcagcacctaccgcaccgtggagaagccgcccaagtaagggccctggcacatgggagggtggtcctcagtggctgggaaactgaccaccaaaaggtagagccaggttctgggccttatgaagtgtgtccacaaggcacaccctcaagattagagagctgtatgtgtgtcacctgccttgtgcccctcttcaccactcttctcccaagccatcagcttagagaaacca

SEQ ID NO: 76005 - DNA, 1041 bp, Homo sapiens
ttttggctgactgaggcagggaagcaggctgctggggcacagggcctcaggatgtggtgttgctgcggggctggcggctactccttgagggcaagaaatttgttttacctctgtgtgtcctcaggcctagcacagcgctgccacataataggaacagaatcaatgtttgtacagacagccacaatacagctatggagtactgatggtgcaccaggctccaggccctggagacagacaagtgaccaagacagatttccctgggctcagggagcatctaggagagagaaggaaatgtaaatgcagggagcagggcacatgaagggagacccaacccaagcgccatttatactggctcttaaaggatgaattagtgttaagtgaaggggggatgagggagggagcctcccagggacggcaggaaagcacagatccagatgcacatcctcttcaaatctctcttgttctgctaccctcagattcaggacattgtggtccaaactcaggaaggtcgtgaaacacgctcagccaaggatgcgttgctgttgtggtgtcagatgaagacggcagggtatgccctgggaaccagctgttagcacatccaccaccagccccttgctccgcacaagcactgccatctccagagggacattagacatcatcacccagaactacagctgcctccctgtaattgatgcaaagtctgtcctgacctgattctttgaggcctggaatacaggattcttttccaaagttgcctgcaggcagactggggggtctgtgtggtgttcacatctgatgggggagcctctgtgtgtggttagctgctgccccctcttggtgacctggctcaagaaaggacagttccatttctctcctggtatattggccctcaatttgtacacttgtttgggactacaaaaaatctaattcttagctcttactgtttctcttggatgcagctaccctcatgttaatgtcaccaactttacctccagctggaaggatggcttggcctttaatgccctgatacacaagcaccgg

SEQ ID NO: 76006 - DNA, 1036 bp, Homo sapiens
tttcctgcctgggcctagagagaggaattaccatagtcctctctgtagtcccaaaaggagtgattggataggaaatcgagaacagataacatcctccccactgcctcaggaaggattttcttgatgaaacctttcatccttaaactggaattagatttttgcttagcaggttcataatagatctctctgtgtgtgtgtgtgtgtgtgtgtgtgtgagagagagagagagagagagagaaggtgggggtggagaatatcttaaatctctagtagaaatgacttctcctccccctgttggctgatatctgattcttgggattttttttttttccccaactcctgtgactattgcctccctgaacttgacccagggtaagtatattccgaccttaagtcttcggccaataagaaagtttgagttacatggggttgtgtgtgtatgtgtggaaggtgggttccttcacctgatccaccagtcagcagcccacactggacctgtttccctatcattgactgttgccgtcttccacctcctaagaagagtacaaccttccccataaacactttctggagtgattctcccgctgcccccataccttatggcccaaattgaaggttgtagtaatcctcttccccactccctccctgtactcagctcccagataccacagtccctggcagaccttgaagcctgagcagggccctggacccctctgggaccataatgacctcacatcttgggagtgtctgggcttctcatgccgggaaaggaatgctgcggtgtctcatctcccttgtcatgacaaggaatccacttgggtctcagtcattacccctggtgtccttgctctttacaggaaactctctttcttctttctttatctccttctcaccctccttgaccccacaaaattctcccttggtttcccttggggacggaccataacggtgacccattgcttttgtgtatgttaatttaagccaaccaaacttggaaccattggctttgtcgtcagtctggttttaccttcttata

SEQ ID NO: 76007 - DNA, 1051 bp, Homo sapiens
cccacaaactcagtaccgagagacactgcatgttatttgtaaataataccctggggcaatctggtactatacagtttatacattattttcatataacttcatttaatctgtgcagcagctttatgtgttaggtggcgagtgtattaattagggcaccctaactgctccagtaaagaactccaaaatgaaattttattttttgcccaaatcataggttagtaaatcagtgtaaatagagggggaggctacgctcccaacagtcatccaggacatttggttccttccaccttatggccccatcctctaggtcctaggaatttagagcaaagagtaagaattatggggaagattttatggctaaggccttgaagtggtgcacatcatttctgctcattcgacctcacagcctcacctaaccacaaaggcaactggaagatgtctccaagctgtgtgtgcagaaagcagaatattgatactggtagaccccaccagtctctcccacagtagcacgggatgttcccctccttttacaggtagggaaactgagatacagagtcattaagtgaactatagaagaacacatcactgctaagtaggacaggatttcaacttaggtcttctgcttagatagaatgggaataataatggcagtaataacaataatatctaacagtttgtgagtgtgggtgggtattcaatggaacaatatacataaaggccttagtatgttccagattccctttctagctctgagctctgccacacaatcctataaagagccaaatatccctcctgagcagcagagcgacagcaggagctggtaactagtggctgcctgtcagcagagcccagcacagggctgaatcgactctagtggtagagtgctgctctccctgcagacctgggagattgtgcataccaagaactgactctgggctgggtgaggtggctcactcctgtattcccagcactttgggaggccgaggtgggcagatcatctgaggtcaggagttcgagaccagcctgaccaacatagtgaaaccccgtctct

SEQ ID NO: 76008 - DNA, 1208 bp, Homo sapiens
acatcctcttctaacaggcagacagacctttcctgtagcccaggacgtcaccttccccttctcccaggcagggtccaggcaccagccttttactgggatgcgtacttagaccaaatgccactgtcatttgtttggcgtttcccccttcttccctcctttcctgtcttcttttccttccttctctccctgctttctcctactcacttggtgtccagttgcagcttccgctgtctctctcctctcttcttccagtcacctgtggttgtccaggctctgctcgcttcccttccccacagcagggcctcctactgctcctgactgtgttctcatttcatacctgctcgaatttctagtttctctagatggtgcctttcttagtatctgctgccttcacctatcatctctgcaaaatgtattaaatctactgctttcccaagtacttgccctaccctttaaaggatctaaataagaatcaagtttaacaccgctgctgcagcagcctctttactccatgttacctagctcttacctgcaccctctgtttactgcaccgtgagtagtaaatttccgttcctcgtgaggtgacttcatttgtagtagaaactcctgctgtgtggtgtggcagagactacatgctttggctacggtctgacctggcttcaaatccaggttctaacacttgctagctgtgtggccacagcaggtaatttaatctttctgatcttcattttcctcctcagtaaaatgggaagaataaataatacccaccttgcagataggattgtgctatgctgtggataaaaatgtgtgtcagatgcctggcacatgacgggtgaacaaaaatgctagctactgttgtcattatagctcagtttctcttttgcaaatttgttgctttttagcagatctcattatgtgttataagggatcaaagaattgatgtatccaaggtcctattagaaatggatcccataatgatttacaattttgaacataaatatctttgccagcagttcccatctttctagcaatagtaaatagagtaattaataaaacaacaatttagaacaagaacttagatattttcttgaagtcccttgtgctagaaataatttatatttttcagagaatagctgttcccattcaccccaaatgatttccagaatcaggattttttttttttttttttttttttttttgaggcagtg

SEQ ID NO: 76009 - DNA, 1044 bp, Homo sapiens
aaatctgaggaagaagagtagatgcagtggtctgtgtgccagaatcatcatgtggcatttgctgggtttatcacagagatgcttccttcttcaccccattaggggaaggtcacctgttttggagatggagatagtgattgaggaagagcgtaggaggcagtcaggagaattaactgtcagatctggctctgctcacggattgccaactccccttggtaaatatttagaaaatgccatagtgtgtttccctctgttgctgcgtgtatttcttaattcacagccaagtgatccacattcttccattttcagccagcctcagctgaatatcaaaccatcaggggatccctagcctttatagctcacgtagtcttagaggtggtcatagacagaaaatgcttccttaatgaattgtctggctagcttatcaaattcccagaccacctttcatttttctctttccttttcctggttgcaggaaatattacaaagccctcttcttcctacctcagcaagcccttctcaggctttgccataatgttttatttccacatcatacctgtgcagacctggctgagggtagaattacaagggcaattaaaactcagcatatatcatgtgagcagtgggggcaaaagtgggcttcctttctttcatttgaatgttataaatttagcaagtgaaaaggcacagggctgaaaaaaaaataggctttgcattgaaccaggctcagatcatccaggatatttatgaagagactaacggcaccttgatagctaaagaacaataattgcttcgaattatagtcaatttaggagtttccaccattgtgaaaaggagaagaaacttgaataattccgaaaatgaatactttgaaaatattttccatttgtaccagacttaaatatgggcgtgtctcacttgagaatgtatagcaattcaaataaaacaaagcatactttaaaggcataaattatgtggaccagaaagaagtctgtaaccttattctgtccctcttttgagtcccagcctgtttctagaagaacc

SEQ ID NO: 76010 - DNA, 1049 bp, Homo sapiens
tgcagcactctgagtgtctcttcccaaacacttcggttactgtttattcacctgctgagatctggtctcttattcactctcattgccttaagaaatggtacagaaatgtattcattaacatttcagatttgtatatgcggtagcgagaaataattccctttcttgtgtgtcgtgatttgcctttcttgtcagcctaagctcaggaaggtgtctgtgagaacttcgctcagcccaagatccctttcccttcccgtcacatctgttagcgcacaagatttcttcgtctgtctccaaaggtttctgaagccccaccctttgcccacgcacggtgccaaggagactgtgccctgccttgacaacagttgctaaggggcggagacttcggctcggttcccgagacggaatacccaggagtcgagtacttgggcgcatgcggcaaccgtatctcagttctcgcgaggtttcgtcttcccggaagcgttggaggacattccctgttgactgcgtcgcgatgtgtggcgactgtgtggagaaggaatatcccaaccgggtgagcgactgggcgctcccttggcccgcgggcggcccccgaggtgtctcatatccaaggctggccttcccagagaggccgtacgtggggcggactcggccgcactgccggtcccggtgacccagtagcggtatttaggcacaccagggatggcctgtggcggtctgcacctctggtacccgccctggcggctgacctcagttgtagtggccgttctcttgagctccaaggagcaacagaggaaccccaccaccaccacaacccccgtcgacaaccgagggactcccccacccccacttccggtctcatcctcaagctcgatttgatgaagtacaattttcttaccgaattctagcgctggaggggacctctgtggtcatctgttctaacacttttgcagatgaagaaaccgatgcccagagaggggaaatcacttgcccaagttcacattctagttgcatggatgagagccaggactagaatttaggtttcctgcctg

SEQ ID NO: 76011 - DNA, 1057 bp, Homo sapiens
catgtataacagtatgaattctcctgtagtacaactactttgaaaaagcgggtgagccttataaaatacagacatgacccagtgattcccattctagaaaaatgcatgtgtatatgcttctgaagacttttataaataagtgttcataacagcattatttttgtagtagattggaaaagtaactgatacattcattagaatggaacaccattaatgaatgaggaatggaagtgaatgaattagagcagtagttctctaccaggagtgatttttggctcttaggagacatttggcaatatccagagacattttttgggtgtcaaaaggggaagtactactgactgctaatgggtgatgcaagggatgccgctaaacatccagcaatacatgggacagccaccacaacaaagtatcactcccaatgtcaatagtgtggaggtagagaaaccctgaattatagccgtgaaaccaaactagaattacacagcagcctgaaaagtcttacaaatagtgttgatgaaagaacacataaagtataattcaaaaagaggcaaaccaaaatatattattcaaggatgtacctgggtggtaaaactgtaaggaacgtatacaattactgttaagtcgagatagtggttactcctaagggattagggtgtgatcaagaagggtcacatgagaaaaagtcttcccgggtgcaagcagtgttttatttcttgatttgggtggtggttctacagatgtacactttataatcatttcttgttcgctacatttatgtttcatgtactttactatgtactatttcatttttttaaagtttaaaaagatttttatgaaaccagtaataaacatgagctattatgagaccatgagggaggagtttgcagtagagaatattaaagagattaggttggattcttttttgttgttgtttttgtttttgagatggagtcttgctctgtcgcccaggttggagtgcagtggcatgatctcggctcactgcaagctccgcctcactggttcatgccattctcctgcctcagcctcccgagta

SEQ ID NO: 76012 - DNA, 1057 bp, Homo sapiens; identical to SEQ ID NO: 76011

SEQ ID NO: 76013 - DNA, 1057 bp, Homo sapiens; identical to SEQ ID NO: 76011

SEQ ID NO: 76014 - DNA, 1057 bp, Homo sapiens; identical to SEQ ID NO: 76011

SEQ ID NO: 76015 - DNA, 1057 bp, Homo sapiens; identical to SEQ ID NO: 76011

SEQ ID NO: 76016 - DNA, 1429 bp, Homo sapiens
aaagcaccattgtaattcagtggggggaaagacagttcttcaacaaatcttgccaaaacaactggaaatccatacgcaactaaataaaccttgatccttacctcatatataaaattatttcaaaatggattataaacctaaatctacaaactaaaagctataaaacttctagaaaaaaatgtaagaaactttgtgcaaccctggggtaggcagagatgtcttaggagaaaaaaagtataaattataaaagaaaaaatgttaaattggactttatgaaaatcaaaacttgtttgctcattagaagaaaccatcaaaaaaggcaaatcaatgacggagaaaatatatttgggaaaaaacttgtatctaagatatataaagaactcttacaactcaaaataaacaacctaactttttgaaaatgggcaaaagacttgaatggacatttcataaaagaagatacatgaataagcaccatgaaaagatgctcaacatcattagtcatcaaggaaacaaaagttaaaactacaatgagataccactttacgtcactgaatggcaaaaataaaaagcagtacctagtattgatgtagctatagagcaactggaactcacacattgctggcaggaatgtaaattggaaaaccatttggcagtttcttgtaaagttaaatataccatatttttaccatattagcaattccacttctacatatttacccaagggaaaggaagacatgtatccatccaagacttgcacatgaatctctatagctgctttattcataatagccccaaatggaaacaacccaaatatctaccaacagctgaatcctacagggaatactatttggcaatgaaaagcaacaaactaccagtacctagaacaacagtgatgatgaacataggcattatatcgagcaaggaaaattggatgcgggagtatactgattctgtttatataaaattctagaacgtgcaagactggagatggaaatcagatcagtgggtgtctggggtgggatggaggttagagatagactgaaaagcatgaaggaactttttggggtggatagaaatgttttataccttcactagggtagtggttacatgggtatatacattggttaaaagtcattcacctatgtatacccttacagtgtgtgaattttattgtatgtaaattgtacctcagtagattttattaaaaaaaaaatcaaaggctgggcacagtggctcattcctgtaatcccagcactttgggaggccgagacgggcagatcacgaggtcaggagatcgagaccatcctggctagcatagtgaaaccccatctctactaaaaatacgaaaaattagcagggcgtggtggcgggcacctgtagtcccagctacttgggaagctgaagcaggagaatggcatgaacctgggag

SEQ ID NO: 76017 - DNA, 1429 bp, Homo sapiens; identical to SEQ ID NO: 76016

SEQ ID NO: 76018 - DNA, 1429 bp, Homo sapiens; identical to SEQ ID NO: 76016

SEQ ID NO: 76019 - DNA, 1429 bp, Homo sapiens; identical to SEQ ID NO: 76016

SEQ ID NO: 76020 - DNA, 1784 bp, Homo sapiens
aacttaagcttctctgcctcaatcatgtgtatccttaaggactgacatctatagagctgagagtttacttttgtttattttgtattatgatcaaggatcaaaactatttgaacaaacaactaaacatctatgtaagatcatctttatcattgactcagtttctattttgattgaatttaattttagttggtaagcctcgtttaatattgttggttattaaatttttctaattttctattttcatattttatattaaggtttccttaagttgtttctaaatatctattttcagtttatcctcccttttcaacatagtggcagtccttacagacttaaggatctaacactgcactttagttgctttttttttttttttttttttaacatgagtaacacttctttaggaaagctagtaatttcaaaaattatttggtatatgacctagaagtaaatgctggccattttttagttttgttttgcctttagacattttaagtctgttaatcatcttcactaaagattttgaaatgtaaagaaattaaattcctgtttctgatattttagggtaatacctgcctggagaatggatctttcttactgaactttacaggctgtgcagtgtgcagtaagcgggattttatgctgatcacaaacaaatccttgaaagaagaagatggagaagaaatagttacctatgatcgtaagtagactttattttttaacctgagtgtgttagcaggtgtcagcttttggaagtcgatatgttacacaaaatattctgaggcctatttcaatattgtattgcgcacataattactagttaggtctttaagaggaaaatgtcattaacacctcatttatctgggatatcaaatagtctatgtaaatgacttttgcagataactaaagcttacgattcaggaactgaattttttttgtttatcaaattatttttcacggacatatttttaaaagctttatgctgccttaacaagatatactttttattattgttattattgtgaccttagggtcatccatgtgagttttcacttttctgctacagtataataccatgatatcctccaacagctattaaagtgtttagggctgcttgtccctatactaaatgacttcaggaatgcagtgtttttttcagtcttgtttctgctcagaatgtctagctttttttttcttctccaatctcactgtcagtctgttgttccttacttttgctgctaaataataagctgccttcctatccttcttctcgtcctcaatactgggaaaccaaataaactatgtataaaaaaatcaattctgaggttagcactaaggatttctgtaagttaagtatatgtatacttcagtgcccaatattgtgagaagtatttaactgttcacattccctttttgcttgtctcctggttcttgggtaccttctaaacacatgaggaataaatgtacaggtaatggtattttgtcagaggagtttgaaagacagcaggcctttagaatggagtcagataataataaatgttctaagctagaagaatctttttctttctttttagcatatgttttctttaagctgtatttcattccaggcagtagggcatagtggtttaagagcaagggccctggagctaggctgtttgggtttgaattctggttccaatacatcctggctcagtcgtcttgctagttacttaactgaagtatgccattgtttccttatctctaaaaaggtggtgatgatactatctacctcattgggtttttta

SEQ ID NO: 76021 - DNA, 1046 bp, Homo sapiens
gagtgtgttggcacatgtcttgagcctctcctgggctcaagttatcctcccagctactcaggaggctgatttgggaggataacttgagactgggaggttgaagctgcagtgaggcatgtttgtgtcactgcactccagcctgggcaacagagtaagacccggcctcaaaaaaaaaaaaaaaaaaaaagaaattgatctagctagtttaaaaatacacttaaatatgttttaactgcttctcttaaagaacttttggtggcaattaataaaagctcagactcagaattatgtaacgttgttatgtggcagattctgaatcttttaaaaatcaaggtagatactataatgggtttcctcctatgttaaatatgacagacttaagattctctttaaataatatgctgagaatagaaattttaatagaagttttaagaaactctctaagacttaattacgtaagtctctctttgttttagcagatttgtgtaagaattgtcatcatgtaatagccagacatgagtatacattcagtatcatggatgaatttcaggtaaatataaatatgggtataaatataaatatggggaggttaggggaataataaaagtgctcttgagaatctaaatacggttttcataagtgaagtgcaaagcgttagcatatattaaaggagactatgcctttttttttttttttttttgagatggtgtcttgctatgttgcccaggctggtattgaactcctgggctcaagcagtcctcccacctcggcctccaaagtgttggaattacaggcatgagccactgtgcccagccccatgcctttcttatatctgtgcaagttgagagacagactttagatgtgggtggatttgtgtaaacctgtcttcacgagaatcacaaatcaaaatgtgtagtttacaaatgatatctcagccctgtcatttttgtttataaagaatagtagcacattctagcttcttatgagattaccattgtgctgctttttttctgcccagttacgtgattgcacagttgtgggctttt

SEQ ID NO: 76022 - DNA, 1048 bp, Homo sapiens
ctgtcaactgccaccatacttgcccagcatggaaactgtgataaggaggttttctttgttttcccaagttgacatgtagagttgaacaactctgcagtctcatttgtggtaagacattatagtattgttaagtaaaattacaagctgtgtgtaccatggttggaggagaaacacagaaccactgtgaagctggagattaagagatttatcataaggattaatccttacacaattgtgagagtatgtgaagaattctctggaaggttgatataggcctgtagttgctgaagatacacaggtctgacggtcagaaagaaaagctgggcagtcggggagagccagggacaaactgaaacctatctctgtccctcactgcctgttttcaagccttcaggttgagttacttattttgtgtgaactacatatttgtccataggatataaatatcaggctagagcttttaacagccgagagaattttttcaattcccttcacatttggatagtacttaattaggaaaataataataatcttccatagcagaatcataagatagtaaaacccctcttattccttattttagcatggaagaaagtgcttagtcacctgtcagagtctggtctgatatgttgtggttaatctaaaataacatcttgactatattttatatttcttcagcatccaaaaattatgcctcaagaaatatttatatgatatgcgtaacttagggcaaaattgacatcttagtgaatgagtagtggccgcatagggagatgagcatctcctgggcttaaagaaacagtcctattcttttatgggaggaaaggagtgcttatagctattttcaagacactcctgaatttcacgtgagttatgtacagctcctgaacggatattgaggttgcctgtttatgtcctaaccaagccattgtaaattagctagaccaaagtctagctgatttttcctttttgactgaatgcagccgttttcaaagctgccctggaaattactctgggacaggaagaaggtaaaggaaggtggcttgta

SEQ ID NO: 76023 - DNA, 1048 bp, Homo sapiens; identical to SEQ ID NO: 76022

SEQ ID NO: 76024 - DNA, 1048 bp, Homo sapiens; identical to SEQ ID NO: 76022

SEQ ID NO: 76025 - DNA, 1048 bp, Homo sapiens; identical to SEQ ID NO: 76022

SEQ ID NO: 76026 - DNA, 1029 bp, Homo sapiens
gtcccaactttactcttccttctctcctgttagagagaaagatttttatttacccctctctaatgctacccctactgcatttcctcaggaatctcatgttatcgtctttctttccagtgtactttgattcatcctgtaatcatttcttcttcctcttgcttctttagttgaacaggttgtttgtttgttgcaacaaggtcttactctgccgcccaagatggagtgcagtggcctgatcacagctccctgcagccttgacctcccgtgctcaggcgatccttctgcctcaacccctcgagtagctgagactacaggcactagcctctgtgcatggctatttaaaaaattttttttgtagagatgagatctcacttggttgcccaggctggtcttgaacccctgggctcaaacagtcctcctgcctcagcctcccaaagtgctgggattacaggtgtgagccattacctggccacttgaatgggtctttaccctattttccttattttcctatactcctcttaagtacctacaaagtgattttcattttctctgtgctaaaactattctctcatacgtttcctataatctaaccacatcctgtgactgccttagttcttttctctcttacatggcttctgcatctagttttattaactattgttgtctttttgaagcatttctgcccttgaggtccaaagtgcttgacttctttcctttttaaatcattttaactgctcctttgtgttttctcttagttttctttcctgttttctcgaagtgatactcctcagcttttgttctgtggtctggaaccttctttatgctctctcttgtagtgaacacacatgtactcagtctcagtagagacctattagatacctttctcatttccttctctagccttcgtgcctacacccctcatcccctcttttttttctttgttttgcttgccttttctctgactctggcaccacacctcatgtcaaggaccataaccattgaaggctgaattactgcagcattccccag

SEQ ID NO: 76027 - DNA, 1029 bp, Homo sapiens; identical to SEQ ID NO: 76026

SEQ ID NO: 76028 - DNA, 1029 bp, Homo sapiens; identical to SEQ ID NO: 76026

SEQ ID NO: 76029 - DNA, 1029 bp, Homo sapiens; identical to SEQ ID NO: 76026

SEQ ID NO: 76030 - DNA, 1086 bp, Homo sapiens
cagtgtagccagagtgaagcatctttgttagcagttatgtggtcagaaaacaactagaatgggagcacacctggtgcccagattttggtttccaataaaaggaaccaggactccttagaaaatgaactgattctagaactgggatatgaactgtacaagatgagcctagagtatcttgtgccacagaaaaatgaagtactgaaattaaaaaaaaaaaatcatagtgattgggagtatgtcagcatgatcgaactgaaggatctctgaaaggccacagctggagcaatttgagtaacaaaataaagtagtattgggttataacccaaactatataataaatatttacaagcccaaactaatataaatgattgaatgggaacaaatctcttgtgcagaagaatttcaaataatttatgtagatactccccacttagtgggctctgcatagtgacttccttgcagagtataatatggaaaggggggaaaagagtaactttacagtggagaaatctgacagacaccagctcagccaggtgattgaggttaacatcatccatgataagcccttttgatagcatgtatccttgatagcatcacatcatacagaatgtgataagaatggcactttacctctgtggtcctcctccccagaactcagaacccaagtctgatcaggagaaaaacatcacacaaattccaattgagaagcattctttaaaatacctaaccagtacttctcaaaactatcaaggccataaaaaacaaggaaaatctgagacatggtcacagccaagaggagcctgagaagacatgactgctagatgtaatgtggtatcctacatggaattatataccacgaaaagaaaaaaaggtcatttggtagaaactagggaaatctgaatacagtgtggacttcagttaatataaatgagaaaatggtttcattggctttaaagggattttagaatatcttactttgcatagtttcatgagcactggccaggaggttataaactggcatttaggcctctctgccatttagtagcagtatagtcattaagcaaagcattactctggactttattg

SEQ ID NO: 76031 - DNA, 1091 bp, Homo sapiens
cgacctttagggctctggtttcctgtaagcagtgaattatttacctctgctcatagatatcaaattggcccttcccaggttgcagcagggtggggcggggaggcggccttgttcagtctgttaataggaggagcaacctccttgttcaaacagcacttacaggtggggacctgtttttgctaagtcatcctggggatgctcaaagctccattgttagatcctttctgtcctccttcctggctcctccttcctccccacccctctaataggctcataagtgggctcaggcctctctgcggggctcactctgcgcttcaccatggctttcattgccaagtccttctatgacctcagtgccatcagcctggatggggagaaggtagatttcaatacgttccggggcagggccgtgctgattgagaatgtggcttcgctctgaggcacaaccacccgggacttcacccagctcaacgagctgcaatgccgctttcccaggcgcctggtggtccttggcttcccttgcaaccaatttggacatcaggtgaggggtccctccttgtaatgcaccaaaagtgttgggttggtgtagctcaggtgggataaaaggagaggctgaatgaccatgttttggagtgtctggaataatggggtatgttttgttaagctaggtctttaggtgcatgtgacataccaagagaaggtatatattttttaagattaaacactgaggctgtgtgatttttatagtttactgtctttctactatattactccatgagggctggttccaggtctgtgtttctctccactgtgtcctcagtgcctagggcacagaaagcactcattaaatatttgttgaataaatgagtggagaaagtagaggccaggaatcaaacaagaattggacagactcaagagaccttagctctagctggacttggttttgctatttaatggctctgtgccctcggaaagggcgcttcatttttcggtttagtttcctcatctgtaaattggggataataccacttagctcataggattattatgatgtttaggggacaggatatacaaaagtaacttgaaaaata

SEQ ID NO: 76032 - DNA, 1393 bp, Homo sapiens
agctcctatgtatcaggttaagagcaagggagagctggccagggacagcagtttgcacagcagaggggaatgtagcaacagcagggcctcctaggccccatcttccatttcttaggtaagaagagcatttcctcagactcccaggcggaggactgagcctagccttcagcaaccaaggttctcctgggacccaaagtttatgggagaagggcaaagacttcatgggaagagagaaggaaggccctgggtagaaacgcttggtgctgttctctttggcctttaagacaaagcgctcatcttgccctctacctcctgataggcttgagggtttgccaaccacactgtggctacaggtggagggaagaggactccttcctccagagtgctatgttcaggaagtttctttaaccccatatggcccaagagtagctcgtaggaggccctttaaagacggaacaagtaatttaccagttctactggggttcctgcccaccgtcccaaggtgggcgaggcctaggaagagggtcattcttaagccacacattagctgcactgcgtggctgcagccaaaacaaagaactgggtgttgagtattcatcaactaagaaccaaaatccagggcactcatatgtgaaggataagaacctcacttccttactcctccaaaaagaagtggggaaagaaccatcaaacctttcctcctgacttaccaaaccaggaaaacagcaggagagggtggctcaggacttagggacagggtatagcttagatggtggaaagcaaaggagagcaggaagttgtaaatcactggctaatgagaaaaggagacagctaactctaggatgaagctgtgactaggctggagttgcttccttgaagatgggactccttgggtatcaagacctatgccacatcacactggggctagggaagtaggtgatgccagccctcaagtctgtcttcagccagggacttgagaagttatattgggcagtggctccaatctgtggaccagtatttcagctttccctgaagatcaggcagggtgccattcattgtctttctctcctagccccctcaggaaagaaggactatatttgtactgtaccctaggggttctggaagggaaaacatggaatcaggattctatagactgataggccctatccacaagggccatgactgggaaaaggtatgggagcagaaggagaattgggattttagggtgcagctacgctcaccctaaacttttggtggcctggggcatgtcttgaggcccagactgttaaccaggctctgctggcctgtttactcgtcaccacctctgcacctgctgtcttgagactccatccagccccaggcacgccacctgctcctgagcctccactatctc

SEQ ID NO: 76033 - DNA, 1120 bp, Homo sapiens
tgcagctggcgaaggagtatggcatggacttctatgaaacaagtgcctgcaccaacctcaacattaaagaggtgagagccctggtgaccaggcgcccgctctctcgggctgagtccagcagaggtgggaggaggagccataagatggaccttatccctcaggccgctgcagggttgccaggggagaggaggagacactggactaacctgtgccctttggtttccagtcattcacgcgtctgacagagctggtgctgcaggcccataggaaggagctggaaggcctccggatgcgtgccagcaatgagttggcactggcagagctggaggaggaggagggcaaacccgagggcccagcgaactcttcgaaaacctgctggtgctgagtcctgtgtggggcaccccacacgacacccctcttccctcaggaggcccgtgggcagacaggggagccggggctttgccctgctgctgtcctctcgtgtgatgaccctattgagtatcagtagccactactccccctgcctggccctgagagcggctctgctgtcatctcaagcagcccctgtccccagcccgtccaccctggagtggtcttcttcagcctgtttccccagccacaggcctgctacgacccccacgatgtgccgcaagcactgtctcaccatcccgcacccaccagacaacagccagggctggagtccaggccactttcagctgctcctttctccgtgcatcgtgtctcttctctgctttttctctcttcccccacttctctttctctgacccctcccctccggtgcgtttcgtatcaaagctcctcaaaccccgtcccccgtgtgtcctgctgtgtgcagctcgctctttccttccttcctaagctatccaaggggatggacccaggctcgtggggaggttccacccttggatccaggaagaaccctccaccctgcctcgtgggtgggccaaaggctacagggtgcttcttcctcttcccccacccccactgtccctcatgtgccatgggcctgcctccccagtgacctgcgaaagtggagcatcgaggtaggagggaaacggcaaccagggagtcctcgagcctggggctgccctacctctac

SEQ ID NO: 76034 - DNA, 1008 bp, Homo sapiens
caggttcaagtgatttccctgcctcagcctccagagtagctgggactacaggcacgcaccaccacgctgggctaagtttttgtattttagtacagaaggggtttcaccatgttggccaggatggtctccatctcctgacctcgtgatccgcccacctcggcctcccaaagtgctgggattacgggcatgagccaccacgcccggcctaaaagtgggttattttctaattgctcttccctgattaaaattttctctttgcccatcttttctctagatatgtactgacttcattcatccatttattcgtctcacttgctcattcatttttgctttcatttactctactttgttgaataatatttagtgatctacctgctgccaggcagtgagagtctgaagtgaacaggatgctgctttgccctctgggagcttacagtgtagctgggaaccagacatccaaacaagcagaatattatgcaaaagaaatgtcaggatgctttggaatcacagaggagtgagaaatccctcccggggaggctggtgaaggctttgaagaggaagtgacatttgagtggagtcttgaagactaggcaggattctccaggggccctgggtgtgggggaagcacacatcctcttccctgtaggaggtgctgtggagaacacctccagtggggctgctactcttcagccttgctggggccagctggagtggccacaccatggtcacaccagctgaagttcaagaagccccttgccaggagattgctttgctggctctgggtgagggcaggtgcatctggaagcccccttctttctaagatgtttgctcctgagtttctatgtcctagtcttttcttccctgaaccttttgctaccagtcagcacagccctgcctgagaaggaggctggaggagtgagtggtcagtagcctggtgggtcttggctgcctctgtggtgcccgctggcctaagtagcaggcttagggaggcgagacccagttccaggg

SEQ ID NO: 76035 - DNA, 1064 bp, Homo sapiens
ctgtgcagctgtgctggcctggctgggggttggtgcgaaggggtccccaaaatactaccttaaacaaattaattgagcattcactaccaagctctgtgccaggcattttagagacatattgcagtctacgttttctgcccacagaagcccataacctagatggggaggcaagacaaagggaaaaacaaaaaacaaagagctagtgccaaaatgagatatctgaaagaacttggtgaatcactcttcaaatgtaaaggatggattatgatcattgcagttactcttaatgaaggtctcacagtgggtatcagaagctaaattatgatgcaagatgtaccatgaggcagccggagaatggcgatggatgggatgggtgagtgctattcccacgactccatgctgtcggaggctggggaagagagaggcccctgtggactagaaccggcagggaaggctgaagctaggcctcagtgtgggctgctcgtcagttcctgcagcagaagggagcagatggagtaacatgagcagagataacagaggtgggattgagtaggtgtccgtggggctctaggcagtttagatgcaacagaagggattcttcaggaaagtgagaagattcttctgtttctctctctgtctcccaaattataagtgccttgatggtgcgaccaaatcttattcctcattgtttttatagtccctagtacagggccaggcagattcaatgcctgttgttaaattaatgaatgaatgcagggaccagttggcagagggcattgagagcctggccaaggaggtggaacatgagccttagcaatggtaggaggggttttgagtagggtactaatgaggttggctggaagaaggggttaagacttgaagcagggagactagtcaggggctgcagtagtatctgggcatgaaggaacctctgaatggcccctcacccccagtggtaccaacaccaacttccacacagtcagttgttctactttccctccagaatggggagtggttcaagccaatcaacctggcaacttctgaaagaatcttatgggacctgt

SEQ ID NO: 76036 - DNA, 1060 bp, Homo sapiens
gcgtgatggaggaagtggcagaggaaccagatggtgtatgaggacaggttgtgggctcagggacaaagggcggtgggttatcccttaaggaaactaggagtggctatttttgggagaggcctggtgcttggaactactgagctatctccagagagctgtgggctgcctgggaggccctggctttggcctgaagagctgttgtttgcacctgctctcctagtcccattccaagtcctataggtgacatggacttttccctttgagggcttcattcaaccacctcatttcagaagctctgggactcctgcttagtgctgtgggaggcagcctcccctgggagacacataccctcctttttgagggcacccctctttctaaaataccaggatggccctctgaggctcgtgctctccttaaagagagtccattgcctcacacctctaatcatccacccttctccttgtcccttccccttgtaatctcccttcttagacaccttctgctaataggtgaacactaaataggtcacagggacttcctgaaaccctccagggcagaccactttgggcacataggtgaatcagtgaactgagtaggggtgtctctgcagcactgtctcccctcaaggcccttggtatattggcctaaaacctaaagatggctcccagatttcttcctccgcttctgacacccgggttcccctttctacaggacacagaggattctctagggtccccctttccacaggacacagaggactctaggagtttggattccatggaatagaaagaaacctgtctttcttcacaccagccttttaaaatctgccccactgggtatcttaaatgctttcttatttaaagcttattaagggacttgggattctcccttatcttgggcgtgtttttcagcattaactaaaacttaaaggaaagagttggatggtcaagaaaagctttttccttaagtgatatggacagtttctcaaggaggtagaaggggcagccaggagacaaatcaaggagccaacgaaatgagtgctaccaagtcatagtcattc

SEQ ID NO: 76037 - DNA, 1931 bp, Homo sapiens
gctgtcaagtaccccaaggtgcacaataattcttttagtaattgcctgactgaggcaaatcagtagagctgtcagaaatgctttcaaacttaacattcattgggttcttgggcacctgaaattgcaaacaattgcattacaattaagtgagaattagcagaatgttacagttctttaacaatttgcgtaacaaaccgaggcgtcctacgccatctcgctgaaatgaaattcggatgtagacacccttgcgcttcaggactctacgctcttgcagcagctcctctgcccaatggggggcggcagcatctcagtaactcactcgaaagacgggtaggcgggaggagacattcgcgttcaaaatctttttgcctctatccgctcgccgtagcgctttagcccgctcgagtttcaatgcgcgttgttgcttaacgaagcagagtcctacacactgtctgctgctctcctgatcatggcttctccgagttctttcacctactattgccctccatcttcctcccccgtctggtcagagccgctgtacagtctgaggcccgagcacgcgcgagagcggttgcaggacgactcggtggaaacagtcacgtccatagaacaggtgaggtggcaggactgggcgaggcgcccgcgcgatgtgttctgggagcgcgagtcccgttcgtagggccgcccgggtgcggaactcaccggggaactacgactcccacagcgcaccgcggtgcctttcctctgggaagctccgggcgcccaggcttgggcttcgtcgtggagcgtttgcgcggccagcttggggaagggtcgtttcaaggttgggcttggaggagagggcagtagccgagtcccctctgccctaaagaacgagaagaatcgtgttctatgcctggaggacagaggcagcccgtgcgggtcggacagcccactctgttctgccagtacttcgggaggttctggggtgcatagtgcacttttcccaacctgccctcagcttctggaggcagagagcagggccaggctgctgtcatgccgtttcacgatctgtttaatttttgacctacagtgccaggtttgggggcccgcctcgtgggtgggcattttggtagtcattcagccatttgagcaccagctacgtgtcggacacaatattaaacgatggaagtacaaggaaataaaacagctcctgaccaggagcctggttgggggacaggcaggaaaacagtttggaaagtgatctaatagaaagaatggattttggactactaatcattccctaaggcctagaagtaggatcgaacctatcattttgaaaagtgtttggcgaatgagtatatattcatatgcccaaaaccatagttttgtttttcttcttattccctaattggaattgttcccaaggttgctatgtggaactgtttatccatctgtccctaggagaagtggttaggataattcttaacactaataaatgaacattctgctgcttactgaaataagatctcttagtgagatcagtctccaggctttaccttggagagacctgttttgtatttcctactttaagttggaagcctgtactttggcaaaattagtaacaataattgttttattgtacagttatgactaaatagaattataaatttataacagaaacaagggcttgatacgtggttattcacaaagtagcagagaaaatattttaactggagatttaaacttcatggaatttagggtagcaaaggaaatcctcacctctcgaatctagctaattctccaggttggtttgcctaccagtgtgtcccagggaaggctgactgcaaaagattgtaaagaaatttcccattgatgaaaaacctacaggatctttgcagaattcctaaatgatggattgctgagttgattcaggtcaagtgttttactta

SEQ ID NO: 76038 - DNA, 1063 bp, Homo sapiens
tgtgtggggtggggtttccttagacttaaggtcacatttcctgtcatgtgccttctctgcggagctctttgtctccctccctctccatccttcacaccttcaggtctatgaggagttcaggtacccctgatttaccagctccagatactgcattttctcttgtggtttccctacacctgcccacatctttgtaaatagttcctttataaactctcctcaaatcacccactttgtgccatctgtttcctgccaggacttagactgatccatgatcagagagttttgagcaggggagtgacacagtctgactagcattttaacaggctcatttaggttactgtcaagagtagatggtggggagtgagggtggatacagggaaaccagttaggaggctattgcagtatcctgggagagaggtgacggtggcttagctcacagtgacggtagtggaggtaatgagaaatggtcagctctggatatttttatgaaggtctctaccttgctaagctgttttgttaatgcagatgcagggagggcctttcatgacactagagaacaagacatggttgtattgttagtgcctgccttccttattgtgccatctggaatcatcccattgcagacactctgattcaggccagtaggttaatactgatagtctcagaggtagcagccttgccaaaaacaggtgtttacaaaagatactactgtttttctttgagtttgtctttgaacagaggcaaacgcgtcctccactttaaatggcatggtgtcattgaaccattggcatggttcattgtcaatgaagtgacttgaactctgaggggaatataagagaattattagtcttgatccctgccctcaaaattcttttatcttagagagataaaaaagaatatgctgtaaggccgagtgcggtggctcactcctgtaatcccagcactttgggaggctgaggctggcggatcactggaggtcaggagtttgagaccagcctagccaacatggtgaaacctcatctctactaaaaaaatacaaaaattagctaggcgtggtggtgtg

SEQ ID NO: 76039 - DNA, 1543 bp, Homo sapiens
ttcagtgcagcctccgcagtagctgggactatgggaacacatcactatgcctagcttattttatttttgtttttattttttgtagagatgggggtctcactgtgttgctcaggcttgtcttgagctcctggcctcaagcagtcctcccaaagtgctgagattacagctgtgagccatggcacctggccgagagaacacttttccttgacatctctgaacaaagtgtggttaggtcactggctgattcactctggctgggaagttgcaggtctgaagttcagcctttcctccttcatcatgtctcttgacttcttgagatcttctaacagactaaatcctagcaagtcagtctctaggtacttctgcttactggaacattataaataggtccagctttgtttgttacctttgtgtctttttttttttttttttgccaccatttccttaagaaactttttctgattagccatggcagaaaacagttggaaaaggcaagtgttcataaggaaagacaggtgggagggttaacttcatctttgttccctggggaaggaaaggaggaaaaatatcagcttactagtatagtctttcccttaactgctaaaccaaatctctgcattaacccaatgctctgacctcaataaaatgaattattcctcttgtcatgagatacagctagagattagcaaatgacgccatttatttaaatagcttgggagaacgagctctcttaaatgtaatggtatccttggcagttcgctgcccctaggcacaagctggttcaagcttagcctccccagaggggacaagacttcataatggtgagggtgtgggtgattgcttttggaggggctttgttgttgtggttgtacccccgatgactcacccgatcgggctgagtcactgtccactgcctgggctctggggacacacagcctctgtttctcacatgaacctttgattatttgacattcccttttcacttaccatcaggatagagcccttggtctctttcattccttttttaaaatttgtttttccttagctcatgagctgaagaaagacttttattcacactgagatatgagggaaaatgggaggttatagtctgggaggaagcagttgttttttgagagtggtggtagatgatattaaaggagtgaaatcccctgattcatagctggtaggtcaagtatgggtgggaaaaaaaaagtgttcctcctgggctcggatccttgtggaaatagaatatatcagggctctgggttagtttcaggaatttcacaattacccgtttttatcattgttgcctatgaaattgagtgttttaaaggatgctaattaatattggagatactatacattttggctgaatggctgagtatataattcaacatatcaatataaggctgaaggcaaacatcaccatcatagaataagcgaggatataagaataaattagaaaatttatcagaattttaaatcattatcacagtctcaatatttaacatattaatagtcaaaatttaaaagtctgacactt

SEQ ID NO: 76040 - DNA, 1543 bp, Homo sapiens; identical to SEQ ID NO: 76039

SEQ ID NO: 76041 - DNA, 1543 bp, Homo sapiens; identical to SEQ ID NO: 76039

SEQ ID NO: 76042 - DNA, 1543 bp, Homo sapiens; identical to SEQ ID NO: 76039

SEQ ID NO: 76043 - DNA, 1057 bp, Homo sapiens
tcacagctcactgcaacctggacttccccaagctcaagtgatcctcccacctcagcctcctgagtagctggggctagaggtgggtgccaacgtgcctggttaatttttataattcttgtagagatggggttttgccatgttgcccaggctggccttgaactcctgagctcaagtgatccccctcacctcagccaaagtgctgggattacaggcatgagccaccacgcctggccagaatcaatcactttagatcagtcctcagccatcacctaagagtcccaagtaaactccttataaggctgagaggcaatcgctgatatccctgctttgaacttgaccctcttacaagatttacatactctttaatgatggaatgataaaagtggtggtgtccagcagaactttctgtgataatgaaaatgttctatattctgtaaatgtctataggtgtctataaacatctatacgtgttctatattggccactagccacagttagttgtggagtacttgaaatgtgtcttgtgtgactgaagagctgaattttctattttaattaattgagaatttaaattgcctcatgtggctagtggctgcctattggacagcacagatgtatctcattgctactcaaaatgtggtccccagaccaggagcattgctatcacctgggaacttattagaaatgaggactctcagccgggcatggtggctcacgcctgtaatcctagcactttgggaggccaaggcgggcggattgtctgagctcgggagttcgagaccagcctgggcaacacagtgaaaccctgactctactaaaaaatacaaaaattagctgggcgtggcggcatgcacctgtagtcccagctactcgggaggctgagggaggagaatcacttgaacccaggaggcagagcttgcagtgagctgagatcgctcaactgcactccagcctgggcgacagagggacactccatctcctaaaaaaaaaaaaaaagaggactctcagacccatctagttctactgaattagagctgcagtttagcaagatccacag

SEQ ID NO: 76044 - DNA, 1057 bp, Homo sapiens; identical to SEQ ID NO: 76043

SEQ ID NO: 76045 - DNA, 1057 bp, Homo sapiens; identical to SEQ ID NO: 76043

SEQ ID NO: 76046 - DNA, 1057 bp, Homo sapiens; identical to SEQ ID NO: 76043

SEQ ID NO: 76047 - DNA, 1055 bp, Homo sapiens
gaacctgggagacggatgctgcaatgagctgagatcacaccactgcactgcagcctgggcgaccgagggcaaccccgcctcaaaaaaaaaaacaaaaaaacaaaacttgcttcttactggtggagtagaaatcagtggcccacagaggcttaggtggcaatgggagtgagaagacctctatttacatgttcatgataggcctaggtgatggatcctgactaggatggttagtgtggaaagaagcagttgagcaccatgttttggcaaaattcaaaggctgggaggttcccaaaggcaaggaggaggaggctggtaccacaggtccagggcagcaagttgagtggaaagtctgggaaaggtttgtgtgggaagcacgggagactcttaccccatagctacgaaagtcggtttcttcccagccttgtgttccctgcttcatgaccaacaagcgcttaagtacgaaactcagaggagggcagacagaaatgatgatagctggagagagaattaagccctttggggagaggttatattcaacaagtgggaggagaggttcccctcaacttttgagggagtgggggatcattggaaaggcctggaatctagtgggaatttggtgttttgacatgaatgctctctgactttgtttttgccctttggctgtgtacctagtgtgtgtcagttcctggagctgtgtcagagcccagaaggtggctttggaggaggacccggtcagtatccacaccttgcacccacatatgcagcagtcaatgcattgtgcatcattggcaccgaggaggcctatgacatcattaacaggtacagtgaaagccagcagtgacagaaacctagaggagttccccgcctgctgacacgcactgactgttgcctctcctacctctttccctgtttctcagagagaagcttcttcagtatttgtactccctgaagcaacctgacggctcctttctcatgcatgtcggaggtgaggtggatgtgaggtgagtggggttttgcacaggctgccacatcagttgactctagagctcatctgc

SEQ ID NO: 76048 - DNA, 1048 bp, Homo sapiens
agatggaaactaggcccttcttttatgtttcttaggagcccttaggaatatactttttgtttgttttgttttgagatggagtttctttctgttgcccaggcaggagcgcagtggtgggatcttggctcactgcaacctctgtctctggggttcaaacgattctcctgcctcggtctcccaagtagctgggattacaggcgtgtgccaccatgcccagctaatttttgtatttttagtagagacgaggtctcaccatgttggccaggctagtctcgaactcctgacctcaaataatccacctgccttagcctcccaaagtgctgggattacaggcatgagctaccatgcctggccaggagaaggatttttgagcagaattcaaaccaatgatttttgtcttccctgtgccgggtatttgaaaaaaccatagaggggaaggaaaggcagtctgtgtgtgtataccatgacagagggagaagctgaaataaaatgtgccccgagaagaattagggctgggaggatggaacagcaagaatgatcctaaatcaagtataataattttttgtgtttgtttttttttttgagacagagtctcactctgttgcccaagctggaatgcagtggcatgatcttggctcactgcaacccccgcctcccgggttcaagtggttctcctgcctcagcctcccaagtagttgggactacgggcacacgccaccatgcccagctaatttttgtgtttttagtggagacggggtttcgcaatattggtcaggttggtcttgaactcctggcctcgtgatccacctgcctcagcctcccaaagtgctgggattacaggcatgagcaactgtgcccagcctaataatgcttttttaaaaaatagcccgggcgcggtggcttatgcctgtaatcccagcactttgggaggccaaggcaggtggattgcttgaggtcaggagtttgaaaccagcctagccaacatggcgaaaccccatctccactaaaaatagaaaaataagccaggcatggtggcatgcgcctgtaa

SEQ ID NO: 76049 - DNA, 1048 bp, Homo sapiens; identical to SEQ ID NO: 76048

SEQ ID NO: 76050 - DNA, 1048 bp, Homo sapiens; identical to SEQ ID NO: 76048

SEQ ID NO: 76051 - DNA, 1048 bp, Homo sapiens; identical to SEQ ID NO: 76048

SEQ ID NO: 76052 - DNA, 1024 bp, Homo sapiens
gcaaaacaaaaaatatagacgtgcgcctttttcatttaacgtgtgtgtgtgtgtgtgtgtgtgtgtgtgtgtgtgtgtgtactggtgagaggtttgaaatcaaggctcttttctccctctagaggtttaaggactgtattggagtggactcacctgttcctatccttgtttgatctattacaatttggtggcctgttttgcagtttatctgttgcagaaaaagtatagttaatctttaatgtgtcaaggctgtaaacagaaatcctggctctgaaacagtactaacatccaaatgaatgagcatatcagaagtacctgaatgataccatagatttatggcaaccattataggtctttgaaagaagagctgaatccacttttgacatgaattgatatggctgttatttcctctgatgtagattggaccatgtggaggtagggagaatagaatgtcatgttctttcactgaagccatgccgtgagcaactctatccaaatagaatgtcacacctctcagttggagacccaggaggactgaccgtgtgccaagagtgaggacaggaggtgattacagcttactaggcaaggcgagcagtccgcccgcggagttcactgagcctcattagctcttccgtagagcttaatgtgtttcccgtttctgtctttccagaagcgcatactgtgctgcctccgtagcctcgctgaccaacatcatcactccagacctctttgagggcactgctgaatggatagcaaggtgagagaagccagggtttctcctggcctcttggagagcaggcggtcacgacactacttcagaaaaataaagaaaatgcagagggacttggaaggaaatacaaaaatcacaggagatccattagggttatctaatgatttttttaaatacttaaaatgtcttcttttttccaaactttctttaatgttatattatattttagattggcaaagataaaaaactttggtaaacaatattagtgagagcctgaattgatttaaccagttt

SEQ ID NO: 76053 - DNA, 1126 bp, Homo sapiens
ggcagcccaacatttatgtctggaccccacgctcctggccagtattcagaagaaactcagaaagcagtcagcttcagggagtcactagattgtagttaaatgatcagtgggtgcacaaacacacacacctccacggccaccagggagaaggcattccccgtcatgtcatttggggagcatgtaccccctgaccatgacgtcaaagcaaaccagctgcaactgacatgcacctcctctccctgagttcagatgccagcctcccgttatgcggcccatcgtgagcttcctggagagtttctgttgtaccctgtagacatgtaaccagcagtgtcttgcctccaccttcagaaagcctcccccggtgtagtctttttaaagattcatgaaggcttgaaggctcatgctgaaacagccaactttgtatgctgaacttaagagtttctcagatgttttaaaatctgaacaccaataaggcatgaaacaaaaaagtcccatctcccaggcagagataaggaatgtgattagggagtgcctcagttataaagacagtgttctagatttgaaccctgtccctactacatttgagacatgagtccttgggcaaattgtctaatctcttttagcttgatatttttttcttttataaggtagggataacaatccttatttttttaaggttaaaggagagaacatttataaacagcctggcacatagtaggtacttaataaatgttagtgtccctctaacccacagtaataatctttttggcacaagggaccagttttgtgggagataatttttccgtggacctggggttgggggtgggacggggggtgatggcttcaggatgattcaagtacattacatttattgtgtactttatttctattattacactgtaatatataatgaaataattatacaactcaccataatgtagaatcagtgagagccctgagcttgttttctttcaactagacagtcccatttgggggtgatgggagacagtgacagatcatcaggcattagactctcatgtagagcgtgcaacctagaagcctggcatacacggttcacagtagggtttgcgctcctatgagaatctaatgctgctgctgatctgtc

SEQ ID NO: 76054 - DNA, 1126 bp, Homo sapiens; identical to SEQ ID NO: 76053

SEQ ID NO: 76055 - DNA, 1126 bp, Homo sapiens; identical to SEQ ID NO: 76053

SEQ ID NO: 76056 - DNA, 1126 bp, Homo sapiens; identical to SEQ ID NO: 76053

SEQ ID NO: 76057 - DNA, 1067 bp, Homo sapiens
ttatgcctatagtggtataagtgaaaaacataagctacacagttataataactaggtagaaaaacgcatagaaccaaaaagactggaagaaagaacaattagctttcaggtgccatttaccaattgttgggcatcttttttttaaaaatgatttattgtcaggcatcttttagcccaggtatcaaaatataaaattgaccaaggacttagtgtacatcctatatgtatatatatttttaatcgatttctatgcagatgtttctgcacacctgtccgtgatttgtccctccttcccacttgataactgtgtggcccacagaattctttgaccatagtgattggacttcagagtgaagaagtccagttgcttgtcagtaccttagtagtattaccagaatacccagtttttgctagggtatcatatgatgcaggagggcagttactagtaatgtttcttaggtaaattctttgagctgagagacaagttagagaattccctttggagatcaattaaatttaggcttagaaaagtagaagaaacagactttattacccattaagagttctctgagctaatcagtctggttaacaagttatagagatatgctagagggaatgtctcttgaagtccagggtagagttatggaccaagttgggagcagctaccgaggtcagtctgggaaggtaagctaaacagctaggctggttcactgcctgccagagatgtggttgaggatcaccatccacgttaacagggtgcatttcaagaaagtgaaagtgccactttgaattgctgctctttgacacatgtcaaagttcaggagaagggacatgctgtgcgtaggacatggggaagatagcagttgtaccaagaatgaatggaagaggaaggggagcaggaaaccttgactattcccccaggtgagaaagtggaattaggtcattgatacttggctggatctgccgggcccttactgaccctttgcccttcaacaggtgaccctgcccttagcatgagccactggatgttccatcagcaggccctgcaggagtacatcctgatgtgc

SEQ ID NO: 76058 - DNA, 1028 bp, Homo sapiens
caaggatcaaatgagaggcggtagaacaggagggactgtcttaggggttattgtttgggcagatgaggcaagagtggtcagcactttttaagcagcaggtaaagccttggtcttggggctaattggtggtagagttttgtatatagtcacgccacatcatgttttggttaacaacagaatgcatgtacgacagtggtcccgtgagatcataatactgtatttttactgtaccttttccatgtttagattcacaaatacttaccactgtgttccagttgcctacagtatccagtacggtgacaagctgcacaggtttgtagcctaggagcaacaggctaccccatctagcctaggtgtgcggtagggtaggccatctaggtctgtgtaagtgcactccatgatgttcacacaacgacgagatcacctgactgcttttctcagggtgtatcctcgtcattaagtgacatgactgtattaggttgctttcagttgcaggtaatagtaagtccaactcacattgtctcatataactgaaaatccagaggccacgtgggcctcgggagccatgtgatcagggccatgtttctcagtctcagagcatatgtgtgtgctggcttctcacgctggtttccttctaggtagaaaaatggttataggaggcccaggccacacattctaccatcccctaataggaaagagctgcttttccccgtcatacagtgtccacgacgtctctctctttagactattttaggtcacatgcttgtgctctgaattgatcactggggcaaggacaaatcatgctgactgacttaagcctgagttactcccaacctgaacaaattactggggcaaagagagataaatgaaaattattggcttagccagtcagggcctgggcctggaggtaggagggcatcaagccctggcaaaccttttggctgccacaggtggggaggagtggcatggatgccaacagtgtccctacaggcttctatcccagtaatcactgtttgagagcaatggcc

SEQ ID NO: 76059 - DNA, 1057 bp, Homo sapiens
acatggtgagcggactttggcacagggtggaggtaccactggaagcagcttcctgggcaggaacacagggcaggggagctccgcctggaaactgctcagctgaaaaggccaagtcaaagtcacagccaagcaagccccttctggtatgtgtgtctaggaagcgagtgtgagtattccctcaggataccaaagtcggaccatagcttactctctcacagtaatggtaatctctggtttattttttatattactctggacactcacttacacaaaaccagataagctgtagatttgcttggtcactgtggcaggtggcttcactgaggagtctgttaagcgtgctatttccctacctttacagttgccccaagtgcaagggtatttaaaatggcccagtttttaaagttcttgatacgctaaccccattgtaaaacatcaacaacttcttaggtaaagaatctaagctcacagagctgtcatcttagctgagacaggtttaaaaaacaagactgagtagacaataggagccagagccctgaactgggactgaagtaagcagaattctgtttctgatagtatcatgtgtgttttatgcttggcctctgaaagcagactggctgggttcacagtcctgtctctgccactcggtggctgtgttacttctcccagcctcagcatctttatctataaaatgaggataataatagcactagcctcatgagatggttatgaggcttaaatgagataatgcttataatgtgcttgacctcaggaccaagcaagcactgaggtgcctctgctgtcattatctacacaaagcatgtaaccagggctgactcagcaaggtggaaaaagccagctcccagacacctttcctaaagtgagtaagggttgacttcttggtatatcacaaatgcttcccactcctcagagatgtgccccatccttaccaggcacagtgactaaagagagcaaggtgacaccaggactggactgacaaactcttcgagactaaagcagcccctgtgggtacattaattagatctggtgtcaactc

SEQ ID NO: 76060 - DNA, 1013 bp, Homo sapiens
cagtgaagcagcagccaccagggagtggccatttggggttgggacagggagggtgttttgggtggcatagaggttttgtattgagggccagtgatgatgttttgatatttatttcctgctacttaaatttgaatctgagtgaattgtacctatttctgatgatgtcggtcttgcaaagcgacagattcataaagtaatgatgaaatctttctttcttcccgtgtgtatttctaagaaatagagccaactgattttgtatgtaaataccaagagcaatttacctggtactaaacccgcaccccagtgcggacccttcccagccctcatcccacttcctttcctactgtcctggaacctgtctccattgtgtgatccagccctggttctggctgtggtcagcagatgccagtgaagggttttgtgtgtttaggcctcatttctttgtctttttcctactccgttcctggcatttgctgatttctagtgtatactctgtagtctcagttcgtgtttgattccattccatggaaataaaaagtatgttgtacatactgccgaagaattgtcttgcaagttaaggcttccccctttactataagactataaataaaaacttattttatccttcttggtggtggtgtcttcttacccttgttaaggccaaggtggttgatgagagacccctctggaagctgttagggcctcaatgtaagtctgagtgagaagtggaggtggcttacccggtcttgcagaaccaggagcagccataagccagagttgcttcccctttctcagctcagcctgagagagtaaatgggtggtgatggctttgttcattggatgaggcttttgaggttcaacagggatgtagccttagctgtggcaacatttctagatctagtttctgctaagcaagtgacctttgggggaattggtagcccagagctgtggttcaggttctcctggtaatgagtgcccagttcagaggtggctgttctccaggacctttcagt

SEQ ID NO: 76061 - DNA, 1410 bp, Homo sapiens
caaataaaataaaataaaataaattaaatgggttgaccttccaggctcaagctgagctgaaccaagggatgggcagtgggtggtgtcagtgggttggttactgggccaggcagcctgcatgtaggggctatttgaaaagcccaggtattttatgtgtattggtgacttgcttccaagtgtccagcttgtcattccaagtggatcttgtacacgagagctaagccaaaactgttctttggctgatacgtcttatgtcatcctttcctgctgttgtgtggcctcacaccttgtggagcctcatgctcctgggccagcttctcctctgttattgcactgctgaatcccacagggagctcacgctccagtctctccacggggcttccacggcaggacggtgacatcacaagccttctcttcagagttgggtgggattgcagagtgtctgctggctcccaggtccagctgggaaaggcgggagggaaatgaagtgtgtgagtgaacagccacccgaagggagctacttctgagcatcttgagcctcgggggccaacaagcaagcccttaggaagaacaggctggaccctgagtctgagactcggttactccccaagtctccagaaggcagtaacacactcccttggttgccttttagtccgtgcactggagaaggcgaggtcaagtgcccaactgcagaccaactacccctcctcagacaacagcctctacaccaacgccaagggcagcaccatctctgccttcgatgggggctcggactccagctcggagtctgagcctgaagagccccaaagcaggaagaagctccggatggaggccagctaagccactcggggcaggccagcaataaaaactgtctgtctccatcgtctcatcctcctttcagttcgttggtagagccctcagaaccatttaagagactctttatttttctctttctcccttttttttttaaatttttatttttacgtagaagctcttggacaacagctctcgttctccttccccatttccactgtatattttttaatgtattcccttcagggattccctgtccccaacaggaatttttaaaccaaaacaccccaacttggcagctttttctgtggaggacagacggccggccggacctctgagcacatagtgtcctgcccaccctaccagctcctccagccctgccgggcacatgcccgggggacgcctgccctgcccaggtggcctcctggcccgccctcacctctgatagactttgtgaatctgaactgctctactttgagaagatgaccggtttggagtaatcagaatgaaccctcctcctttttaagggttttttttttttcctttttctaaaaagctatgtatcgctcctattgaaagaccagatccttagagaag

SEQ ID NO: 76062 - DNA, 4390 bp, Homo sapiens
ctgctagaagcctgtttagttctcacctgtctttaaaatagaaagaaaaataaccttccttcaatgctgctatcctgctattacaaactaccatttttcacttttttttttttatacagggtctcactcttttttttcaggctggagtgtgttggcacaagcctgtctcactgcagcttcagccccatgggctcaagagatcctcccacctttgcctcccaagtagctgggaccacattcgtgtaccaccatgcccagctaatcttttgatttttttatagagcccaagtgtcttgctgtgttttctaggctggtccccaacacctgagccctagtgatcctcccacctcagcctcccagggtgctgggattacaggcatgagccactgcacctggcctacttcttacttttcaaccaaattctgaagactagtcttcatcattgcctcacttgcaactcaattcttatgcctgttaccggtgcagagacaatttaccattgggcttcggctgtcactcctccaagaaaaccaccttcactagggtcttccatttgacgtccttgtaggcaaatcaggtgactttcgtagtccttttcctcctccaactttcccctccatgacaacagtgtccctgcaattctattgatctttttaaattagttccatagcttcccctgtgttcccaaagtatgagtgtcctggaggcttggattcaaatcctgactcaacttcctattagtttacataacattgggtaaattacagctctgtgtctcggtttcctcatttataaaatagggaaaacatcagaaggttgtgtgaggatgcctgacacttagtaagtactcagtaagtgttagtgctgccattgttaccacccccatcatcattgtcacttgtgttgctatgtgcagccatggctttggagcaagatctcgcaaggctgcccagtatccctttgtgtggctcccagaggtgagagagaggcctgctgagccctttgcgtttgcttacatggctacatgggaggcctggctacctcttcagtcccttcagccaccatccaccctgtctcagggctccatccaagccatttaaagagccatttctgttcacaaagacagactcaaaattatgattctgctaattataaaaactatcaggaaaaaaattttcaggcttttactgagtacccaaggcagcacttgctctgtggacatgttgacttaccaagttctatctgatcagtcacactcacatgaagataggcagttgactcagctgacttagagcaattttcagaaaacagaaactgaaagtccagggttattccatagtccatgccataaatcccagggtttcttgctggtttcgtgtttgctggtcacatattataaactcataaagacaaggaaggccctgcccccaccttcatcctgtgtttggccacatgatcttgtatggagtggaaagatgggaggggaggattgcaggtgagtctagcatttttagcttcagccttttgctttttctttcctggactacatgcacatgcaaatttggggtatttctgtattttgtgctttaaatttttttcttgttgggccttaattcttgttgggtaccctgggaagagtaaaataaagttaactctgaaccattcttttggacttgctgagggatcagggcaccctaagtgaccaggggcacttctgctttcagcagaggatggaggaagggctgtgcttagcattctgaaggcctcgttctgagtttaaaccaatccagccttctttggactcctgttgttcccaagacactatgttctgaacatctatgaattttatcttcatccaaaaattaccctgaaatggaaactgccatccctcacagatctttttctctcttctggcttgttttgctgtgcttactgctcacttttcacttcttgatcctaattccctggtttcatgtataaatatttgaaggagaaactggtagcaaaaaggctgttactcagtctggtcattcattaaaagttatcactgaacatttgcaagtgctctctggtttcagagattgtgcattttttcccttgtcccggatgcacatgggtagttaagagctaatgttgccttctgggaactattagttgaaaaaatagcttttacataggcaaatttaaatagagggatgtaaattacatcagtgatggaaagggtagactttggagggctagatggggtcttagagaatttctagtcagatgaggaataggcaaggtgagaaatgtgtctgcagctacagaacccattaatgacaagcatgcagagcactcctctgtcctctaattcccaaattcttccttgccactctaccacctcttatcaatactaatcatttttcattccatctccagtatccagagaggaaggtattttaattagtcccttctaattatgtgctccttttttccaccccattttgtcacctaataaaccctaataaggtccctttgtagaaatgggaaacagtgtctgaagtatccattgctaggctaggaactctcattccttctgcataagctgactgactcaactaaagaaacgcatctcactttttccccatcccatcttgactgtgctattccaaacgccaccttggtctaacacagggctcaccatttcagataggagcgtgttgcatgcacacatgcagcaccaaggccaatgcgtagcacacagtaggtaatcaccccagccagaagccatctttcccgtggtgtctctagtctctgctagtcaggttacgcttgtcagcactgccctgtgatatttccatgtatagacatatttatctcctcaactagatagtaagtaagctttggggcaaagaagccatgactaatacattttgtttccccacagtatctgcctagtatcttgtacgtaatttgcacctgataaaaatggttgattatgaacaatttccttgaggaaattaccttaagggtgctaaagaggaaagcctggaaattctagtacttgtgaggacttatgaataagcacgggccttacaaacctttctgaaactcagcccaaactgaggcctataaattgagattgttaggatttaatatgagtagatctggttttgctagccacggtgtacatgttttctttgtctttctcccgctgttgtgttctggttgtttaggacccattgggcttgtaatacagaattgtcaagcactccctaccctgagtaagaagctttccggctgctcaggagtctctggctggaaggccatacttaagctactaggctaccccgccttgagcttcgcttggctttgtactattctaccagtttggctggctgcctggccataagtaactctgactatgtttgtagcctggagagaatctcccagacaagtttgatgtctaggggcacagtaacatgacatccatgttattgacttacgaacttactctagcaaggcagtacccaggcaacccacagccattgtagaggtgtggttgtttcctgaaatggcccaatctcatgctcttcctgtgttgacatcaagcaccgacagctttttatgaaagtctctttagccaggaaggctgaagtagtgacacagcagcattgttcagttcggaatagttaacagtggtttcagagtttggctggaatcttgggtcttgatgaaacacattgtacccattcctgtctcaagccaggccctagcagaattagtgacctaaagctttcatttaagtagtattttaatgtttccagacatagccaagctaaagactttaaagcaacctaaagaaccagaggagatgggaggagtacagttcaggagtcggatggctctgagtttaaagccaggccatgctactgtgcagctggtgattttgaataaagcggtgtacttctctgatccttgggttcttagtagagctacctctgagactaatcttgtgagttaagctctgtaaagcacttggcaccttgtatgtcacaaagaaggccttcacggatgcagtggctcacgcctgtaatcccagcagtttgggaggccgaggtaggtggatcacctgaggtgaggagtttgagaccagtctggccaacatggtgaaaccccatctttattaaaaatgtaaaaattagccaggcaacgtggcatgtacttgtaatcccagctactctggaggctgaggcagaagaatcacttgaacctgggaggtggaggttgcagtgagctgagatcacaccactctactccagcctgggcaacagagcgagactacgtctccaaaaaaaaaaaaacaacaacaacaacaacaacaacaggctgggcgcagtggctcaca

SEQ ID NO: 76063 - DNA, 2112 bp, Homo sapiens
gcagggaaactgctgtttttaaaaccatcagctctcacgaaatttattccctatcacaagaacaacatgggaaagaccaacccccatgattcaattactgctcactaggttcctcccccgacacatgggaattgtgggagttaaattcaagatgagatttgggtagggacacagccaaaccatatcaacccctcttctgtttgcccaggaatttcattctcagcttatctgagtgctttgcttttctcaaggtccaaccccagccacactgcccaggtgacttgggggttccatattgatgagccctgctcacaaggcctacctgcagcctgtcctctatttcctgagttccccccttccctcagtctccagctccttgccttagaggccaatatcaaatactgcccctcccttagaactctcccttgaacctctgtggccttttgtgggacctctcctcagtctccctaatttctgtgattaacttatcacctaattaaatggtatgctcctgtagggcagaaatctaattattccttctgggagactgtcatacagaatgagagaggtctcactcccccaagagtactagagagctcttcacctaacatttttcgcatcttgagattcggaaggatagagattgattactaggccttgcctttagcatttttgttttctccaacaaaattgcaaaaactttagaaaaatgggaagaagaaaaaacatgaatccctccttcctctaacacaactacagccttccctttggctatgacaaatgctgcccaacagaaatttagcatgagtcacaattgcattttaaatataacttaaatacaattaaattttcgagtagaaccaattaaaaagttaaacaggtgaaaatttgaataatataatttatttagcctaatattcaaaagtaagtatgatctcaacatgtaatcaatatatttaaaattatttattcaccaagtctttaaattcaacttaacagcacatctcaattcagagtactcacatttcaagtgtttattagccacatgtggctagtgactatcagatcagatagtataatccaaaaatagactctccgtaccccccctgccccatttaatgtgactaaaattagacatcatcttaaagtggatgtgaaaagaaacctgcctcctttttttctccccaaaagctgctattgttcaatccatggatttattgatggagtctaacaagcaaggaaatatagtgttatcaatttgtgtattccttcctggtctcttcatctacatgctccccacagggaaagtactatttatagcttgctgcttttacataatatattttttcgctaggtcatacagtgtgctcatgtttagtcattaggcatgtttcttttgggcaattggggttgcattcaatttttaaaatttaaaatttataattataatatggacatctctgtatatgtagccatttccatagactccaagaagttggatttctgggttgaggggtgcgagcatctgacctttttccgtgtgttgccaaaatgctttccaagaggattgtttttatatcctctttcttccatttctttctttttttcaagcaaattctaaagagtagtcttttggtagtgttttgagagtaccagtttcattatcactggaatttttttttttggaagagggtaactaattcagtaaacaaaagttagtaattttgtattctatttattacttgtgaaattaattgcttttccacatgtttatttactagctctatttcctcttttggaaattgtgtactcctgtccttcatcgtcaaagtttgatgcagaaatgccacaccttcatttcaagctaccaagtgcacaagaaaaaagaatgcaagatttaaaaaatgattgttttgaccccttacacaaatgtcttactcctggctttaattaagctgcttgagggctgatagctctgccttaccctggtaatcagcaaaatggtcctgtggctggggaggccctggcagcaggaagccttcaaggagccatgggtctgtgctgactctggccttacaaccttccagcctcctttgctggcattgatggggt

SEQ ID NO: 76064 - DNA, 1154 bp, Homo sapiens
aaaatctggttttcttaacaggtagatgttgaaaccaaatataatagttcccttatggcagggaacatgattcttaaggataaaggctctcatagcatttatacttttatgtacacacatttatatattatacttaatatatgaggttttatatatatttgtgtgattattaaatgactgtctgctggcactacactacaataagtaccgtgaaggcagggagaatgtctccttttggttatatttcttccctcagtgcctgcacatagtagggagcatagtgaatatttattaactgaggggaggaatcccccatcaacctggccacattattttgggagatggctcattcctgttgatgcgtttaaggctgacagttcattcggtaacctatgtctatagcatatctgagctgctagagggattgtcgtttaaatgaaatgtaaactatagccctatccacttctcctcattactcattaaggttatattagctagtcagactccaacttgggcaattatctttttaaagtttctacatcttaaattgttgcccatagttgcccaagtctcccttaggctccaggctcagcaattgtaaatgcatttaatttcttataaattatttgcatgctgctgaaaacctccaagggcttttcattgcccatttaggtaaggactggtattccatgttctgtaaataagatacccagcttacctacctgctttttcgcctccttcctgacattaaccttccagttactatacacccttgtattagtccgttttcgtgctgctgataaagacatacctgagactgggcaatttacaaaagaaggaggtttagtggacttacagttccacgtggctggaaggaagcctcacaatcatggcgaaggcaaggaggagcaagtcatgtcttacatggatggcagcaggcaaagagagagagcttgtgcagggaaactcctgtttttaaaaccatcagatcttgcaagacttattcactatcacgagaacagcatgggaaagacctgtccccgtgattcaattacctcccaccgagttcctgccacaacacatgggaattacaattcaagatgagatttgggtggagacacagccaaactatattattctgctcctggcccctc

SEQ ID NO: 76065 - DNA, 1060 bp, Homo sapiens
tctactataaattaaacattttaaaaaatggttggctgggcatggtggctgatgcctgtaataccagcactttgggagacaggcaggtggatcgcttgaacccaggcgtttgagaccaacctaagcaacaaggcaaaactgcatctctacaaaaaatacaaaaattagttgggcgtggtgatgcttacctgtagtcctggctacttgggaggctgtggtgggaggatcacttgagtctgggaggtccaggctgcagtgagctgtgatggcaccgctccagcctggatgacagagtgagaccctgtctcaaaaaaataaaaaataagaattacctttttcttgaggaaaaaaatcagtaataattgacattgtattgcaatgtaaaattaaatccacacagcagttgtataaggtatggtactgttatttgacagttagttattactgctgttgctcctgtcagtgttgttaacaggctcaagatcactatcccatctgtaacaggacaggggctagaactcaggattgccagttgcaagttccatctttttcctataccatatgtgtaagcagtttaaggatattttaaagaaatcttgcttaaatacttgtatcttgtcattgtcctgggagcttcccctggataggcctattaatcttggcagtgtgtcataccacggctactacagaaatgctatcctctgaggtggcgtatgtaggtaacactgaaatgcagggtattaaggatcatttaaagcctataatttctttctgagttcacatagttgctctgagctcaagaaaatagaccattacagttggtggttcatttgggttttgccataggtcccagagttagcaagtagaccctcgaactctgttgtttgagtcttttgtgttccttgcagtttctcaactgtatgtggagttccactgttgttccactgggaacaataggatggaattagaatcatcagccagccaaccagagtaatggagtaagggcaagatcaactgtggccccctccccgctttttttttttttttttttttttttttt

SEQ ID NO: 76066 - DNA, 4764 bp, Homo sapiens
ggattgtgggtaattctggtgcacagctcttagctgggaggagggccaagaatcagggtgatttagtagacaggagtatcttgggctgctctggagaccaaagatgggcaattaatttgcatgtaaataaaccaccttaggtagtatatagcaaacaggagccgcagacacatgccaaatattgtctcttggcctttaagctccttaggtatagtcgcagcccaacttatctttatgtagatgatcagagggaacaacagtaagttcaaaaggactagatacttaaataggttcaattctgtcgcactatttcatgctactgttagaaggcatctataattttgcgctaaagttgtatgatacagagtacctacctctaccctcaggttatgtggtgttccaaacttgactgtcctctcagcttcatatttcatgtcactatagttcagtaaacattcattttacagtgaatccagacttaacaagattaggacaactttagaagtgctccaggcatctgccccaaaaagagagatatgctatggagaaccatggttgtcatgggaaccacatgtccagttcaacagagctgtaggtgaggtattatgtttaagagaccaggaagtaactcagatgactacaggtgctcccagtctcctcttcctctgtaatgactgggacttttaggattaaataacaggagaatttcaagtcctttcgttttcacaactcttgatagatttttgtctgtacatcttctctagtacaaggattaatgtgaggcagcattattcttgtgctaagccaagttatttactcttgttccattttttgaatttctggccctctgtttgtatagatttaagctacctgaacttcccatgtacagactggctctctagattagctcagtgcaacgttgtgcattcaaggtgaatgttcagagcataatttccgtaattcctagagtgtaggtgtgatgaagttcttcttgctttgggttgtttgtgttccatttggaggggagacccctctgatggggacctgctgaagtgctcttatcatgctctccagcgctatctcttctgcctgaagccagagcattttgccattcctgatttggtgttggcagttttggtccatctccagctgaccgttctttgtgattccaagcaggctaaggctttgacttggatatttagatactgccagttagcctgacctgccacaggtacctgagagaatttattctgagtatgtggtgtcagaagttgtgccctctaagaactgcctgtcaggcactgcctgtgtgcaaggaagcccttggcaggatagcaccttggatctacttttaaaaaataggaactcagaattcagttgtcatcttatcagctctgtcataatgatctcagattcatgcatctaggttttatagaggttttagcttctgttgtatgatttggtgagaaggtcttaaactagtgccttttagtgggcttgggactcatggtgatggtttcacattaaagaagcaccagtgacttaactctttcttcccctggacacccatctggggaatctcttacagtggaggtgatcacatcttaagaaggggccactggagctttctctagtcacttcctaaccacagactggtggctcttctgtcacataagcaagttgggggggaccactgatgttacaggagagtcacactttgtccccctgaataacttttattttacttatgcatgagctggatgcatcgagctactttggatgttcctgtcgcaagcgttgctcacccctttctccccctttagcagagcctaattctggagactcctaactgcccacctcgagaaatccttcccagtccactcgccagggacagtgctgacagcgtgtacttccaggctgtaccccacccaccttgtaccaagcaaaaggagtgacattcctaatgtgttctttctcccattcttctaggctgacaaacgggctcatcataatgcactggaacgaaaacgtagggaccacatcaaagacagctttcacagtttgcgggactcagtcccatcactccaaggagagaaggtgagtttcctgagaaagctgagtagctggccactactagcttggaacttgttgcagagcttagcagagcactcacctattgggaaggaaatgtagtcagagatattcaggtagcatggttgccttatttttgactgtttggaggatcactgcacaccttacgtactccagtttatccttaacaaaatatgtcagatataatggagctatttgtgagataatggtaggagttatcttttaaaatttgtattatttgtaataaattcaagaaattataactatacactatagtataaagagtggccaagagttcgtttgggataacagtaaagattccagaggtcattaataccctagacctccatgagaattcctttcctatggttcaaagttaatactttattgtaaatgagcacttgcagaaatgtgtgtaatgtatgtgaaaaacaacctgggcaccattgattttccagccccaataattgttatttccaaggcgtataaagagcattttaagctgtgggacaaaagacttgagtgaagagacatgttcatgtgaaacagaaaaaaaataaccattcttccccactcccttctggaacctagtgttttccctggagggctaggcaccagctgtttctacatttgaaaaacaaaattagaagctttgagtaaaagcctatgggttagggtcactccctggaatttggagaaaacatctgcatggctagttccatccttgacagagagtgtagttgtctgtagcaattcattggaataactggcaagctgggaagaggacctgtgtttttgctttagtgatccagtgttttataaagaaggaactattctgttaagaacaatctttgcttttgggtgcactttgatttagttctgtggtgggggtcctggatttgtttggttatccaagatcaaatttggaacccttatgctttcattttttatattgtcactctggtaagttatggcctctatactttatctaaggtgtggctttccatgtggcgtaaacatggagaagttctgacctttataaagaacaaaacaggccatgtacatacctggtattgcaaaaccagaatttgccatgggttaagcctacttagtgtggacttgatttaatgaccttaaaccaaggtacttacctggaataacaaccttcctgggtacaacactaagtaccacggaaatctttatgactagagacagactcacccctttagtcaaagtaaacacatgccaaagattatctcttaggcttctttgacctgttgacagttggtgcttattcctgtaccatagtatcaattaaaattgctttggtaaactatatggaaaagagctgccttctcctaagtctcacctaaccaggagtggcactggggcagtgtttctcaaggggtgagttgcggaccacccacatacgattcactactgaatcagcctttctggatggaaacctgggaatctgtatttataacaagcagtcagatgattcttaggcattcttaagtttgaatacattgggagaggtgggtcataggatcacaactataccttttccttatccagcctattttacaatgccataacattcttccttaagtccttataattacattattctaaatcctattttctcctttctttcttcaaggaagttaaaggtttgaatttggtagtcttacaaatggaatagtctgtcatttgttgtggctcatttatttactcattcatgccattcaacacatacttactgagggtctgctacatgccaggcactatcctagatactgggagtacagcagtaaacaaaacagacaataacaggagctcttgctctgatgaggaaatgattaaaaaatgaagtaagaatttaaaatatatgtattatgtcaggtaagtaccatggagaaaaacagagaagaagagttgcaattttaattatggcagagaagaagagtgttgctggcaaggtgacattttagcaaagctttgaacaaagtgaagcaaagagtagtgcatctgtctggtaatgagcattccaggcagagggaatgcaagtgtggtagcactgagacaggaacctgtaagcattcctgggccaggcagggaaaacagaggccagagtgggtagagtggaatgagtgaagggatggtggcaggagatgctggcagaaaagtagcaggactaggagagaggagtggtccaggggaaccagattctagagccagtcaacaaaaccccaatttgagaatttactagataccattctaatttcagaatcctcctatcctgtgttataatccaaatatgtcctactgacagtgaatgaaggaaatgtctataagctctcaacctcttcctctttaaaaagcgagctgccagcgctgtttcataggtgccgtgagtcgaacagaatattttggtcccttagacttatcagttctcactaaacctggcgtttttttaagtgtggtatttgaactaaaggaaataggctcattcttagattgtggtaattaaggttatgacattatgtaaataatcatgaaatgattattttaccatgtgagttttgggaaacttagattcttaaagggaaagcctttgatttgggtctctctgtgttccagtctcctttg

SEQ ID NO: 76067 - DNA, 2837 bp, Homo sapiens
cctaggatttttccttttgattttgggggtaggcaaaggaagttggtttgacactttgtttttaatttaacacatctatttgttgatatttctaaatattactctgcacaatgtaattacaacagcatggagagaaaaagcagatatgttataaacaaattttatagtatatcaaacaactattgtgactgtgtagggtaaaaaggattccattttttcccctctgtgaatgcatctgcttacttctcaatatttaatatggataataaatatattttttaaaatttaagagggagctattcttaagttttgccttagaaaaaaggtttaaaaaaagatgtggactgtgaacaaccaaatacttaggtattcaggactacagaagatgttgaaaaagttatttgaaaagggttctgtggatcctaatataaaaacattcatgtatgttttataatgtcactacaatatataggccttactacatgagaaatgtaagatactgagaagagagttaggaagttaggctaactctaacagaaagtgaaactgatttggcaaatatttttttctattgcttcagtacaaacggaaaacagcttctccaatggccagtaagctttgttaaaggaagtaaccccaaagagtattcttactactaaattcagtacatcgcaaaatcccactgatgttatttttattatattttggagggaagaggttgcattttaaagataaatttgtgggacaggtatattatattgcaagggcttccttttgctttatttctgtttgggaaatttctttaggaaagagtgtaagtatacaggaaatgtatgggttagtgtgttggtcaggaaatgcaattttttttccagtgaccatccttgatggcacctgactgagttgcagttgcagtatacttgtgaggggtttgaaaacagatttgtgcaattccacttctggacctttctggcatgaaatatttttaacttctcagagctctttgcttctttaggaatattcagaagagaacgagcttggtagcctccgagattggaattcactcaggaaactactgtctgttttacctgcagtcagttgcatggcaaaagtgctgcacaatgcatgtactttttctctgcttagagtgttgacagtgatgcttacagtgataacaaatgccagagttagttcctaaatgtgcctgtgttagggtaaaagttgttcttatgtctaaaagaatttttccaagatgccagtaacggtgaaatagttggtcaaagaattcagcttggtttttaattaaaatttcctgaccaaggcatccttctctgaaatggctatagtatgaggccctgtttggattatagcatttgccagttattttaggcaccaaaagaaaaaagtttgaaaacaaatacatacattagataatgttggaaatgtataccaggcaatcagctacaagcaggacaggtattggaaaattgaaatccatgtctttctcttagggagcttggtgagtttatcccatcctacctgcctattattttatgttataatttttgggttgattaaaatgaatattttaagttgcttagaaattgagctttatcctatcttgttcttatctatcagaagtaagaaatagatcttttcggatgagatttttgggtctgtgtattctcgtgtccttagtctctaataagaatagcttgataagaatcataagcaacacaagcttccctctaaaatacaaccttcacattttgtaaaggtagtaaatattgagtgggcaactaattccctatatgctgagaattttctgtattagaattgagatggttccccttataggtggggttagctgtcaggtagcctgtaagacatggcattgttctggagaaccttgtgcatcctggaataatgaagcatttatttccccgtgctatttgcctagaacttggaggaaataagattactgactgatgtgatgccttgaacaaagatgcagtctctctgcagtaagttggaaggaaataattttaagagatttccctcaattttgaacagacctccttagcctagatgacttcttgccaacatagcaacttcttggctaacaaaataatgtttgtcttcaacatctaacaacacttaagatacacgtgcttggtagtgtcaaagatggacaaattgtaggtgaagatttttattctgtctaccagtgtggaaagttgggtagaaatataactgagaggctgaataaaaactttggcagagatgtcaaagctggaagtgatttggtgcgggagtttctgttgagcatctgtggaccactgcatagccccttagtatttctgttagggatgccctggaggaagggttttctggcagacatccagacgtacaaatccagcgtactagaagagtgggcagcatccagccactgtaaccataggatgtgtaggggagatgtttgggagcctgctgtacagtccaagaatacctctgtggtctcctagaatagggcctaattaattccacaagggggttttccgtaccatttgttttcattactgaacatcattctcagtacaggctcatctgagtagagttttatttgttcaagacaattgtttgggcttgttttttaaaaccagttttgcatttgggggaggatattagatgccttacactgggagtcttcacccagtttttcttcttcaactctgaaatcttggccctctcaaaaagggttgccagcaagcaaagacagttaacaaggcagtgataaagcctgcaaactagtcctccaatgggggtggggatgaggc

SEQ ID NO: 76068 - DNA, 1065 bp, Homo sapiens
gtcagtattgccagatcttcctatttttaattttattttatttatttatttttgagacagagtctcactctgtcaccaggctggagtgcaatggcgctatctcggcttactgcaacctccgcctcctgggttcaagcgattctcttgcctcagcctcccgaatagctgggactacaggcgcgtgccaccacacccagctaatttttgtatttttagtagagacggggtttcaccatgttggccaggctggtctcgatctcttaacctcgtgatctgccagcctcggcctcccaaagtgctgggattacaggcatgagccaccacgcccagccgatcttcctattttttaagaaagattagaaatctaaaactttatgttatttttctgatttttaaaatgatgtgtggaacaactgtttgggggcttgttagaatttgcaggatgtcactttgatacctctggtataagaacttgataaccacagggtaaaggcaagccatctcagttatacctgctcttcattagagcaagcaaagattgtgcaggttgtctaagcagataggcattaagaaaacttatttattgagagctgatatttccataaaatccggggatgtagttgttccaaaagtcttaaaaattatccctgggtaatagtcattaaagataatttgttttattttatttatccttgaagtattctcatatacttatgcatatatttgaaaattgaattcctttttcacatttacttttatccttcatgtttggggcctagtctgttgaaaactttttttttccctgcaagtctccagttgtaaaatctgtgctagggcttgatcagagctggagggtaaggatcgtttagccttcctttgcagaattatcctttgaattgaaattatactgacttcccagtaagagaaagttgtgttttttttgtttgtttgtttgtttgtttgtttttttggtgaaattttggctcgcagttcttgaaagctttctgcttttcaaaattttcatccatatgatcgttgatataaatttgttattaaattattata

SEQ ID NO: 76069 - DNA, 1909 bp, Homo sapiens
gcctcctctgccgcctcgggaggaaaatctcctgacaactcgcggtctgcggactacgactcccaggaggcgccgcgccgcggctctccccgcccccccccgcccccccccccctccccgggacgcgcaggcgccttgggctccgtcaacaagccgggctggcgtcgcctggatgcggtttcttccgggatttgtagtttttctggagctacccgggccgtctgttagagggacaagaactacaagtctcggctgccccagcgctgcgagcctggtcacgtggcgggggccgaccgggcgtgcgtgccgccgttgatccggtgctgcagtgaggaggtggttcttgcccgtgttgtgtgtgtgtgtgagtgagagagcgagtgagtgagtgagtgagtgtgtgtgtgggggggactcggcttgttgttgtcggtgacttccccctccccttcaccccttcccctccccgccgccgctgcagtggccgctccctgggccgtaggaaatgagcgataacgatgacatcgaggtggagagcgacgtgagtcctggggcttcttccttcccgtgcgggttgtcaggcggggacagcggccggggctcttagcggggcgacggcgggagggggccgggctgccgccgcctccttccccttcccctcggggccaggagtgcctccgtcgcgttcccggttcgctcccctccggctcctggccggagcggcctcctgggactggaggttgggggaagacacgcggcttctgggacccccacctcctcccttgcgggagggtgctgcggcctcccgctcccaccttccccggctcaggatccgggggacaaggatggggggcgcccgggatcccattgtccggatccaggggaaggggacggcgttcaggacctgccccttcggactgcgatcctctcctcccgtgacccgcggatcctgggggccggggaagggcggagaggggttgggggtgcctagatgcccgagctgggtctgcagggaggagacagtgctcgggacccctctggcccaggtcggatcccggaaggaggggcggcgctcgggacccctctaccctgctaccggatcccgccgagggtggaagggtgggggcaaggggtggggagggaggaaggggtgtcgggctgactccccaccctccgcttcctctgccgccggcattttctttcttattattgaatgttaagtgtaaaaataacttctatattttctatttttttttttctctcttattccaggaagagcaaccgaggtttcaatctgcggtacgtctcctactctccatttcatttttatttccgttcagttctattcctttttggggtcagagagaaaaagagatcgtactattacttttaatattgtagtaaactctaatgttaaccactaaggtgaggtggggcctggttctggagggtgggggggttgcaaatcccattattctagattctcaggtgataagttcagtgattctaggtgagtaagaggagctgtatgcaaagaattgaattgttctgtagttttcagataggggatccagatgccactatgtaagtggaaatgagaaatgcagcattctggtctggtagtattatttcagggcaaagtggtcagaagatttatttaggaacaagtaggttttaaaccatatctgtataattgtgtgaagctgaagccacatgcggtaatcgcctttaaccaagtcatgtgactgctatagacccgtagaatctagcacaacatggtattctaatgcaaaaattggaaatgtagaggagccaaacgttacatcatcaaagtgtcacataaagttattatggtctgattctctgtatttgaagaaaaggtataaagaaaattaaaaaatagctgaag

SEQ ID NO: 76070 - DNA, 1051 bp, Homo sapiens
atgcccgtgcgttatgggctctttctgagtgctgctcgggctagaaagcagggagtggaccctcacaaagatccgcgagggactgatgcagggcagttaaaggcttgagtgcagctgtactcccttttgatgtgcaaatgacgagctggcggcttttgagtatcaacttatttgggaaggttaaatgagtccatatttatcagttctaggaggtttgtcctgcaggattgagtgggttgtcgggtgcagcacctgttctttcttcacagtggggattgcaatcttcagagacgcagtgtatttcttaagtggcagtgtcatgcttagggtttgtcccggatgagcttttattttagcattttgccatataatatatagattgaggccttggttaaaggcacggacaggtggtgtttttttccttcctatgttttaattattcacagtttatttaaacccactcaggaaggtggacccagaaaagccaaattctgtagtacataaccccaaatttcaaggttttgcggaacaaattcaacacaagttttgtgtcagtttagagttaaacgcatctcaagtaactgacttaactggcttgcctctatgaaaactgtaggcaggtttcattatagattttttttttcttgttattccggcggttaggtgcatgtttattttcttgattaaatttacattctatgttttatgactaattctttaaataggtgcatcatatagaaagtattttaggagagaaattattatttaagcactacagtatatcagatatatgagaaataatggagttgtagtctctgctctttaaaataactgtaaaaacatcttaaaaccctatgccaaataataaggccctgtaccttgctgtccttgtgaaatctggtatgtgtatagaaaatcttaattacttgatttgtaaatactacagtagtattgaaaaggtgggaattcaagcatttgtaattgtgatttcacaggtttagtgtgtaaaaaatgcagggagttagagatgaataggctataagacacgtac

SEQ ID NO: 76071 - DNA, 2196 bp, Homo sapiens
gaaacagatgcaaaaatgtatctttggtcaagttgtgagttaacttgaagagtgtcttgtgtaataggatagtgattcaaaataatttccataaagtacggccttatataggttatattttgaggatatttttgaatttaaaaagtcacctgaagttgttttcctacaaatcagttctgtttaagatgtatggaatcgaaaaaaacaaaacaaaactaattctgattacatcctgcattgttttgttgcaaattcttaccagttatttttacgcaattggagtgtccttaaaagtggtgaatcttaaaatttgccagtggattggaaaaaactgttaacttattatttttaaaaatgctgttatattagtacattggtctggagggggagctagtgccaaagcaaagtatagcttaatagctgtttgaacttttaaaacacccaaaaccagatttttatgaccaaaagaaacataaatttttaattaaaagagtaggaaattgatgtgggcatatatatgtacatagttatttgtggagtgaatatattgtgtattacaaattagtttaaaaaagtcttttcatgcgctgcaataatggaaagctaaatgcttaaagatttattggatttctcacttaaaaatctctaaaatgtacccccaaacttagagtatgttatagtattttcttaaccttcttgtcctgttcatcagaatctaaggcatgtattcttgacccattgtacatgttgtgtgttcttaaattttgtttttataatagctacaatcctaaaatttcaaaaacgaagcttcaagtagaatcttatatgggcgaaggtattaattgtgtggtaagctaggtatttatcaaaagtagatataattccttttttttttttttttaaagtagagataattccaataaaaaaatggaccttttagacatctggagaacaatatccccaggtcacttaacccttatctcctgcagtataatgcagtgcgtccagctgatctaccaaattgaatgtgtgcctttgaatacgaagcagttgttttgtggcctgtggcatttcatttaggtttctaagctgtaataaattagtatgttaatttacttctttccattcacatattctttaaatccaagcctagaaactgatagttatatgtatattaaaatcattggaatattggtttttttgcagatagtgtttgggctgtttattatccatagctcttcattatgtaaatagaatctcaatgctgataaagtaaatagattcttccatttcattaatggttatttttgatttatgataaactgcatttaataaatctcttgatttagttaaatggtggatacatcatttcatattatagcaaattgataaatataaaagaaagttttacaatcataagagtaaatatttaaaaaaacttgaataagttactttactaaacataaaattaagatttttaaacaactctgaaactaaaagtattactattatggtacctttttttttttttcccccaaagagatgtgatcttgctgttttgtccaggttggccttgaactcctgggctcaagcaatcctcctacctcagtctcttgagtagctgggactataggcatgtgctaccacagccagctttattatagtacttttgtaccctgcatcaatgctgcttctgttgatacttttcaaaggagatatcaacttctggtcttcaacagtagtgtagcatcctcttattgattctctggctcatatttcactaccgtatagtatggagtttctttcttggagtttgaattgtttttacattgcagcttgttatagtgaaacaattaaacatatttaaaagtaaaagatatttacgactgatttttaaagaacctgtaaaaaaatctccaacagaagaatattatatggggatgtgtagatttaacattttattttctttaatttttttttttttttttttgagattggggttgggggttgtctctctatgttgcccaggttggagtgcagtagtggcgtgatcacggctcactgcagccttgaactccctggttcaagccattctcccgccttagcctctggagtatctgggattatgggtgcatgccaccatgcgtggctaattattttttaatatttgtagagatgagaccttggtatgttgcc

SEQ ID NO: 76072 - DNA, 1033 bp, Homo sapiens
gatatgcaatatgccctttaggttttcatggctacctcttttatcccttctactgttagaatgtataggatcattaattaactcttttatcatttttattttaatcttccctagcaacaatttaatggcttaaacaaaaacctttccttattattattatttttaaatactgtgcaacaggccaaaggaaaaaaaacaatttatgtctgttgtttcaatttggttaccttattttttactaaaactgttctttctgttgttaccagtgaccttctgaattgccaaatggggattcttcagtcttgttgcttcagatttaacactgtgaaccacttttcctcctcccttctccttataactttgctgtcctcttggctcatttacaaagtcaacttgtttctcaagtatttgccttacatgtttttcattctctagattctttttcttgaaatgttacctattcttttggctttagtgagaatctcttccaggtgacccctatactgtaagttcctgaacgtcagtttccagctggagattgtcatctaattgtcatgctgtcatgcttaacccactcaaatttgaattttcttttcttttaaaatgtattttttctactttccttttttttttttttaaattattggcttttccttcccattatccaaacttgaattgtgaatcatctttgtattccccgtcagattcattcgcttgtcaaactatcagaggcctgtgaaccagagcaattgcatcttaaacaggagttgggtaaaatgaggctaaaacctactgggctgcattcccagacagttaagacattctaagtcacaggatgagataggaggtcggcacaaaatacaggtcataaagaccttgctaataaaacaggttgcagttaaggagccagccaaaacccaccaaaaccaaaatggcaatgagagtgacctctggtcatcctcactactacacttccattagcaccgctctatgacagcttacaaatgccatggcaatgtcaggaagttaccct

SEQ ID NO: 76073 - DNA, 1011 bp, Homo sapiens
taggttctgagttgctgacttgagggaatttgatacacaggagtccccaaggccccccagtggatacctgaaaccatggatagtactgaaccctatatatacaggtcaggcatcccaaatctgaaatccaaaacgttccaaaatctgaaaccgacgtgacactctgaagaaatgctcactggagcattttggatttgtggatttgagatgctcaactggtaagtataacacaaatatccccaataggaaaaactccctattcccattagtttttacttgatattctgaattcttaagtgtgatttttttttctaatttggggatagctcctatttttgtgagagaaattaatgggaaattttgagatggtaactagaaattgtctttgcagtgttaaatttttagttgggaggctactaggctgggtggctctagctgtttaagttcctgtctaagcaaaccaaagcccaacttagaaagtaaaaggaaactagatattttgccaactagaaaccacctaagtaatctctaactagtgtctttccactctgaccaatgagatatgttttctttgtcttccgtgttcagcctataaagcttacagcccacactgctgtgaatgaagctcttcaaaccttttatggttcagagtgctgcctaattgatgaatcattctttgcacagataaactcttttgtctgtttttgctttaaacaacaaaggaacataaattctgttaattgattgtatgaatataacagtgaaaattccctgttaggctttggttatcagtattttaggaatactttttaaaacatcccctttagcttttaatgtgttttggttagacaagatgatgtatgtgtcagtataatgccaggctcacaaaagttgctaactaaatgttagttccttcaatacatacattcattccctgggacatggttccaaaagtagattatcataagaattctgtgagaagctttgaaaaaactacagatgtctatggca

SEQ ID NO: 76074 - DNA, 1126 bp, Homo sapiens
ttcttccattctaataaaaagacaatccttttatttctttttcttgcctgatttcactggctaaaacctctgatataatgttgaatagaaaaagagcagacatcttagtcttgtttctaatcttagggggaaagcatctattctctcacaattaagtatgatgttgtagatttttcaggatgcactttactgggctgaggaagtttttttccattcctagtttgggtaaagtgtaaaagaaaattaggaatggattttgaattttgtcagttttttttaatgtgttgaaatgatcccatgtttgttttttttaaagttttttattagccagacatggtggcacacacctgtagtcccagttactcgggaggctgaggtgcaaagattgcttgaacttgggtggtagaggcttcagggagccaagatcatgccactgcactccagcctgggtgacagggtgaggccctgtctcaaaaaaataaaaaaatttgttaatatggtggattacattgcttgatttttaaaggttaatccaactgtatgtttctgaaataagcccacttggttatgatgtatatttggcttcttgatgttgccccacagttcactgatgctctttatattctttttgtgttcttttctctttttgtgttgtatttttggatcgtctttattggtatttttccaagttcatggatttttttcttctacggtgtctaatctgttaattctatgtagttttttatgttagatattatagttttcatctttagagttttgatttagatcttttttatatcttccatgtctcttaatgttttggctatatgaaatgcatttagaataacttttagactaggcgtggtggctcatgcctgtaattccagcactttgggagtctgaggtgggagaattgcttgagcccaggtattcaggactaccctggccaacatagtaatacttcgtctctattaaaaaaaataataataatttttaatgtccttgtttgctaacatctgggttggtttcagtcaattgattgctttattcatgttttcatgcctctttgcatatctggtaatcttcagctgacagacattgtgaattttaccttttttgagtgtta

SEQ ID NO: 76075 - DNA, 1085 bp, Homo sapiens
agaggccctcaaacagagtacagctcaagtctcaggtttaccacttttttttttaagtagtacatggggcaaattatttaatatcttattttgccataactaattattaataaatatctactttataggtgtgttgatgattaaatcaatttgtaaagaataatgggctgggtgcagtggcttgtgcctgtaatcccaacactttgggaggccgaggtgggaggattacttgagcctaggagttcgagataattctgagcaacaagcgaggcctcatatgtataaaaaatgaaaaacttaggctggtgcggtggtgtgtgcctgtagtctcagctacatgggaggctgaggcaggaggattgcttgagtccatcgaggtctatccaggctgcagtgatctgtgattgtaccattgcactccagcctgagcaacacagcaagaccctgtctcaaaaaaaaaaaaaaaatgccagcaaatagtatgtgttgaatatttagttataagtattattcactctctaaaatagtcttcttagtaaactctaattgaccttagggtaaaaaaatttttatatttaaaagctcagaaaaattcagcttagttatttttaggctggtgtttggtctcacatacacacttaacgcccctttcaaactgttatggaacaatgtttttcaaactttaatgtgcatatgggattgtgtagggatcataataacatgtagattcttattcagtagttttggaataggatgagatgttacctttccaacaagctcctgttggtaatctggatgtagctcattcttataacacactttgagtagcacagttatgcagtgttccattaagtggttctcattcctgctttcagtatattataaacacttagatattttttgttctttatgccttggctctgtgtcataccagttaaattagagctttgcctttggggttctgggcatcatcgtcgtcatcattgtcgtcatcatcatcatcattttttctttcggtaaaaatatcctggatcattctcttgtgaaactagcattaagagccaccactttagttatctgaagga

SEQ ID NO: 76076 - DNA, 1827 bp, Homo sapiens
aattttcctggaaggcgtgagactgcttggtaattgtgtacatatttaagggaaactgagtaatggaggacagaatagaacaattaacaaattcatgcatcagataacttgctttcattaaagccattgttactcttatttattgattgttcctgatgataggacatctgcagatttcaaaaagtgtgtttagtgtgaatttcatactgatggcatttctctgcttttgacagtttcatatacttaaacttgtcattaaaacacagcatcttgccttgagccaaatgaaactttgaatagagcccaaatttatgaaattgttaatttctctttacatctagattttactttcagtaatttctatctgctaacacaaatagaaaggtaatctttcatttggttgccatccttcaagagcctctctctgcccttccctccctgccttcctggatctttccttttgtctttacagacctagattttgaaaggttctaggttccttttgtctgttgatactatgtgaatgttatccttaagtttttaattcaggctacaactagacagataatgtgtctcacaattagctggggtgagagagttaaaatggaagttaaggattcaggggattcctacagatgggtgaagaaaaaagctcaatgttaggatccttaacaaagcattttgattggcatatggagacctttgcgtgaacacaaatgttcatatttgaatatttatagaagataatctgtcaaaattactgttattttaatttgccaagcttggctgattgccgcagttggatgttagttgaattcaagttgaagagttgtaaatatgttctggtgtgggacatgctttttgtccttgaagctgtttgaatttcttacttctcccacctacacccccttctttaaaactgcgaggcttttttgtattagttgaactttcatgttcttttttaggaaaaaatattaaagtaggatgttaactgtatggattaaaaattttttttaactaaatttgttgacatttggtgatcaggaattgtttaaataattttaactatttgtccaatctttgcttcaaaggacctgttcctggagactcaaatgtagggatatatatcttatttgaatggttttgtgtgggatatgtttcacattaacagcaaagaaaatgtagacttctagataattgatgtttcccctttcttttatctcacttgaacagctaataattttagtgacccagattcaagcaataatacctgtcttcataattgtcatgtggttttgtcagcttcttatattctaggggaaggaagataagacttttttaaatatattgaaataacttggttaataaatactttttttctctttttagaagccaggaacctgttctctttccatagtgtctcctcactcagaaaacgttgtgttctcctgcctcagcctcctgaatagctagggttacaggcgcccgccaccatgcccggctaatttttttttgtatatttagtagagacggggtttcaccttgttggccaggctggtctcaaactcctgacatcaggtgatctgcccgccttggcctcccacagtgctgggattataggtgtgagccactgtgcaggagaatggcttgaacccaggaggcagaggttgcagtgagctgagattgtgccattgcacgccgggctgggcaacaagagtgaaactccgtctcagaaaaagaaagaaagggaaaaaaaccccaacacactgtattaattattgatgcagtatcactattcttactgagactacattattttagctttag

SEQ ID NO: 76077 - DNA, 1032 bp, Homo sapiens
atttggatttagttattaataaatattaggttgaactgcacttttaatctaaagatttattttggcactcatttttgcttattatgacttctcattttcttaattagaggagagaagacatgttctttgggcgtcctggttatgtctagtcaatagtcttagttttcacaggatagtacggaatgttaaattattactacctattttcttaatttatttcaataacttgctgtttttatcaggaaaaattaatgaactaatcaaaatgttccattctatacatagtttgctcataacaaactcatttttttagaaatgttatagcaaccttattttttttttatcctccacaagatcattttagtgtagttactggagtttcaaatcatacgtaattcagtttgaaaactatgtctatggttctgtttagtaacattttagatgatattatttaaaaaggttaacattgcttagttaaaagttatcattattcttttaaaacaagttttatttttcagaccacacagtcctttgaattctgatgcatcaagtttcaaacagttttttgtttttggggatacttacctatgagatctccagaaattgtatatttagctatgaaaatcttcagaaactgtgagcatattaagcacacatataagactgtaaaccttagaggatgattttagatttctttctcttttttactttttatttttgaaaaaaataagcccattccagtttaatgaatatgataatttgaaatccaggtagaataatgtatctcattttcgccctcatattttaaagtgagatagtttataaaatggagaataagtcatgttgttagatgttgactcttatagtataaaagtatgaatcttatatagtgatattctattttaaatgctttatatgtttaaataatttagaagaagggaattatagaaaaactgaaacaaaatgcttgaattaatactataaacatgatgttagcatttataattgatattttaaattgttacataaaaa

SEQ ID NO: 76078 - DNA, 1180 bp, Homo sapiens
tgacaatttgcctgtcacctgcagagttaagtggtataatggcagctgaacaatgagggaggagagtggagttgagaactggtagaaatgaaatcactcatacagggaacatgttttttcttgagataatgaacatatagcccaaaatatgtggttgagtacattttgtttttgattgattgttcaaagatataatttttaagtcttcatatataagttaatgtataattatgcaagaaggaaaagaaagtgatgatggcactttgaggactttcaggcttagagctaattagtctgttatctggtagagcactaatgtacatggctgatttaatatacagattaacagatttaaagcttttaccctttacttgttattaggcagttaggttatcttccaacttgttggccagtcaacaccaatgtgtttcctccaagaatctcagtatatgctattttatataccttaaataatttaaatacatttcttactctttccacagcatgtagagcgcatgaagtacaggacaataaagcttcctacacatatcaccaggaggatctctttgaaagattcactgcaggactaccagagagaataatttgtctgaagcatcatgtgttgaaacaacagaagtctattcacctgtgcactaactagaaacagagttacaatgttttcaattctttgagctccaggactccagggaagtgagttgaaaatctgaaaatgcggccatggactggttcctggcgttggattatgctcattctttttgcctgggggaccttgctgttttatataggtggtcacttggtacgagataatgaccatcctgatcactctagccgagaactgtccaagattctggcaaagcttgaacgcttaaaacaacagaatgaagacttgaggcgaatggccgaatctctccggtaggtcctaaaatactgaatgaagaatgatgaaatattgtactttgtttttaggtgtagggcttcattccgctaggaaaaatagttaattatttttataacctgctgtctttgccacaacttagcatgacagttttctatctctgtgtatttaatacagaacaagcttgtccaacccacagcccatgggccacaggtgacccagaacagctttgaatggggcccagcacaaatttgtaaactttct

SEQ ID NO: 76079 - DNA, 1040 bp, Homo sapiens
aactcacctgagatttttagcaaaatactatttatttacctgattggccttgatagctaataactagtagagcctaatctctgcctgcaaccacagttgggtaatcaactggtagtaattagtaatattcttgggcttttagaagcttttacaggctgttttaagaatttagaggtgttgatggtataataaatttagagtagcatattaattattatctgctatattgatatcaagttttagcatcactagatttctaaatgatgatttcattctagtgattgcatatgaccattcttcccagtaatacagttaaatatacttgtagcttttgatatcattgatcatgaattgaccctagcctacctctttgcagtagagagaattaagcggtttagagttagtatttttgccattgtggttttaccatttatcttgtattgtaggttcagtgcttcgatttatggcagtttagatgtgtacctcaacctctaagcatatcatggagtctgtcttatcaacctttcaggctgatgcagagacatgtttaacttaatcactgttgctctgattctttttatcatcttcatattgccaaataccagtttatgaaaagggtaccaaagctgcttctttctgcttttaaaattaccatattttttttaaatttattcatttattttattattttttttaccaagttctgtttatggtaatttataacaattataaaactaaagtacaggagatgagccatttttcaactgtgttgactgaaactattgaaaaacaatctgttaaagtagcaatctcatctcccttacctagtttgcatttctcattatcagtaatatatagggcagctgtgcttagactaaattgtgttctccaaatagtgaatgatacttatgttaattatgctgatttgctaatgtacaaaaagacattgtgggggattatgtaacaaaagaaatgactgtgactcaaggggtacactgggaaagattgatagaatagcttacagattttttttaagttta

SEQ ID NO: 76080 - DNA, 1041 bp, Homo sapiens
aaagttaagtttggtgaaccttcaaaccttctattctttgtgttttatttcatatacacaaaaacagagagagagacagagagaggaagggaggaaggaagatcttactaagttctctgagatgtgatttgattgagacttatattaagctgggatgtggatattctttcttgaatttcggatttgtttcaacaaaatgtttttgtatgattgtcttctaaggaatccaagcttattttcaagtggtgctagaacattcatcttaatattcatgtgcaaagggatacatttctttatgaagtcatccttattctgctcatcacttagtctctatcagccagataatgattcttcatcgcctgtaatggaacagtgtctcctaaaataaagtttgcattagaagaagaatctccaggtggaaaagggtgtttttcatctagtagttctaattctgttttgcttcctacgaccacacatcttttgggtgtgatttccaaacttaagaatgattttagattaaaaataatcacttactaaggatttcttacatgccagtcactatgataaaggttctgcattcattatgttactttatcagcacagtagtcctacaaggtatgcattatttgttcctgtttttttttttgttttgttttctgagacagagtctcgctctgttgccaggctggagtgcagtggtgtgatctcggctcactgcaagctctgcctcccggattcaagcgattctcctgcctcagcctcctgagtatctggaactacaggcacacgccaccatgcccagctgatttttgtatttttagtagagacagggtttcaccatgttggccagaatagtttcgatctcttgaccttgtgatctgcccgccttggcccgtttgtgctaggatgctaggatgacaggcgtgagccaccacgcctggcctatttgttcctctttttttttatttaagatggagtttcgctcttgttgcccaggctggagtgcaatggcacgatctcagctcgctgcaacctctgcct

SEQ ID NO: 76081 - DNA, 1071 bp, Homo sapiens
aaagaaggatcataatataactaagagtaataatttcagttgtttttagtcttcctggcccttgaaaatcagtactcacacattttacatatttattcagaaagacactgtgttatgccttgagtggaatacaaagatggctaaaacaaagaccctgtcctaaagggagctacttcttacacacgtacacacacacacacacacacacacacacaatacaatacaaatataacatcttacattttataggagagaaatagatgaaatgcttattggagttttgagtaaggagacatcagggatagtcttgtagagaatgtattgtttgaagtaaactgtaaaagatagttaaataggatttggacacacagaaatgaaggaaaagaatgtaccagctggaggttatcagctaagcagtggctcgtaactgggaaagaacagtacaggaacccatatgataagtgtggcagttcagtttgtctggaattttaggttgtgtgaaaggagggatggagaataagttggaaaggtaggcttggaaacagattacagaggttaaggtttatggtacataggcagtaaggggtcactgaaagattttacttatttgttttataaatgttattataacaaatagaaagtattggtaaacatcaagtctcagaccctttaaaattaatttcactttgttttttgtgttcttttctagttcttattaatatgtacacaccgtcttacatatatgtaagaaaataatttatttttgattttgtttttctgcttaatatgccataagcatttttctattttggagtcacaacctgcttttgaaatgttttacatacaaaagtggtatgagagtggtacttaagtgatattaatctgaaactagtattttagttgaacttgattatttgaagagactagaagcagggagaccatttaagataagaggaccatagtgcaggtaagaagtattaaggtatgtggcagtttgctttggaagtgaagagacaaatttgagagagattgggaagataaaattgataggcctttccaagtagatgaaag

SEQ ID NO: 76082 - DNA, 1059 bp, Homo sapiens
cgctatgctactggtggatgggagactgtatttaggcctgtaagtgagacatgcacagacagatctggcatctccactggacactggtcaggtaaggagcttgtgcagcatatgagatctctgggctgtttcactcaattaccagattattagatttctaggtagaccttcatggaacatacttatcttttcctctggatccatgaatactatacattatccagataaaatctagaagaacagtattttatcttaaaagtattttattatgtatttcatttctgatgctcatttttatgtgaatttagcaaaatcactgagtttttttcagggagcataatttaatcttttaataataatgatatgactttcactctataagatgatttcacattattgaactcattttaatatgaagtaatcatcatataaagtagtccagtttatatggactactatatatgagtagcatgagcatgcatgagaatcatctggaaggtttcataaaactccattttctgttaaggaaggtctaggctgcagcctgagagttttaatatctgacaaaagttttaggtttagggaccgtgctttgagaaccactgaggtggaccttgctggtaactttatcttcaaatgaagcctaatttgtttatgtgattttaattgtattcaggaaacatttaatgaatagtaatgtgactaaggtactatactaggcattataagcagatagaaacatcagtaagaaatttcctttctctccaaggaagtggtgaaggagtagaatatagaaaagaatttcttaccgctagtctagtgcttttctttctacaatcatgatctttaagatctaaagttgggctaccttgttaaaattgtggctttattgttttgtaatcttggacaagttacttaacctaggtcttagtttccttatcagtaaaatgaagagtaatcactttattgaattgttggtagattaaatgaaataatatatgtaatgcacttagtactgatatatgaacttatatctagtaatttttagctattatgaat

SEQ ID NO: 76083 - DNA, 1006 bp, Homo sapiens
taatgtattataattagcatataatgagcagtgaggatgaccagaggtcactttcctcaccatcttggttttgatgggttttggctggcttctttatgcaagttgttttatcagcaagacctgtatcttgtgctgaccttctgtcttatactgtgatttagaatacctgacctcctgggaatgcagcccagtaggtcttagcctcattttacccagcccctattcaagttggagttgctctggttcagatgcctctgacaactccagagtagagaagtggtgaacagaggccacagaaatgatgagcagtctacctaccatgtggagaagacacctcagaaatggagagattttatatttttgttgcatgatggtaaacagctgtaaccaccagcttggcctttttggcagctggctttatttagcattttaagctttaagtttgcctctggtgcctggaattgttcaattaaaattttaaatttattcttatcatcctctaacacaaagcttacttatacaataccaaatctagcctgagacacttgttcttgaatcgattcttttttaaataataagttcagtatgaaataaatctctgctgaaatgaaagaaagcacccattatcatggaactgtggttcctgaaagctacttaggtaggttaatagttgaggcctattaatggatatgccatattattacattaaagccattctcaatgaaggattaaagttgttagttttaagagttgtttttgttttgttaagaacagtttgtacaatgattgatttttgtcaaagaattgaaaatgccatctaatacaggtagggagaggaggttgattgtcagtttgatttaagtcttaaaagttcatcaattagcaaagaacaagaaactgtttttttaagagggcaaattttatgtatctgtttaccatgaaagagaacttaagagaagctgtatttccacttttatcaaattagaacctttatgtcaatattaac

SEQ ID NO: 76084 - DNA, 1073 bp, Homo sapiens
catgctctgttagttaaggtttcatgccttttgcttcatagttctttttcttcatttatggatatcccctcttcttcccaattaaacccaaaaggataaaatatagccatttttttgagtaatacctttacactatttgtttcagctatgccaccagaagctatagattgtaaagtattaattagctctctttctagagattttacacagcgcaaaaggaagggagagtggagtgacctatgtcagatcatcagtagcagtgacagtagcagctgtggtttggcacataagaccatactccacaccccatcatctttcttccacaatggaagcagaggcagctggggaagaagatacattgtgcagtctgagatggcagcaagagttaaagatgggagtgtgatggtagggtgaccgttgaagctactggtactttttagattggtggaatttatgatactagggagatttgctgctccagttcctgttttagtaggctaagatgtacgtctgttttatcagcaatttgtacagcactttagctatgcaatactaaattaagctatacagtgttacactaactgccctctttcctcatattccatagaaatcttaagtgttttgtttttgcttcctttaacatgactctgcgttttcattttcttctcttacgatgtggccagaatttctacttaataattcttatatcttagggtattgacctttacgtataatgaagaaacccaataggtctccctgatttaacataattggatgataatttagcagaaaaattacaaatagccttaaagccattgtgaaacatctcattcgtaactcctcaagtatgctaattacagaggcagctgtaaaattcacccagagcaaaaaggaatccagtgtgctgactgacagcttcatcctgcgagatcctgatggcatacctgcttattctagtcgtttctttcaagggggcatgacatgtagtgaaggaataaggggaacttaagagtggaattgtgatttttttttttaaatagggcaatggaggaaagtgaggctggaatttagct

SEQ ID NO: 76085 - DNA, 1041 bp, Homo sapiens
attttgattgtcattttatttctctctctttttcagttggtttcaaactcttaggaaatgtaagaggaaaagcagttattaccctttaaaacctcactaataatctccctttttaaccgaacttcagcttagagttttccataagcaatggtattcatatagaatttaataacatgtttttttcagtgaatttatatttatggttaacatctataaaagaaactcatttaagttttaaaagatgaattggcttttaaaatattaaataatacatatggtacatggatataaaaatcataaagatggtacacaaatgactaaaatttagaaaatactgaacaagattatttgtgagatttcttttagattaaaattcttttgcatgtatatttgaatagaatatataatgttatatggtaaatcaagtaaaagaagggctttctaacatagcatgtactatgttattttctttcattttgaaatatgttgttattgaggaaattaagcttttgttctatgccaattttcttctataagtgtaaatatcttttagtagtttactagacagtagcgtgtatctttttgatagcatatttgttggtgatgatttttttttaatctatttttctttcattgaatgcagtctagtctggatgagggttttgaactggaaatcttgagtagttattatttagaggtgaagaatcatgtcatcactgtataccctttctagcacagtgttcacgtagtagttgttttagctcgttttgcattgctataaagtaatactcaaggctgagtaatttataacaaaaaaagatttatttggctcatggctctgcgggctgtgtaagaagtatggtgccagcatctgcctctggtgagggcttcagaaagcttgcactcatggcagatggtgaagggacatggcaagagaggagggaagagagagaggggtgaggaagatgctgggctctttttaacaatcagttctgctgagaactagtagagcaggaactcactcattacctctagaacagt

SEQ ID NO: 76086 - DNA, 1028 bp, Homo sapiens
ttgtaatgtcaatgaagaagacatttacaaagtctaacccaaatctgaattatcagaaattctaaattaaaaattttaatgaggttttatcacagtatttgtattctaaaggaaaagctcagtgaccaaatatgaaagcagtttgaataaactcttaaaagtcactcattacaaaaggaaaaaggagacttcaattttcagctatttcatgaattgataaaggacattttgatgtgtgtatgtgtgttttatatgatatgccaataaaatttaatatacagggcattccagaatggtttctgccccactgatggacttcaaatatgtctcatcaactacagtattaaatgccataattaaaggtctcctttctgtgagaagctcttagtcaaaggagaaagtctgccttctgataggatactgtgatatctatgaccatctataaattaatttattttttcaggtaccccaattatgaatttattagtgataactctatttcctggtcagctggactgcacaatcgatacacagaaaattcacttcgtggagtgatcctggatatacattttctctctcaggcagacttcctagtgtgtactttttcatcccaggtaagtgtcagtagggcattttaaaataaccaatactttttggttgtataggagtcagaaaaattatttgtgtgtctatgtgttgttaatgttcattattgtgactcaggtgcaatttttctgatactcagtaatgatcccttttgtgaaagaatggaaagatcccataacatagccattcacatgcactaatatttagttgtttgcaagtaatggttgactacatctccactgaagccagttactggagttgtttaaagtacttggcttgttcacagcatttaacagaaacaacaagtaattaagcttacttaatactttctaattttgcatatagtcaatatgtaaccagaatccatccatttctacacatcatcgcactgatactgagaggcttaaatgccctaaattttg

SEQ ID NO: 76087 - DNA, 1085 bp, Homo sapiens
tttatttttattttttgaaatttacttaatctttctgtggcttagcttcttcatctgtaaaatatgaataataatagtacctcacaggtttgtcataatagttaaatgagttgagacaaggtgagggaagagcacactattataacactgcctgggacataatcggtgctcattaagttcagctgctatctttaatggtcattcttatgagaaaaataaagggccacacctgtgtagcactggtatgcttgcagaggcctacagtcacatttgtcatttttataatgggccacctcagtgtctgaaatctctactattattataatagttatttctttggtttaagaaaacagttctgttatccaccaaggttaacacatgaacaactcttgatagcaaaacatacactaattattaggattatccccagaagaaacaggtctctaagggtgtgggacagggtgcgatgttgtttttatgagagtaagacgtttaagagtggagaggaggaaacacatcacggttcattgtcacagtagagattgtggtcatcctaagagtaacacaaggtcctgcattcctggctagggatgactgaagagtgggtgaagacaccctgaaaagaagactgtcaggtttacccaagactgtctttggtcttatgctatatctttctggtgttacaatatgaacatggagaataagatttacaagagaaaatatatatagcagtttcaagcatatgcagactgcctgggttccaacctgaatttaccacttattagtataaccttgagcaatgccttaacttccctttgacatttgtaaaacaaacataatgatagaattttatggggatgctgaaaggaatctaattacattagataatgtctaaaaacaatgtctgacagttagcaaaagctcagtaaatattagcctctgtcattgttattgtagtttgctattattggagctgctttaattatttagtttcttcttttcctgagtcccacttaattttgcttgccttctatgagcctttggctgaatttgaaattcaaaagttccaaatctttttgatccct

SEQ ID NO: 76088 - DNA, 1882 bp, Homo sapiens
caagcaattctcctgcctcagcctcctgagtagctgggattacaggtgcccgccaccacgcccagctaattgttgtatttttagtagagacagggtttctccatgttggccaggctggcctcaaattcctgacctcaagtgattcgcccaccttggcctcccaaagtgctgggattacaggcgtgagccactgtacctggccgcgaaggtttaacattttttttctagtaagtagaagagtcagagtttctacccagggttgagtggttctaagtcccactcttttctttagttttaaaaaagtcataaaatttttaatcacccaaataagcacagtatacatagacatcatattcatatagagttgaagtcttccttatttcctgtctcccagagaggtgcaccacggcacttaggtctacatcagccccatgcatgacttacattattactccaagtaaatgtacctgtggacatgtgattgcagtgtttttcatttttaacttttatttgtgtaaataaaaaagtatctgcgacaggtctcaatcaatttagaagtttgttttgctaagattaaggacgtgcctgtgatgcagcctcaggaagtcctgaaaacatatgcccaaggtggtcaggctacatcttggttttatcattttaataagacatcaattaatacatgtgctctacactggttctgtctggaaaggcaggataacgtgaagtggtggggagagaggagggcttccagattataggtggattcaaagagttcttgactggcagttggttgaaagagtttatctaaagacctagaatcaatagaaaggagtatctgggttaagataaggggttgtggagaccaaggtttttattatgcagatgaagcctccaggtggcaggcttcagagagaatagatagtaaatgtttctcatcagacttaaaaaggcgccagactcttagttaattctctcctggatcaggaaaaagatctggaaaggaaagggaatatctacattttcctcataagagacagctttgcagggccatttccttttagtgtctgctgtctgtcatgttggtaccttattgctacaaacagtctgctttgtcagtcttaaggcctctgttttaatgttaaatgctggtcagctgtgcccgaattccaaagggaggagggtgtaatgaggcatgtctgacccccacttcccatcatggcctgaactagcttttcagatcaacttaggaatgaatgcccttgacagagaggaggggttcatccaattggttgggaggcctagaattttatttttggtttacaattggtatcagactgtgatttactctttttccttctgtaacttgttttttactcaacttttatgtcttagacatttccatgcttctgtgtctagttctagttcatttattaactgtggaatcatgttttattatttgataagccacattttatttatccattttctggttgatgtgcattctggttatttccaattttccagtattacaaatggtgctgcaatgaacatgcttctatgtgtctctgtacacacatttgagaatatctctagaagtgggatttctgggtcatagagcacaaacatcttcaatttcattgattatttctgaattgcatgccaaaatgcccacatcaatccacactcctcttagccacatacgagttttcatttcttcgcatgctcatcactgcacagcactgttagaattttacattttgctgatttgatggtgtaaaatggcatatcattgttgttttccccatttctttcccctactttctttaatgaatttagaagaagagctgccacagtctgcaaagatgtttctgtgtgctgattt

SEQ ID NO: 76089 - DNA, 1009 bp, Homo sapiens
cagccatctgcacttgttaagcccctcgagctttggcaaaatagcaatttgtttagattcatattgaattatgcttttggaccagtcactaaccaggcaacgtaaaaaatatacagagtctttttacaggtgtatttcattccatgtagtgatctttggggtggaggcaggatgaaccggagcacacccttttccaaggagagaatttaatttcttgagtactactgggctcagcaccttaccacattctcttatgacagccatggaaattagatgctgttattctccccgttttgcagatgaaaaaactgagtcaagtagcctcctcgggtactcagagtacccgagtcaggactcaaacccaggcagttcaactccagaacctgtgctcccacctactgaggtataaggatgccatccagcacagcgatgctggaccttactgtcattaaggggcaaggtcaaagacacaccatcaggagaaataagcttcctcataggagactggactgcattttctataaggaaaattaatgttcatgttggagaaacatgaacattaattcctagacaaagcagtgagaaaatcagctgtgaggctcgctggtgggaataagctggggtgtgggctctgtctctgctctcactctcggtgcctgagtgattcttactgggattagttggtgctttggctggaaaaagaccgtctcaacccttgttggatgtttggcatccctggccctgcagcactaaatgccaatagtgtgccccagtcactgtggctgtccccaacactccctccatttccaaatcttcccactctacttgggaaccagccagaggacatgagatgctggagtcggaggaggtgggaagggaggggacagcacccctcctctgtgtttgtggaaaggggtggagtttccactgtaaagaggagggctgggtggggcacctgaaggagaggggctgcatgaaaacggtagagactgagaaggggagagagatg

SEQ ID NO: 76090 - DNA, 1010 bp, Homo sapiens
tttgccccttgcaggctaatctcaacacaggtgctggagtggtccgattaaagtataaatcaggtcatggcgctcaaaccctctgctcaaaaccctccaatggttccccatttcactcaaagtaaaacccaaagtcctcacaatggcattacatgctctgcctattttggctatgatgacttctctgacctcgccttcttgtatgactcctgtcattccctctgttccagctacgttcctgtcttcccacatactgtggccccctcagggcccatgtgctggctgctcctctggctagaatgcgtcttccctacatatctgcatggctctctccctcacgctttaaaaatctttgctgaaacatcatatttttagccaggcccaccctgaccaccctagagggcaaacagattttccctgatccctaatccttcttatcctctttaccttactatatattttccacagcagtttccaccagtatctaacatacccaatcatgtatttatttcatacatttaggctctttttcctcacagggacataagctccataagagcagaggtttttgtctgacttgtctagtggtgtagctctagtatttaaaacagtgccaataggagcttaatacatattgttgaatgaaatattccccttaagttggaattccttggggggaaaggagctctagggatctcaccgaagcgctttctgatgcatctcatgtttctacttgctagcccttctttcagtatggttgctttccatttaatctttgggcagccatggcatctgagattctaagtaccctcctcacagcctcgcctgttttctctgctttccagatgaggttgtgctgatctggtgaactgccctttggagctcaccttagccaggtcataccgccactctgggaaccctggaatgttatttgttagtacgggctttctgggcctcctgggtcccttacccaagccctgacctgagagtccgtgaaactgaatccctcc

SEQ ID NO: 76091 - DNA, 1049 bp, Homo sapiens
taaggtaatgcaaagactctaagaagaggataactcattttcaggtgtgcaaagtaaggagagcccacttgtggcggtggtgaagagagccggccgtgtggaggagggagcgctggtctggctttgaggatgcaggaggtcccattgctggtccctcactccctcatcttcaccacctcctggagaggcctgtgggctgtgcagcctctgatgagcatgtgagagagactgttgttgctggtctcattatctgtccttttaggcaaaggaattcctatatgtttcagaacagagagctcactgtgtgcctgtaaatgccaagaaaccaagacaccatccgttagggagcctgctctgtgtgctgaagcaggaggtggggcacgtgggccatctccaaaggctcatagtgctggtatgggacaccccaaagctaggcttggactccagtctgtagaggcagggtttcctctcagtggtgcttggcctcctgcgtcaggttcccctgggggacttgttagacatgtagactcctgagtctgcaaacctaccacctcagaaccagggggactgggtctgggaatctacgggtttagtaatctgccctggatgcttctagcacactaacttggagaaccaccaccctgaaggaaattaccccagcccagcaggaccagcaagaggcctcctgtgcaggctccaaggccctgtgggcaagtacagtgctccctcaggccttacaaccaccctgttctgcacacgtttcctcttctctcctagtggcttccaaacatacctgcataccagaattgcccggaaatatttttcttaaatgtgtattttaaggccccctcccaggttaactaaatcaaaatctcaggacaggtgccagaaatcaacaagtaattttagaaaaaaatataaaaaacactctctagtagtctttgatgcccaatcagatgaggggaccactgggctctgccaatcagggtcatacgcagaggacaccaataggtgattcattcttaactcagtgctcaaggatccaaatc

SEQ ID NO: 76092 - DNA, 1054 bp, Homo sapiens
tcataatgctgggatgcaaagaagaatcctgccccgtcgctaaggggtgaaataggaggggacttctgcggcagaactgcccaccagtctcctcctgtccctgcactctcttcccagaggacttacatttactctaatcagacaaggggagtcctttcatcatgtcccctctctatcccaatctcattgaccaaaaagggaccaattctgactggccagaagccaatcagatttcctctcttggaaaatgaagacgaagtaatcaggctgctgactgggatcaatgcgcaggcgctagagtgatggtccaggcacgcttgctgcaggggtctccaaatgggcccagctccagggtctgcttggtcaccttctccttggatcctcttaatccagacctttagaataaatatccctttatttaaattcgcacaagtggtttctgtaagtaaaatgattcctcgcttgtgcaacccttaccctactttcttcatcaaaggacagtcacagaaaccatgtcactgccttgactgtaactagtccccaaatcctgaaatgtcagatgcccaccactgtgccaggcaaaacattcctgagccagcgccacagtcaggttcagtcatgaatggagtgggaccgtatctgaatgtccctcacctgtgctctacccactagcgtacatcacgttgcttgagtcttaaaaccatgacatccgtgttctttcctctagttgccaaagggaccatgctgaaggggctgaccttctgtgtcttgggcttactcagcgatgttggggtcatcataccagtagggttggctactgattgtactgcttgattgtcttgcctttaccgtaaggtggtttagagtagagagaagcagggcttctcatgacagaggtagcttgggacatggatagtcgtccagtgaggaggcagctgggctcaggcgcagagctcctggaggcaagtataggaaatgccctgtcagctggagaagtcagtcgttttggttttatttctttggtttgcttgcttttgcttatttattttctcaa

SEQ ID NO: 76093 - DNA, 1240 bp, Homo sapiens
acttctgccttagagatattatatcatgattacagggatcaaggataattatcaattagaaggaagcacacattagggtaatgtgtcattgctgcaagctaaaaccgcataattggaaatgatgacatcacacgttcctaattacacattcataaatatgtagcaagtgatccatggggaaactgaggcaactttttttttttttttttttttttggagacagagtctcaccctgttgcccaggttggagtgcaatggcgccatctcggctcactgcaacctctgcttcctggattcaagcgattctcctgcctcagcctcccgagtagttgggaaacaggcacgtgccaccacgcccagctaattttttgtatctttaatagagatggggtttcaccatgttggccaggctggtttcaaactcctgacctcatgatctgccttccttggcctcccagagtgctgggattacaggcatgagccactgtgtatctttctcatgtgtgtgcttatagaaaactaggggtgatgattctgattggccactgggagcttctctcaggctgaggaagaggggtgagaagtagcgagagactttcctgattttggagggaggggtttaggtgcttacaataattattcccattgccactaggtagggccactctgaggaaccgccctggtgaatgaggtcccatgaggctcaggagtatctgtggtgaatattttgcttccagaatgagtgccctccccatacaaaaattaggaaatgagctttattagaaccatcttgtgtgactctgaaaccaagggatgaattgttcagtgcttaagaatttataaactacatttcacgtaacacatgtcctcatgtggtcctcccagcaactgtaatggaaagtttagtcgttattcctgcttgacagtcgaggaaactgagagccagggagttgcatgattactcaaagttacacagccaagtaagtgtcagaggaaagtaagtgtcagagcaggggaggacatggattccttaactctaaattctgatgtatttcctttgttttgtatttccatttattgccccatctggcccattgtccagttggaaccctctcactatttctgtctatggggcaggagaaaagctggagctttggtccagaggcttcattaagactttcgactgaatgtggagtgaaggttctggacctccctgacactctgatggggatcctcatct

SEQ ID NO: 76094 - DNA, 1071 bp, Homo sapiens
agacccttttgggaaagagcatgtagcccacaggtgaggcaagacctctgcagggagaaagccaggagctgagcgcatgtgggagccctagccctctggaaggctttgaaggcctctggagggagtggcaccagctgagctgaggcaggaggaggaatggcctggagcccaggagagtgcttagaggggactgcagagaccatagtccctctggctggagtttagggtagtggtaagagatgctgcggggtggagaagaggctgggaaagacttcctaaaggaggcgacaagtgacctaaatgatgtgtagagttggccaggcaaagggtttggggctggggaggctgagagccctggggggtcgaaagggagctggaccacagggtgctcagccaatgggtcccatcaggtggtggggtcaagagaagtggctggggggtgggaacacgcccaccacacagctttgaagctgcacgcaggaagctggatgtgattctggagagcactctggctgcagcgtggatcataaatcccagagggctaaaggggcagcgatggtggggatgcgactcctaggagtctgggtgactgttgagggccagggtggtgggaaggaggcaaaagggagatgatgtgtgggataaccagaaagcagggcggggagagaatggggtccagggcgacttctaggaacccaacagatctgcagagcggtggcaggcacaccattgtgaggtctgcagccttcctctctgagttcaggtcacacttccctgacttccctttacttacagggggagggcttcttcaccaaagggaaatgactgctgccgtgggctgctctgctccttccctgctccttccctgctgtcccccaactccaactataccccactgcccaccttggtccttggagtccagcacataccattggtaggtgtccacataactctatagccacaggggggccactttcagatatacattctacatggccaggctggggctatggcccaggtggcttccttagggcccatttggccgggctcagtgtctgagctttatgcgca

SEQ ID NO: 76095 - DNA, 1715 bp, Homo sapiens
actgtcccaagtgcacgttgtacctgaagttgtcataaccggtaggacataaaaactttaagcattcagttcgatcggtagcgggagcggagagcggaccccagagagccctgagcagccccaccgccgccgccggcctagttaccgtcacaccccgggaggagccgcagctgccgcagccggccgcagtcaccatcaccgcaaccatgagcagcgaggccgagacccagcagccgcccgccgcccccgccctcagcgccgccgacaccaagcccggcactaccggcagcggcgcagggagcggtggcccgggcggcctcacatcggcggcgcctgccggcgggcacaaaaaggtcatcgcaacgaaggttttgggaacggtaaaatggttcaatgtaaggaacggatatggtttcatccacaggaacgacaccaaggaagatgtatttgtacaccacactgccatgaagaagaataaccccaggaagtaccttcgcagtgtaggagatggagagactgtggagtttgatgttgttgaaggagaaaagggtgcgaaggcagcaaatgttacaggtcctggtggtgttccagttcaaggcagtaaatatgcagcagaccgtaaccattatagacgctatccacgtcctaggggtcctccacgcaattaccagcaaaattaccagaatagtgagagtggggaaaagaacgagggatcggagagtgctcccgaaggccaggcccaacaacgccggccctaccgcaggcgaaggttcccaccttactacatgcggagaccctatgggcgtcgaccacagtattccaaccctcctgtgcagggagaagtgatggagggtgctgacaaccagggtgcaggagaacaaggtagaccagtgaggcagaatatgtatcggggatatagaccacgattccgcagaggccctcctctccaaagacagcctagagaggacggcaatgaagaagataaagaaaatcaaggagatgagacccaaggtcagcagccacctcaacgtcggtaccgccgcaacttcaattaccgacgccgacgcccagaaaaccctaaaccacaagatggcaaagagacaaaagcagccaatccaccagctgagaattcgtccgctcccgaggctgagcagggcggggcttgagtaaatgccggcttaccatctctaccatcatccggtttagtcatccaacaagaagaaataatgaaattccagcaataagaaatgaacaaaagattggagctgaagaccttaaatgcttgcattttgcccgttgaccagataaatagatctgcattatctatgcagcatggggtttttattatttttacctaaagacgtctctttttggtaataacaaacgtgttttttaaaaaagcctggtttttctgaatacgcctttaaaggtttttaaattgtttcatatctggtcaagttgagatttttaagaacttcctttttaatttgtaataaaagtttacaacttgattttttcaaaaaagtcaacaaactgcaagcacctgttaataaaggtcttaaaaacaaaacaaaacaaaacaaaaaaaaaactttaagcattcagaacccagatacaaacttctgcaattgcctcagcaatagtctaggtcatgtggtacccaatccagtgtttttaaaaatgctactaaactacaataaagaagcatctttaaa

SEQ ID NO: 76096 - DNA, 1648 bp, Homo sapiens
taaaggcgtattcagaaaaaccaggcttttttaaaaaacacgtttgttattaccaaaaagagacgtctttaggtaaaaataataaaaaccccatgctgcatagataatgcagatctatttatctggtcaacgggcaaaatgcaagcatttaaggtcttcagctccaatcttttgttcatttcttattgctggaatttcattatttcttcttgttggatgactaaaccggatgatggtagagatggtaagccggcatttactcaagccccgccctgctcagcctcgggagcggacgaattctcagctggtggattggctgcttttgtctctttgccatcttgtggtttagggttttctgggcgtcggcgtcggtaattgaagttgcggcggtaccgacgttgaggtggctgctgaccttgggtctcatctccttgattttctttatcttcttcattgccgtcctctctaggctgtctttggagaggagggcctctgcggaatcgtggtctatatccccgatacatattctgcctcactggtctaccttgttctcctgcaccctggttgtcagcaccctccatcacttctccctgcacaggagggttggaatactgtggtcgacgcccatagggtctccgcatgtagtaaggtgggaaccttcgcctgcggtagggccggcgttgttgggcctggccttcgggagcactctccgatccctcgttcttttccccactctcactattctggtaattttgctggtaattgcgtggaggacccctaggacgtggatagcgtctataatggttacggtctgctgcatatttactgccttgaactggaacaccaccaggacctgtaacatttgctgccttcgcacccttttctccttcaacaacatcaaactccacagtctctccatctcctacactgcgaaggtacttcctggggttattcttcttcatggcagtgtggtgtacaaatacatcttccttggtgtcgttcctgtggatgaaaccatatccgttccttacattgaaccattttaccgttcccaaaaccttcgttgcgatgacctttttgtgcccgccggcaggcgccgccgatgtgaggccgcccgggccaccgctccctgcgccgctgccggtagtgccgggcttggtgtcggcggcgctgagggcgggggcggcgggcggctgctgggtctcggcctcgctgctcatggttgcggtgatggtgactgcggccggctgcggcagctgcggctcctcccggggtgtgacggtaactaggccggcggcggcggtggggctgctcagggctctctggggtccgctctccgctcccgctaccgatcgaactgaatgcttaaagtttttatgtcctaccggttatgacaacttcaggtacaacgtgcacttgggacagtttaaagatagttaatgatagtggatataaatacgtattttaaatagtaatcgtcttcatcatttcaattttttccccttttagctgacttctctggagggatcacatcacctcaccactgtgtcactttgcagtgtggctgaccaagagcttgttcttgtggtgggctgctcatcagcccagccatttccctgttgtttttggtcagtgggagattagcaga

SEQ ID NO: 76097 - DNA, 1033 bp, Homo sapiens
gcagcatatggggcaagggtacataatttggttatttttattttgtagtgcctaatattgtagatggttattgttaaattgagaaaattataccagtggcatactttaggttgttcaatcatttcagtagaggtggcagatgagcctatatgagtagctaacgcagaactagataatttttgctcagtttagactatggagactactttttattttggctgtggaatatgactagattatctaatttgagatgtattatataacccagccctttacaaattttatattttatctatttagtacttttctatgtcccctataatgcctaatcataggtgtcaagaatatttgttcttttgggttttctcattttattttaaaagtgttacttctgtcattcactctctgacacactgaatctaaatctatcaaattaggtaataagatcaaactggcatttcatataatttaagcaaaacaatccttgaattacctggattaaatgccttctttaaaaatcgttatttcattgcaaaaaaagaaaaacctagcacagaaaaagactgattgagtatacaaaatgacagcctgaaggccaggtgcagcctccaagcatgtatttactctacacaatatttaaaagtcaaaagtcacaacaaattcacatttccagctactcttgaaaatcattaggaactgtcaggattacgtctctacattttcagctggagctgattccccatccccacaccctactgtagacaaggcctctgctctcctgtaaccctgcacagtccctgctgcaatgggctcagtgcttgcacttagcactcccactttgccagtttctctcatttaaggcatctagcaggcatgtggttgtgctagtggttacctgataaagacactctcactaagaaggaagtgggggcttctttcatcaaggaaggaagatatcccctctaagccccctcaggaggagccttagaggggaaatcattttcccctctaaaattattatgaaaatcatttc

SEQ ID NO: 76098 - DNA, 1032 bp, Homo sapiens
tgaaactggcccataattagtgctaaatgaatgcagaatcaatttaacacattgatccattgcctgtggctacattaatttgtggtaactaagccgtatagtaccctatcatttaattctccaggaacataaaaggaaaggagagaaaagaagatgtggatctgtggctgttccaattcaaagttgattcaatgttttacatgcaaggagaaaaaatatctcctgagacaatcaagttgaatggaacccttatttactaatttagacttaatttgattctggagctaaaaagcttttggctctttaccatatagatcccttgagatgaccttcagctaattttgaatgaagtaaaacagggacttgtctgtcttcctcataaccctcttctcttctgtcttttaaatttgtatcttaatgatttaatactgcttcttgttgcattccaggattctttccaattttatgctgtccaattcttattagaacataaattgaaagaaaaatatgcatagaatactgcctgaaggatagtcagttcagtcttactagttttctaaaatttacctatggatcaagccagaccagagagtcttatgtacctgaatcaaatcatcttgaggtgatttgtcacttaaaataaatttcagattaatatctttttatcagattatgccaaagaacagaggagaaacaacctaggaaatttagattctgaatttattttgaaatattgttgaagacattggcgactatcatcacacaaacaatgtcctgcccccattatatggacctggaggagaaatttctctcagatttcaacaccaggaaaaactatgtttctcctgagcaattggtttgttgttacttcatgagtttcataaatccatgtttctttttactggaaaattcagaaccaaatttgtagcctacctctgccagctgtacagtactctcattatgcattcttgtgtatttgcccggcttcaacttattttcccttttctttgatttactcatatatttatttaa

SEQ ID NO: 76099 - DNA, 3008 bp, Homo sapiens
cggccccacgccagtatctgtgcttgcctggacgagactcaggtgttaatcagatgaaactgctcctcctcgggttgtccctcgcgggccgggcgtcccctcagccacccatggggcacccttcgcctccctcgggggatgggggatcggcttgcgtccggacctcggaaagtgtctgccttctgcctttccgcgcaaaaggccctctgtctgcctcgtcgtttccttagcgaggacgggctgcagcctgctgccggggatccagctttttacttgagagggcaggattcccctactcgggctcctctccccctcctttctgggaacccccaccccggtagagcgtcccgaggctggtgaggagcgcacttttcccgggtcgcgtttccctccctcgcgaaagccgtgtgtgttctgcatgtctgattccgttgcgctgaatttggttaatatccgtcacttcggcgatcggcagttgctgcagggcatgacttccaagatgaacagcaagcggatttgtaggggtttctgctgtggttctgtaattggcaaggtttatgtgtaattgagtggcgagacgggggttaaagaactatatttggaatctgagggcttagtttggagtgaaggaaatccaagactcagtgatgtgatttcggaaaaagaagcagtgtggacgggaatcctagtgtttcccttacttctttttttaattttttctttaactgtcaaattctgacaggtcgagacggtgctcgagaagggactaaattgaataagacttgcttttattattaggtagaaaaaaaatgtctgagactgccggcagatattgagtgcaaagcttaatttagctgctgaattttatgaaaaggtgatatccaaagcctccttttttctcttttaagtaaaggattgcctttccctggtattctttccgtatatcgatggtgattaattgaattttcctaattaaaagacccttggatagagaaactagtctaaaccagttgcagaaaagggaacccccaaatcagaaggtgcgctgttctcttcttttggtcctgaaactgtttgggtatgtgaagattcagttgtatttcagaattcctggagctgacattgccaattttcgaataatctgatggtgggatgtcaaagtgtatatcttttatctaccctcaacttgcactttaaattccagccattctttgacaataatagagtagtgagaaaccaaaatatgtcagttgtctgtggaaataaaaaaggccatagatgtttaaaagttaaaccgtagaaacatttttaaaatgaacattttctacttaagctttccattaaataatagtttcatttaacgaatcaacttacctttgtgaagtgacatagcagataggtgttgtacagactgctttgaaagatgcagcccttatctggtgtccctacagtctaatatggataacattgatacgcaaacaaatgaagaaacattgtatgtaattattgtgcaaaacttttctaaatacattacctatgagtttggggttaactgcaaaagaaattccgtattcagatggattaggagagaatgtgactacctgaagggagaatttaatacatttactaggtcaagaagaaactgtcaattttaaggggagttgaaagtcagcagccactttataaataaatatatagttgatgatgaggcttctgagctaaataaaaatgcaatgtaaaggccttgaaaagctgaagtggaatgggtaggtggcataggtaaaatgttagagagaaggtaacattaacattgacagtggaattaaagacagtcaggggaagccgtctcatgagaatgaggtacagtagtctagggggaaaagtctagggccaggaacaaggatgtagctgaaggaatgaaaaggcagctacagatttggaataagtgataatagaggaaaataggttttgatgataacatgtatatttgaagtcagaagtaactcaggctttttcttgaaagttgttgatacagatattgtctactatgatggagaggaaagaaaactgatttttctcaagtctgtaactagtgggtttcattatcaacagcttaatttctgtggtcttgcctgatataccatatgatttgggggaaagaacttacaaaaatgaagctgtgctgtacaattttgtgtattctagaacttgaggttttgcagttttactatgtagaattattctttactgaactgaagtattgtgatttcatacttaagaaagttgagttgaactgtggtttttgtaaattattatttgtggctcttaaaaggtggagggtctcttttagaaaatctccttggcatgcttcgtaatactaattttaagtattttatctatatctattttacaaagatagtggaaagtgtgatctacccacacacacattttacaatatgttacttagtattttgtgaagtcatattgtcatttctaaagtttttaattgacgttgtgacattttttattacctgttgaaagatatttgttctttgaaacttttcatccattagatgttttcgttatcttcatttcagttgtaaatttggcaaatttagtacatagtctgttgagacttctcattaaataaattaattgtattaggtttatgaaagaataatggtagaaagggaaatatttagcagaagcatttttttgcttcattattttgaattattaagcacttgaaaatgagattatgataattaatgtaacatggatattctaattatacttttttttaaatcaggaaaatgagaacatatatgtatataaaataggctgtatgtggaaacattttatgttgaatattattgtccatctctaacaacaataactttgttcgaaactgtcttatgttgacttgacagaaatgaaagtcacatggtgtttggtgacctaaggtctagtttgaaatatttctgtgtctaattagttgtctacttgta

SEQ ID NO: 76100 - DNA, 1065 bp, Homo sapiens
tcagcctcccgagtagctgggattacaggcgcctgccaccatgcctggctaattttttttttttttttgtatttttagtagagacagagttttaccatgttggccaggctggttttggactcctgacctcaagtgatctacctgccttagcctcccaaagtgctgggattacagatgtgagccaccgtgcctggccagcaattatatttctacattctattctgaatatctgttactgtgacatgatagtatgtttccataacgtatatgcttttcaggttttacccacttgcccttcctcttcctgccctgcccttctaatctactatatccttgggaaccacataaacttgctaagaattatttgtgatattacatccagttagatttgaagtgagggtctaaaggcacatattttcacttttgggttcagggcatcagaaaatgagtggatattactataataaatagctttatttctttgtatagtacttcacgatttcaggatcatggctaaatgtgtctgcctgatgctgtaaatgttaataaaaatccactctatgagtgaaagagattaagtgcaatttgaatgctaagtaaaaatgaaatgtttcttttaattatttcttgttcttttaaaaaacacattaatgtgcacttgaaattaataatctttaaagtctaattaatggttaagaactgttggatatcttataaataagaaactgagccaggcacaggggctcacgcctgtaatcccagcactttgggaggctgaggcgggcagatcacgaagtcaggagattgagaccatcctggccaacatggtgaaaccccacctctactaaaaatatgaaaattaggcaggcatggtggtgtgtgcctgtaatcccagctactcgggagtgaggcaggagaatcacttgaacccctgaggcagagattgtagtgagccaagactgtgccactgtactccagcctggccacacagtgagactccatctcaaaaaaaaaaaaaaaaaaaaaaaaaagaagaaactgaatagagtaaaaatactattttca

SEQ ID NO: 76101 - DNA, 1033 bp, Homo sapiens
ctagtttctctctagtgttaaccacttaaaaaatctttttgtttattcttttgtatacagtcatatatttgatatatttgaatatgtgtatgtgtatcatacaatacatcagagcttgcaaattgatggaccactggccctaactaaccagtgtttcattagtcccctactgtattttagaaaaagtatttgtttctaacacttaaaaaaagatatttcatataaaatccatattttttttgcttcttaagattcagcaacacacaacatgtttctcacataatagttgtttagagttactgtctgcataagatagaacatgcgttcttcagtttcccacagtttctgtttaatacgtgttggctgcctgaccttgataggcatttgagattgtgattcttgctcatacatagtattttgcactttcttccttcactccctaactctgtagcatattttggacatcttttcatattagtgaaaataatagtggttaactttattgagagcctatgaagtgtaaaatactttctagagcctgttacagagcctattcatttaatcctcgtaataatatgttagtgttgtcaccattttacagctgaagaaattgtagcagagagagattaagtaacttgctcaagttagtgcagtaaatgaacaggctgcaaattgaatctatgtaatctgtccgtagagtgtaagctcttaactactacatgatactcctctttggcatgtcagaattatttcatagagatcttcaaagatgttcatatacatatttcactttaatgggtcttactgcattgtaggttatgctatatttaattagtccctaattgatggacatcgaggtttctgatttttcagagacagatgttgtagataataatattatacatttatcattacaagtttataagttttttataatgtaagattactatctgtagaattttggggtcaagggtatatgaacttaaaaattttaatagataatttactttccaataaggatgtattaattaat

SEQ ID NO: 76102 - DNA, 1075 bp, Homo sapiens
tgcactccagcctgggctacaagagttaaactccctctcaaaacaaacaaacaaaaaaattgtcaattatgcatcacaatgaaacattcatttctgatttttagcacaattcaggagtaggtcatataatacatgacaaactcaaagatgaataatgcagtcttcccaaatagtagaaacttttaagcagctgaatggtaatggatctaattttgttattttattgtttttctgtctatgagtgatatattggtctgaccatagcctgacttgttaacaaacaatacagctcaactcaatatgtagtgtatcatgtactttgcatggtgttaggctaaaactactaagtatttataatgttatgctttaagtatgattagttgattgtaaaatggttcacattttaaggtatttttatattgaaacccttgccaagtactgtatgacagggttttcaaaacttttttagtaaaagactagatagtgaatttttaggctttgtgagctgtatatgatttctctcacaactattcagctctgcccttgtagcatgaaagcagctgtagacagtgtataaatgaatgagcattatagtgtcccaccgaaattttagttataaaaagaaatggcaggccagaattggtctaagggctgtagtttgccaactcctactcaagacgtagcctgttgtaagggaaatataattccaagttacctgcatgtgaatcgaacttttatattagttaacatttgcattacaaaacatcacaaaatttagttacttgaaactacgatttagtatttttcacatttctgtgaactaatttggttctgcttccggtggcatttgttggggttctgatagagctgtgatatctggaggctcaactgggattgttggccagggctttggttctcctacatgtgggtctttctatatggctgattccttagcctcatggtgtgatagttgggttataagaagtattctaagagcaagcattgtgagacagaggaagcagaagatgccaggccaagggataggcctgaaactttcacagcatcacttctgcca

SEQ ID NO: 76103 - DNA, 1032 bp, Homo sapiens
caaaagtaagaactgaaattaattcagtatcttgaatatttattgtaatctcttcctgctttgagtagaggatggcagcttttagtatctgctatcttactttgccaccataaacatagaatagtatgtaaagatgatcttactctgttgccaccattgatttccaggtttgacttagctgatctggttggctgaatgggtatatccttcctttggaaagggaccacgtgcatacatgaaagcaagtagctaaaatacagaatgaaataaaagctgtaatagaagtacaagcaacatgccgtgggtgcacagaggaaggaacaattaattttgactgaatggctgtaggagggatggcattttaaggaaggtagtgtttcagtaaggcctggaagaatgaataacttatccttagaaaagaaagggaaggtaatctggctgtcaagtttctcatctgctgaaacggtggtaccagagtgtctaggctaaagtagatgaacttaaatataggtataggacattcaggataaatggcagcatgcagttgtctgattttagccatcttaaattggaattacaggagtgaacacagttttgttacagttacgccttaggtgactatctggtaatttgaaatttgagacttcagtttttaaaattaagcagtttatttcaaatactcagatttttggatataggaagaaatttaaggattatctatactaacacactctagtaggtaaagaaactaagacctagttagatgatttatttgagcttacgtatctaaatgactgagttggggctaaaatacctttctcctggtcttgggtatttttgaagaattatccagtgtatcctttattgtaagaagattttctccaagtatacatccatatgaattgcttgctgtagtagcaatttttaaatttgagatataacatgcatatagtaaaatgtacagatgttaattgtatagcatggtgagttttttatgtgtacaaactcttacaattaacactcagatcaaga

SEQ ID NO: 76104 - DNA, 1021 bp, Homo sapiens
cactcctaaacttaggggaaaatgttcaatatttaccaattatgatgttagttgtaagttttataggtaacctttatcagattaaagaagttcttatctattcctagttttcttttcttttttgaaaaaaattttatagagagagggccttgctctgttgcccagactggccttgaactcctggctcaaatgatattcccacctcggcctcccaaagtgctgggattacaggtgtgagccactgcgcccagtctgatagttttctaaatcatgaataggtggtaaactttgtcaaattttttgcttttgttgagataaatcatatggttgtatccttaattctgtgatgtggtgaattacattgattgatttttaaatgttaaaccaactttatactcctaggataaacgttactttgtcataatgtattgtcccttttatgtaccattagattcaatttgttaatattctctttagaatttttacatctattcatgaaagatattggcctgtaatagtcctttattataatatttttgtcagattttgttatcaatgtttgttagccttgtaaaaagaattgggaagtctctctctgttttatttcaaagtgtttgtgatagattgatacgtttcatgtgtacttgaattgggaagtctctctcttttttattctctgaaagcatttgtgattgatagattcatacacttcatgtgtacttgaatgttgattctgcagtctttggtgttaatgttctttgtcagtaaggtcatattggttaatcaagttgttcaaatcttcaaatgactgatttcttttttcctgttctctcagttttgagagtagtgtcttaaaattataaactatgactgtagttttgttgacttttagttctttcagttttcccctcatgtagttggaagctcttactaggtgaattaaaacttggcattgttattttacggttgaaatgacctttttgtcattatgaaatgaccttctttatctctggtaatattt

SEQ ID NO: 76105 - DNA, 1026 bp, Homo sapiens
ctcgtgagaactcactaagtatcactagaacagcaagggggaatccatctccatgattcaatcacctcccaccaggccactcttccaacattggggattacaattctgcatgaaatttgggcagggatacaaatcaaaaccgtatcagcaccccttcatgccccaaagagaaaccaacctttatctttgaaaccttgtcactgaagctcccagcctggttaagagggacttctgattctataatctaaaaatcatgaagtcatcttagacacctccctttcatttttccccacatctacttactcattaatgtctggctccctagtatgcctggaaatctgtttactttcctggtttttattctgtataatcactatcatgagcaaaataagaacagtcccatctcatcagaaagttatttcatacctgacactttctacttcactgttcccatctcattttctaactcatcctgcttccagcttctaatttccaatgtaagaccttacaactaaataactgcatttactcactcccctagtgtgatttttaaatcacattttaaacttttatatacgttataagccctactttacagtgttttattttgctttaaacagttatttgatttttaagtgaattatgagaaaggaaacagtttttgtgtttaccaatttatttaccatttctgaagctcttttttcctttctgtaagtctacatatccatttgatagaatttgtctttggtctgaagaacactcttcagcatttcttacaatgtagattgactggcaagcattctctcagcttttgtttagctaaaaatgtctttattccaccctcatttctgaaggatatttattattgatgaatataaaattctaggtcgatagccttcaccccccaagtactttaaagatatcattttactgttttctgacttccagtgagaggctgggaataattcttatttctcccatacatgatgtctccctgcctccctttctttttgtcccttttctggc

SEQ ID NO: 76106 - DNA, 1058 bp, Homo sapiens
agagcaacagtagagcctagaggcattatcagtcttaggtctttttagcagcgtaggggactttggatggtggcgtagttttggcagcagtggctctaatgctaggccctacaagtagataaggctatttaatactgaattactttcatctgaagtcttccaggggcctgatcattctgtccagatgtggaacaagaaaatgatagatctaggattgttatgattctctttaaaattccctagggatttgtttggatctgggattgtaaagccatagagtacattgtgggttctcagtaaatcctttgagtgaatgaataaatgaaagcagccacttggatctcttatggccagtaatgcaacctggtttatttgtgaattatttccttagggaatgataatctcataacttcagcactcagatataaagtctacaggttaaattaccagtctgggttataggttttattggtattacttttgttgcttttgtttactgatatatgctccactcagtaactaattgtttaatacattttgttgtagaatattatgtttagtgtttaactttattttgtacctttgttaactaggtgtttttttgagtatattgtgggtatacttatgtaccaagtgctgcaagatctataaaaaaatataagatgtattccctgccattaacgagctcaagttagtgtagctaactcaaagaaaggtaggtaactatgccagtcagtaaatgaagagtacgatgagtgatagttaagaagaaaatgtttataagtgcacattcaaaactggatgatgtcagcctagtattttgaaaacattctcaaatattcaatttttaatgcactgttaaaaaataggaagtacttttatttcacattttaattagatgagaataactaatttatttttcattagtggtgttattagagcattaattttccaaaagaaaatttgtagaatgttaatgaagctacagtaggaaataaataaatgttctgtaaataatcattcaccatatttgatatttgattggtttagaacattaa

SEQ ID NO: 76107 - DNA, 1026 bp, Homo sapiens
gtctaactggcaaatccttccagaaattaaaataatcagcaggattagctgacttaagagatattaatcatcctgcaaatttagtttctcctttctatttcccttgctcgccaatatttttaaaaatatgattttgtagtttgtctctttttttcctagttgttgtgggggcagtgacttgctactgtgtactagtaaattaatcttgtaacagtaagaacaacatttagaccgacatgtttattattttatgtaatgtatttatatagagttggtgtgcttaaagtagtggattgttattgaaatgttggcttgtttagaatattaatatttgttgctaaattcaccaggcctataaataaatcaatagtaatgtttggggaaaaatgaaaaaaaaaaagctatttttcatttcaaaatgtcttttggtcagcaatagcttaaatgaaatgtagacaaaaattaatttttttttcttttccccatttctatttagtgagtgatagttgcttcaggaatcttgcagaagaccgcagtgggataaatctcaaagatctcgtacaagatccttctttgtgagtattgtgctttcagtattaagtataaattaaaactttattattagtgttccttttctcaaaagagttttatgtgaaaacttatttaaggtacaacaattttttcttttctaataatgcgttttacacatattgaagtctgacagaacagttcagaaatagaatagattttagaaggaatgatgtcatgattaatgattgattttcaaggaggaatcctgatggctgatgatatcttgccaatgtggcagtagctactagccaagaaagatgattagtagttgatttccttgggaaagagagattgaatttgtttacaacaatttgaagttttttgaatatattgtttatagtaattatttgtaattataattagaaatataaagtagttatttgttataacaatatacatttgaatatgttagatatatttctgatgttttacata

SEQ ID NO: 76108 - DNA, 1088 bp, Homo sapiens
gatttttggagtttgggtgctgtcttaagtgttttagtaaatcactttgcgtttatgtatgcctattttttgtgtgatggtttgatattttcatattttttcataacagaaaaatagaaaaaatttcaccagaaaattaattcataaccaaataacagtattatttttaattccttggataattgatcgtggggaaataatttacatcacaaaatgttttgtatcctactgggctttcagttaatacaaaatgctaggctgaaaattcaaacctttgaattctggctctgctacttatcaacaaggtgaccatagacggagtgcttttactcacacttctgatgctaaatgtgggtttttttactcgaaccagccagttcttcaactctccagatatcaaatgtccttctttttatttcaattaaattctgacactacctaccaggaattagtactagactctgcagatttaagggctgtgtccacaagattgccttcacgtcacatgccagtggcaagtaccagatccccaggctagtcaaaattctgtcctacttgactacaaagtcagttggttcccaaaccgcgtcccccaccccactctgcattttcagattcactaatttgctagaataggtccaaaacctcctggaaacactttacttatgcttaccagtttactataaaggatacaatttaggaatagccaaatgcaggagatgcacagggcaaggtataggggcaaggaggttccatcccctctcagtatttagcgcccctccggcaccttgatgtgttcatcactctggaagctctctgaatcccattgttccaagatattttatggagctcagtctccaacctcacccctcagtgagtggaactgaaaattccaatgctcataataacttagtctttccaatgaccagaccagccccatcctgaggctatctaggcacccaccctaagtcgtctcattagcataaactcaggtgtgatctgaagaggtttgggcctggcatggtggctcacacctgtaatcccagcactttgagaggcccaggcgggtggatcagttgaggcaagga

SEQ ID NO: 76109 - DNA, 1088 bp, Homo sapiens
tagcagtctttgaagcgtctttctgactttaatgttgtcctcaaagtatcaagaaaaaaaaaggaaaagatcacaattatgtgatttttcacagaagtttgcaactttcatattggaaaaatatttagacgtcaaagataaatattttatttaaaaagaatagctaagtccaattaaacctttatattttagaccgactagttcagaaatactgatacctgaagtaagactataaatttctaccatctttcaaggaataaaagaatctggtaatcaaattaataatgtataagagggaaacagaactttaagctagttaaggaaaaaatggtttcaagcttttaatggcatctttttgccattgataatgaacagtctgttaataatgaatacttgtgttatctattcattaacagatacagataacctttatttgtctgtattgtactagcatatgtgattgaaagtgataaagctacattcttcaaaccattcttctgttcagattttctaataaacaggtatctttctcttgttatatttgtaattaagttttattctcttattctttgttttctagttgcatctccccatttatagtttacaggtctttgtactcagctcttgctctcttgtccatcttccagtccccatctcattcgctgcctgctccctagtttagatccctaatttcagtattctacttcctacgtggcatttgccagtgctcttgcatctgggttcttgctctccattctctttttcctagtctttggttctctactactctttgcaggtagtttctggatttttgtattatttctgttctctaactgatatgtgcagaactgcaaggatgtaagaagaattggaaagtagaagcatagaaagagctaacatgtattgaatacctattctatgctaagtgatttatcatttagttctcagagccctcttataagatgtaggtatgttttattattacctccattatattcataagtactctggaaacttaggttaaatattttattctaattcacatagcaaaactacatagtaaagccaagtttcacatctagattggt

SEQ ID NO: 76110 - DNA, 1006 bp, Homo sapiens
ttccatattactcctgaaggatattttcactagatacagaaatctgggttgactgttcttttctttcagcattaaaaaaaaaaaagtaaaataaaatatgattccactctcttttgctccatggttcctgaaaagaaatgagcaatcaattcaaattgctgtttccttatgtgtaatggcaaatttctctggctgctttgaagatattttttctgcagctttagtttcagcaatttgattatgatgtatctgggtgtagttttcttttagattatccttctgggttcagtgaactttatgattctgtaaatttatgtctttaaccaaatttgggaaatttccttttttttgctgctcctatgacatgaattttagattttttggtaatgtctcacaaatccctgaggctctgttaatttttaaaatcttttttactctgtattaattttaggttatttctatgatctatcttcaaattagctgacttttcccctctttcatcttcattctgcctttgagaatatctagtggtttttatttcagatatattttcagttctaaattctccatttggtttttttgttaatggtttccatttctctactaagaacttgtatttttacatttatttcaaaagtattgccctttatgtcatggagaatagttataataactgcttaaaattattcttcggacaatttcaatatctggcttaccttggggttgacatcggttgatttcttttcccatgagaactggtcaaattttccttgttctatgttgagaaattttggattgtatcctggacattttgaacactgcattgtaagtaaattatttaactcctgttaaaatcctttggggaattttaattagttagttttagcaattgatctgattgggttcagattgtaaattctgtctcactttctgtgggtagtggctcagcctttgctatattgttagtgtctgcccagtacatgaatgatttaggagttagtttgag

SEQ ID NO: 76111 - DNA, 1452 bp, Homo sapiens
gcctctctacagcttcctgcccaacaccaaaagtaagtatggttccttcgcatcttacacctgctcttctatagtaatctgggaaaactaaccaatatttcctcctgcttgtcaaggttggattgcatgcaagattacactgtgaaaaatgaataaagtgtaagatagttcccacccattgtgtcacaaattgtcatattaggccactagtaggacaatacagatttcattcaaaatgtcttactcctacatcatagctaagggtattactttctgtagctcctgtttctttgttgtagatttgttattttttagtatacttaacattatagatgtaaagttatttgtttatgccgaggataaatgtacttttggccagtaaacagcaagattaacaaaattgtgtcaccaaagggatttctttaaacttgtccgggctggggtagctccctgctctagtatcattccaaattttttcaaacattcatcttggaatgttgctgcctaatatttgcaaacaaatctaaatttattagaaagaaagttttaatgccaacctttgggaagagggtagaagtttcttagtctttttttttataatctgtcactgaattgtatagggtgaggaaaggatgagacacttatatgctgttcacatctttgtatacatgataaattaactagcagacattattactgctgtgactactttctcctggaatgctccttgcctgattaagttagtcatttgtgctttcaagttctctatgtgatggatgcaatattggtatcaaaagattaacagtaacattccttattatttaataagacatgatgttagacactaaatttgttttaggattctgacagttaatttttcaaattatagttttttctctgtcatcaaatttaaggacctgtatagctgtcttcctcaattccatcttttctatcagttttgtgaatgttataatttaatttgactagaagggatctcagtttctgatgtgaatagtgcagtttgttttacattacttgttacaatcttctcagcaatgtttccagtgttactgttgtatatcattatttttagatatatgtcaaaaaaactgatattaattttatcatttaaaaaactgaggtcctgaatcttcaataaagataaactataagaacattgtagacattaaatgtatgccagtgccatttgggtgccagtaagctacattttcaaatgcataaaagcaaggaattcttaaaacctgaattagatggaagaatctcatctatatcttttatattattaaaacaaagtaacttacagtttgactgcattaaaatccagttgtaccagctaaactcacttgtaaagtctagaaaatatttaaaactaaaagttaagttcactataagatgttttgttcactgaatattaagacctaaaagttggga

SEQ ID NO: 76112 - DNA, 1068 bp, Homo sapiens
aatatctgttcttttttatttaaaataatgaatctttttgcctttccccactgagtcaaatatcaagaccatagattttagcaccgagctctgtttaataaaaaattaaaatttattttaattttttagcataaaaatttggggccgagaagtccaaaagcaatttcggggtttcaaatttgagatactgggtagacaataatgttattaactataccaaggaataaaagagaagtaccaagtcttgagggtaaaagaaaagagtttaatgcatcttgattgggaatgtgtttaatctgaggcatatgtgagacaaccaaggagtgatatccagcacaaaattggaaatacaatttgagtttgaaattcttatttttactgcatcttggttatgatatttataacttagtacatattagtgttagccaaatcccatagaaatcctttctacatttcaaattcggcatgcacagattttcatgcacagaaatgtatgtgcaaacgtattttgtctacatcagaaatacaatatagttttgaatgatcggtactagaaagagcacttgacttgataatagaagatctggatggaaatgcttttttctctacctcataaccacagtaaattaagcaagttacttaactttactgagttttgtgtctattatttgactgaccatccttacctctacaacagtgtttattaactcattaaataagtctttgcctggtagtagaatagcaacagtgagcaagtagacattgttccaacttctacaaatagatcagacaactaaaaattaaaataaagcataataaattctagaattgattatcaagaatacataatattatggaaatagctaccagaagcacttaaccaatatatagatatattgcagtataacatcctaaattatatattgaccgtttaagattctccagctatagtgagaacaaaatctataaaactataccaggtcttgatttctttttgttttttttggtaccctcattacaacctaatgaagataaccatgtattatcttttcttaacaattcttcata

SEQ ID NO: 76113 - DNA, 1413 bp, Homo sapiens
taccattcattttagatgttattaaaatgaagaatatttttaaacactaattttattatcgttttattccctaaacatctgaagtttgattttgagtaagtaaatatagtctatagtcacatatgttcctgtaccttaaaagttagcaaagaattttgtgcttagaataaccagcaagttgtgttttttttttttttttttgctcttaggaagaaaatataaatactatcaatatctaattgaagttatcaatatctaaagtttatacaacaattaaaatgtagatgtattgaaatatctttatatgagggatatatacctttaatccactaatgtctaatactatattcaaacaaaatatgtaattattacttctttgtaggtttctcttactgtcctttgagcaaaagaatttagattgctctggttaagttatattcttaactcagggtttttaatgtatgagtctgaaaggcagtgtgaattcctttacctataaaaatggcactgctgattctatatcagcataatattttctctgggatgttttcctagtagtgttagtttttacaaagtattgaatattgtcactattttcctttgtgaacaccagggtgattatgtgatatggctaggtcattggctaaacctgggttcccaagtctctggagaagctcataaaatggccatacttccagcctaaatcaagtcactaactggtgacggcaaattatttttttcctatttttaagagcctaaccaaaatcaataagactatactagacatcaagcttctttgcttttgctgaaattatatcaacattggtatgacaatatgttcagctattaatgacattatagaaatagattctacacataccgtcaacacacaacaaaaaggttggaaaccagtgaattagtgagatcaaaaatacattctctgaacaaaaatatgttttcttttgtgaacatttacctcatctggggggtgttgagcaataatattctctgcattattggttagatccagcatttctcaaacatactggtctccagaccccttcatgcttttaacaattattaaggaccccaaattacttctgtttatgtgggttatatctaacaatatttgttgtactaggaattctgagggccaggcatggtggctgtaatcccatcactttgggaggccaaggcaggtggatcatctgaggtagggagttcaagaccagcctgaccaatgtggaaaaaccctgtctctaccaaaaatacagaattagccaggcgcgttggcacatgcctgtaatcccaggtactcaggaggctgaggcaggagattcgcttgaacacgggaggcggagattgctgtgagccaagatcatgccattacactccagcctgggcaacgagaac

SEQ ID NO: 76114 - DNA, 1076 bp, Homo sapiens
cagctgaacaacctcaatgcttgggtcagcaagcagaggagcttcactctgtcacctatcaagaatgatgcttgtcaggactgatctttccacctacagagcattcatgtttctagtcataccatttatgttttctaatattacaatggaatagacactaaaacactaagagagaaaagtacataggtatatttgtaattctttgttttttgtaagccaaatgcaaatgtaacactactccagatactgcttcatcagaagtccccaagataaccaaaagtaagtgccaatttcctcatctcagggatagtgccataacaaagactgaattctagggaccagcctatttgcagagcatgtcatacagcctctgggttagttaactccttggcctcctaagagctaccacagagagtcaattgatgtttttgcatgtattacttactaatgtatagaaaaatttttaagttcactttttctttattctgtctttcttacccatcttccctcattgtagcaaattagacggccggatgaaagcaaaggagttgctagtagagttggatccctcaaagtaaatatgtttctaacattttttggcaagatttcgtctatagcctacacttcttcctttttggagggtggtgggaggaagggggctttttccatttttcaccatcccattttttttattttaatatttttattggctgttgggtcatattactttttttttgtttcagctacacatagagcaaccagctgaaggcaagctgccaaataactagctttgaatggcaccacaaacaacagaaagggcaactgcctcattacaggtgcctataatttggggttctagaataaaccgttcctctgattgatgtcactgtgtgttaagttcctgttacacagagaactaacatttattttcagaatattatctccccttttagcttttttttgtaaaaaaaataattttaatgttattttggtatcatcaccatttatagttcatttcagagaaaagttattatgagttaacaatatgtattcaatacacataatcttaagaaatt

SEQ ID NO: 76115 - DNA, 3283 bp, Homo sapiens
tatcactcttatgaaacacagaccaatcacatttaatgctgccaccttaaatgcaagttagaaaatttgctgaattctaaaaatatgcagaagaattacctcacaaaagtaattattttcttatatctcaatctcatttgccctaacagcaatagtaactgttaaattaatcaaaatgctagaaaattcagtgcactgggatgtcctaaaatttaatgactaccttgaggcctaatattcaatcatttcaaaattttgcacacctccaatttatttccattttacaatttatgaaatactaatttctgcactctttcctctccttgcctcttctgccttcttagctttacttttttgttattgtttatttgtttgtgtgtgcgcacgcacatgagtgcacatggatgaaggtgtgtttgtatgtttgtgtcctttatttcagaaaagccatcctctctgttctctaacactgctttatagtggatagctattttattaaaatgttatttcaccaaggataagaagaggggatgggaagtgttaatagtgtgcctatttcaaaaactaggcaatttaagattattcagtcagaaaaatgtgagtttgtgtatcctgatgatatatcagtagcattcctcactgtctatctgtgaggtatcatattttatctttgtctttaaaggaagataaatccattaatggtttaaactatggattatgactcaaattcaggtgagaaggtacagaacgacatgactttttgaaaattactgaaggtgaaataaagataaaaatggcatccataactgtagcaccatgtactgtaaactggattgtatgtgcgagtgcgcgtgcgtgcagttatctccgagttcaacttctggatgtatagaacttcaagttataaatgtatgtttattgtttttaagtgtatatacaatatgagtatgtatatacacatatatatgtttaagaacaaaagatacgttttataattaaatcagtttatattaatatggatgcagtcttgaatcaaaaagtgtgtttgggaaagaaagtcaaatttcataatatttaaatatctttactccatgtttctacaaaatagaaaatgtcaaagtgaatctctaggggatttataaggatggttatagtatttattttctctaatgctttggggagaaaagatgctgtaattaatcaaaataaaatgttgacttcctagtcacgggtttgttgagcatgcattcttacgttatagaaagacctttgatgtttgaaatgtttgccaaaggcagtgagaaatgtataatgctatgatcttatttttaaaaggaaaaaggaaaaccgaaaagagaacaagttgctttttcaattcattttctgatgtttacatgtagctccatcgaaagctggaggagctcagagatcacctagaaggcaatgtgaaaggatactctctcagagtaaatgtacgatttcacttggtgatttttttttccctaaacttctgctgactggtaactccaaatctgattggtttgtcctctcatctccatctttttcctttctgtctcttttccccctctttctttcttttctagctgcggcttcatgctcccatttatgaaataaagattaaattagcagggtagaggaccctaaagccacactgactaacattgctgttgacttaataatattttggccccagtgcaaaataaaatctttcttttcaaaaatcactatttcttatacaattgtatacttttttgaggatcttgtcatgagacttcatttggagatttttctattggtcatgtcttctaccccttgttagttatgtcagcagaataataaattatgagctggatgtgaggggtatatccttgatggtacaatttcaattttcaaggaaaataatcagtgttagggtatcataggtaatctggcaagtagacacatttgttctgagttaatagacttaactcagactcttttagaataaatgtatgtcattttgtttaaaaataagaaaattagcagtaagtaccttcaccaggaacaccttcacgtagcatcttacaaatacttgagctaaagtctaatatacccaagacaaccattgaaggaggacagtacctcgtatccactcaatcctgtacattcatcatatagtcagaattcatgatagtattttttgtgacagatagttcagactatcaagattttcaagaaaaatctctaaattggttttggtataaatgtagcagaagaaaaactaaattactacagtaatttatggctttcatttctggggtttccaagaaagttcctgtgaatcctggtatccgatttacttctcacaaggttattaccattcatttaattcacacagctgtaatagttttgttataaaaactagaattaaagttagggatatgataattatcttatttctcagcttgtttttaattgtataccacacatagtcatgtgtatctctacgctaaatttctgattattgaaatacaaagtgatttttattaataagttgttaattctaataactaaacagaaggaattaatacacgtgtctcatatctctacttcttcctttgagctactctttgttttctgcacatattcttatagaattttgaaaaccatccataatcactccccaaaacctattttgtcattttttttaaaaaaaagattagtatggattttatgattaaatcagtctggacatacctaattattctagaaacccataaaaatattttaatatgtgtattttagtcttgtgctctttcctaatcagtcatgagaagtaatttttcttttcaatgaaactgagaccaaaaagttgagacttgctgatttctgtatggtaataagttagtaagagaccaacatcaaatttaaaatttgatgccttaaaaattaggttatctcatgccattatttaatttcttttttcaacacctgtactactatataatgattaatctcattttatttcactgagaaacactttgttctgattaccttgtttctaaaaatattaaatataaggtgtatctgtctaaggatcctgttaactgtccaatatagaaaaaaaaaaaaaaaaaacctatccaaaggcaagtagtatcttctctagagagttcagctaaggaaacatgcaaatcaattgcttagctgaattttcagtttctctccttaccctttaattcctactacccaagtataccttaaagtgccttgaatattaaaa

SEQ ID NO: 76116 - DNA, 1579 bp, Homo sapiens
aaaaaaaaagaaaagaaaagaaaaacatagaataagataatccaaagtaatactttctttacagaatataaatcaaggtaaatttacaaagaatttgattagttgacgagcagtggggccaaagagagcctaaatattaagatattcaggaaaaaagtagataaatgttcatgaaataaagatagttaaaagaaaagaaaggaaaggaatgaaaatactcatatgccacaattttgtattttcatctgaatactcagtttatgtattatgatattaaatttctattcagctacaaatatgtgtagataggttttggctgaccaagtgtgatttttttaagggctatgataaacaaaaaggaatatggttcatgaagacagattactggcatataagtgaaactaagatggaaagtgatgaaatggaaggaatatgacaattatctataagtacttaactatactaacacaaattaaaggatggtatttaaagtgaaaaaagtcaagggaggagttgtcacccaaaataagactacctttttaataagtgttaagaaaaatacctgaatcaagttagaaagtaatgatcttttgaaccatgatttttaaatgtttaacaattaatttcctgaatgccaatatgggatagtatgaaatagtgctaatataaataatgaattgggtaactgtgattttatagatctttaaagatgagtattttcattgcagccttagctctgaactactttcttatatttttgataaatagatacctattgtctttaggggggttttgtacttttatttttattgagttaatgcgataactcagagatcagcaaatcctgtttttttataggcccacaagctaagaatgagttttgcatttataaattgtggagaaacataaaaagaagaacattttatggcatgtgaaaattatatgagattcaaatttcagtgtttaaaaataatgttttattaaattataaccatgctcattcatttgcacataacctgcagttacttacacaacagcagagttgaatagttgaaacacagattatatgtctcatacagtctaaaatatttactctctatttaaacagaaatgtttgctgagtcctgctgtaactggttagtgtgtcaaaataacgttgacgtaggaatggttataatggagtttgtgaaatttcttcattttaaagcttgagaaaagaagcctgctcatttttctgaggatggtttcagattattctacaaggaagcatatgtttggaaaggttgatctcctcaaattgtctacctttacatttttattttcttcttttttattgtcttctctagctattctctctctctcttcacatagatttccccctctacacacacacatacacacaaagtcttcaaatatggaactctaatgtggatagaatatagattataaatttctcttttattggaggctcatttctgggttttcagagtacaaagataaatctcattattgctgtcttaaatgttatataaaatatgttattagagtattttcatttaacacattgcatttttctatt

SEQ ID NO: 76117 - DNA, 1053 bp, Homo sapiens
ctgggcgatagagtgagacttcgtcttaaaaaaaaaaaaaaaaaaaaaggacttcagtagcctatgaattttaagaccttcattctttttttacaacataatttctacatgtatttactttgtataggccactgtagctaccatattaaagccagtattatcagcttaattctgattgcagaaatattatctcagaatgtcatcccaaagaaaacccttgaaagatagtactgtttaaaatacgaggtagtatatgcagaaccagaggcagaataccatctgcagatctcaaattttaagaaaaaaccaaaagaaatagcatgacaaacccatagcctcacaaagttgaatttattgagtcaatagaattgcagctatcttcttcaatttttaactttgcaagttataactgtgagatttttttctcttaaaactgatttcctggggagttaacttcttgaaacataccactagggagaagcaaagaaaagaaagccaaatgagctatttttagtatcaacaaagacatttgaaagagaaggttggtatcatctcatcaccacattttctataggtcttttcttaattcccaaagattatgagtgctagtgtaaaaaatatataacccatttctttttgccacttcatccaggcaattctccatttcccatgagagtgtgtaagaagtctaccattggcatcatctccaatcacagcctacagcatccatcagggtattactttctctatgacagcatgtgtgcaggagggctctcacgttggaatgtggaactggcttcttgggggcattatgtatgctgtggcatttgcaccatggcactcagctcttaactctggcttcatctagatttgtttctttcattgtgacacatgggctttctttatttgtcatgaagtgtgtttctctttctgtcactcgtggtagggtttctctctttcactcaatgccacatctctgtggtctccataggtgctgtttatgtttaatttatgatgctataaagaccaataaaatgaagaactccttaagta

SEQ ID NO: 76118 - DNA, 1048 bp, Homo sapiens
ggtcatatattgctatggttcatctccatggatttacacagatttggtttaccaccaatcctagtgtaatttttaaagactcaaataagtatcttcttgaccagcaacaaggcaaattttcttttgctccttttgggttttactcctaaacatgcatttgggtgaaatgtatagcctagactttggcaagtagaattatcaattttccctggtcaccttttttccctttcaaagcatttccttcccaaccagtgttcttcagctaagccacagaacacaggaagtaatatgtgtagctattttcttaagatcctgtaaagatgttgacattctatattcaaaaaacagaagtttattcattacacacaatgaatataaatgcattaaggcttaattctctcccagaattgaggaagatatagtaatcccatcttttaagtagctcagtacttcttgaagtcatttgttatttaaagacgcacttgaaatttcatgtttggaaattctttgtgttgcttttttttttttttttttttttttggatacctagagtctctgaatagcctgtgcttaccatgtgattttagggcttgagatcgtgagacatatttttattttttttaaataacctctttatttttctgaaagaaacagatttaatcagcttctcaccatattctaaaaatgttcctgcttggcagttattaacattttgtcggttttcttgtactgttgaagcagacttactgaagatcaatttaacatactgtttaaagtttggggctagatttgaatcctaatcctggatttgaaacccaaccctgtgccttactaactttgtgaccttaagcaagttaacttctctgcacctcatattcctgtaaaataggaatgataccaccttttggggtatcttaagtatttaacagcttaatattacttggtgcaatgcctgatatgtgtaagtactcaataaatattaactatattattatcagtatttattgttatattaaaggtccaaaggtaaagttattttttgtttcaa

SEQ ID NO: 76119 - DNA, 1074 bp, Homo sapiens
ctttttatagccatagttttcaattatattagcaattttccttgtcctatttctgtctgcctcaggataccaaaaaaagggtctattttcgaaattttgttcataccattctgcacccagtattgcctggagtcatgaaaacccagcttgctgctattttttctctttggcaacttgctgctataccaacactcagcaattaaatctaattctgtttgggctaccatgcttaaatgttcttgttgagaatcatggcatgaactaatgcatggctctaaaaaggctactgttgtgtgtctgcactgaaggaaaaattccatagcaatctagcccctttggattttatactgaagctgtagattaatggtgaacttctgtgtaatgcttgacaaagaagggaaatccctagaaatgaaagtgtgaactgaggtaaaaatggtcttcagtcagatgctgctaaattaatcactagtaatcatcagttgtggaggttaggagtcccttcacagaatgcacttgggtggaagagtaggaaagagaaaaaaaggatgccagtgagacctgaaagagattatatgaggaaatgttgagtccatcttcatttgtgtgctgtctcaaacatttagctcagagtctgaaatacttttggtcaaattaggactgattttaattgtcttattatacaatttcacagcctcatcatccagcataaaatatatcaaaaatgacttaattccctcatatccatgacaattccaaactgtttttaataaactttataattgcctccaatattttaaaatttattaggaacactggtttcatgtttaaacaatcagcatcctttattagttcccttaagcattcatcttattttaatgtatacaatttttacttggtagaaaataaaccagatgttatttttccaagtggaaagaaatcttttttctttccttttacattacagtttcaccttgaaaatataagaagcaaatgaatggtcccaaaatttggcatttatttttctaagtcatgtttctgggctatgagttactgaattttgcttaatttatt

SEQ ID NO: 76120 - DNA, 1007 bp, Homo sapiens
ctaatcctaaccaaaccactgtgtcatacctctatactagaaatatataggaaatcaaaaggaaccaaactggaatgcaaatgaaacaaaaatcactaacactgaaccaacgcacctcctggcattattaataacattgttctgtcccaaatgaaacttcatatactttggacatggaggttaatgattgctaaaaagagaaaatctttataattaagttttctctggtttgatggttattccatgtgatgcatctttccataaattttgagaatgcctcaacacttatagggatagatttaacagtcaggagaatactagcaagtgtagtagctatcatggatcaatagcattatgaaatcatagctttaatgcagaaatttatttatggtaaaacttcaataaacaacaaaaattgtattctgtcttttaagagatgccttcattgacttttatgaaatagcagattttttcccaaaaggtacttttgtatcccactttgctggaaccctaagtctgaacacccgtgtgtctttttattaccaatctttggcctttctgaccaattacaacagtcttctttgatgtggaagaggttacaaatatttccaggctaggagggattggggagagtaatttcagtctggatttcggtagtttgtatcatagtcattatagccattattattgtcactttcatcattaccagaaaaacatgtatttgtcctttatacaatgttggatatgataacaaatgctctacatgcattagcttattttagtctcacaataattctatgaggtggaaattcaacaaaacatttgagcctttgcacacctttagctgtttcctcagtctggaaagttcttccccatgatcttcatctggctgtctcaaatcttaactaaaatgatacttattcagagaagtcttccttgcttactcttgtctaaaatagctataccttatcactacttatttttttattccattactgtattttatt

SEQ ID NO: 76121 - DNA, 1052 bp, Homo sapiens
tcaagagaaccaagttctattactactttactgtatgacctaaaaccagtaataattcctaccttctaacctttagaatgaagagtaattactctgtaaaataatcagttattcatcttaagattgggaaataatgaataatctgaaattcctcttagccaaaaatacttcatttagctttataatacattatataatttgggtagtaatttttcttcatatttatgatcaacattaacattttcagaacaagcaccaaaccaaaacgattgttggtaccaagaggagaccagcctgggatttgcaaagtttccagaggtcactgaacatggttcaacttggaattaaagctttatataggaaatacattaagaacatttaacattgatgcttaaattcatatttccttgagtcatggtgataaccagttctaaagaatagaaagtgtgttctacatattatagtattttctttaagaacaaataaggaactcaccaagttacctataaagaagcataaacaagctttgattttcagtggtaattataattaacttcaccagctatataacctgacacacttccgacttctttaagaatgggtcaatactgaaaaggaagtgtttttcacattaacctagaacttaggaaagctcggtggaatttaacaatgaaaatttatataacagtgggaaaacatttaagaatggtcacctggaaaagatttataaaattgttttgcttataaatattgtctatttgccggcattctcttatgttgtacatagatttaaaaaaaacagcagcccaggcgctgtggctcaagcctgtaatcacagcactttgggaggccaaggcaggcagatcatgaggtcaggagtttgagaccagcctgagtaacacagtgatacctcatctctactaaaaatacaaaaattagccaggtgtggtggcgcacacctgtagtcccagctactcgggaggctgaggcaggagagttgcttgaacctgagaggcggaggttgcagtgagccaagatcatgccactccact

SEQ ID NO: 76122 - DNA, 1341 bp, Homo sapiens
gagacagatctgtgttaccttctttatagtccataagaacagtagttgtttctcaagtgtatcatttcaagtgtatgccattacattgtgagttaagtaaaattttcattttgaaattgtataaaattaagtacatattataaagagaactagtttcatggtgcaagagaaaaagttatttgctacatgcataaataataaacaacatttttaaatttttcttttcttcagtggtgtataggttgattgattgattgatttatacacacacacatactcaagatcactaaaggaattcttataatcattgatattaaagtgattctccccaaatctggttcaaatagccaatgtaatataaatgggaaagcattgattatactgctgttggcaatttatgaaccttgataaacgctcagattcagggaattgaattgttttcatcatccaaatttctccaccaaagctgtttgaaatatgtagttctaaactgaggtgccacaaagcaacacttgggtttctttattcaattcatgttatgaatgattttgcttgttaattttttaagttacctagggaacgggagagggtattttgttgttgttttggtttggtttgggtttttttggtaaagccaactagttcttcaccaccatttccattatatacattagaaaatgtatataagaggcattatataaatctgttggaacattttatgagacaatttgaactactcatctgaactgctctgttcattgtaaatctcttgtttctatccatacactagctccactctagattggaagggcttaaagatgaactctggaggaatagaggctacgacttaagagtaactattactgatcaaaggagccactttccattcgcaaacattgctttgcgctatgggtttgggctccttctgtttctacatcttgttgaatgaagactttcttgacttccatttgacttctttgaactctgtttttgtcttttaacatttccccctttcttttccttctctctcccagatttttctctcactcttctagctttctcttgtgttctttgaatcactttttgaaatgtagtttctctctttattaagcttgtctattgtctgttagtgtgtgtttcttttctttaaggctgtagtggtatagttacacttatgttcattccatagtatagcaacttgcttatttattttgcagcaagttcattagtcattcttaccctcttggtatgaatttttaatgagaaatagcagaacattctgcatttacatattgtccccttctgtaattccatactttattttccattgtttagatttac

SEQ ID NO: 76123 - DNA, 1032 bp, Homo sapiens
tcaaacttgctgtttaataagaaaatgcctattacaaagcatattcaacagataaaacctatgtaactaaaaagtagaattttcttctcagaaactaaacatatttttaaaagaaacttttgtaagattatatccagtttgcaccataaagtgcagcctatcacaaaaaaaaactgtctgatctgagacctataaagctgaataagaagcagaagcagcaatatcattctgcctagttacactggttgtgaatgatttttttatatttgaatgagtaggtcaagacctcaatgaaaatgagttataaataagtttatatttcaatccttttttaagtgttcacccacaatttgaatagaaaattctgtctagcaataaataatctctaaggtttttcaaactttgaaaattttgcgattttgattgaccatgagaagaaatcacatattaatagtataagcaactttgtatatatttttcttaggtgcctatgacaatgtcattagtcttagaatgaaaaccctttggggtagtgcctttaagtcagttcattgaacatgtctggagcagccactgggttttgacacatgatgtaacattgctaacttgatttaatgttccaccagagcaggctgtattttggaggcaggagaaacagtttcttacctgctaatcttcatctggggacatttgaaattgggagttgtgatattataagtcattgccactttttaatcagtgttacagcatcatattcttagttaattatcttactgtttaggtcacagtgctgtcgatatcaccaaggtggctagaagacatcgcatgtctccttttcctctgacatctatggacaaagcctttatcacagtcctggagatgactccggtgcttgggacagaaatcatcaattaccgaggtactattatatttgaccattgccctttcttttcttcatttttttccaaataagattcatgtaacattaatgcacagttttcctgaaaaagaaagattattaaccattattac

SEQ ID NO: 76124 - DNA, 1122 bp, Homo sapiens
tatacttttttttttaaagaggttacttaatatactgtatatactgccattatcttgaagtactctaaaggccaaaacatcattgaaaggccaacatgttggtatgctgatatttttctgggatccacactgttaatttgtggtggacatttcctaataatggtgatattgcatttaactccaaaatatactttgaaaacagtataaagaacaacaaaactataaacaggttaaggcaattcagtgaatgtacaaatctctagtgtatacccttttcttgaatagtaataccttatatcaaactgagaacaatttaaaaaaaaaagaaattgatgcaaatctaggctttcttagtcttagagtgctatattgaaggggtccagagtgaatggtgtagaatgcagaggtggaatgtgggaggaaagaatttataattgttctaatggaaatctgtgctgggagtttagcaaagaaaacaaggtatttaatctacagcctattgatattctgtgaaggctaccctccttcattcttcttcatcctattcagccatttgctaaggaaagcaaatattgtcacacagaagcatctgggtaaagctctccagggaaacaagcagagtcatgggagaaactgtaccctaggtttaaagcagggagagaaatagctcaagaatgtcaataagggcgaggtgcagtggctcacgcctataatcccagcactttgggaggccaaggcgggcggatcacctgagatcaagagctggagaccagcctgaccaacgtggcgaacccccgtctgtactaaaaatacaaaaattagctaggcatggtggtgcatgcctataatcccagctacttgggaggctgaggcaggggaatcgcttgaatgtgggaggtgggggttgcagtgagccaacatcgtgccactgcactccagcctgggtgacagagcgagactctgtctcaaaaaaaaaaaaaaagtcagtaagcacagaaccttactcaactatgacagataagggtagagagtgacagctctatttgtatcattaaaaaaggtttgagtctggtttttaaattctatatgattctatttctcagctcttattcttatcacctg

SEQ ID NO: 76125 - DNA, 1081 bp, Homo sapiens
aacagatgaaacaggaaactaattagcagctgttgtccatctgtgtgtttatattaaatattttaaaatagaaatgtatttgcattctgaatactgtttctgaaattcataaatcctaaacttgggtaaatgctgtaaaattcaaaaccaagacagagcctttaccatttatcttcatgataaagcaaaaataattttatgccagaatcaggattatagtaatttgaggcagatgtaaattttaaaaagcaaaaaaagtcttaacttttttaagttgctttggaattgagcccccaaagcaatcaaattgaaatctgaaaagatacagtgttcaaaagatgtcataccctctgaatatattctttcttcacagaaactgatgagtacatacacttttgagaaagctgcattcattctctgacagatttattttgaaacatgctcctcctttctctttttctacctttctattaagtgcgtggttctttgacatgtgatcaacttagaactctacagagagtgctattaatattggtagccatcttccaagttgaagatgaatgtcatggctttaggaagaaaagataccgttattcatttcactcaagtcaaataggcaaatgtttcttatgttcaaaaatgaaagggagaagagtattatctacaagacaagtatcaaattgcatcagtcaggtcagattggtgtttccctctatgcttcagtttatatgtgaaaagaaaatagtcattgtgtttatgtaactttcagtatttccatagaatcacagtatcttattctgatgttagctagtccagactttcacccaagggggtgttaaggaaaatctgcaacaacttagctgttaggtttttgtttgaattcttttagtgagaaagatctctactgcctcatgaggtagcacattctattgttcgatggctgttaaagtaagtatgtttttccattacacagagccagtctttcttcctgtgtctttcatctgttagccctaattctgccctccaagcaatgccaaataagttggcttcctcttttacatgatatttgaatatacagttg

SEQ ID NO: 76126 - DNA, 1035 bp, Homo sapiens
aaagccctgtgaaatcgccagtagccactacttcagcatgtacaaggtcctttctccataataagacttaatgctcctgttaggcagagacccttttgattcccacttcatacagaatatagtgctgtactcatgttaatgcctattagtgaataaggcgatgtagttttaagttggcactatatctaaaatcttttccttgtgtgttaatttctttgtctttatttttttccagcccagatgacttactcaatgccttgaatgagggtatcagtcgtgctgatgtcatcatcacatcagggggtgtatccatgggggaaaaggtatgaaagatagggctcgtgaaaatgtatctgctgtaatgttcttgcatatggtcgattaactgtggtctggtaggcatctgatattcataacgaggctcccacaaagctgaaaatccatggggcttcagaaattactggtctctttaaaagggatacaatgtgggtaggtcagggagcttaccctcaggagcaacctggagaatcccacaacttacagaatggtttttgctattcctgtggaaacttctgacctgtttctcactctattttactacattaggacatcctttatgcatgatatttaccaccagggtaaaactctaagatccttccttctactcaaatttaaacatgactccccaggagccaaccaattcacccaccatatattccaaatctaccaagaatgcttagctccccttccccacaaggaagaaagggaggattaggcattccttttgctcctccttacaaaataatataataataataatgaaaatatggccaggcacagtggctcaagcctgtaattccaatactttgggaggctgaggtgggtaggttgcttgagcccaggagttcaagaccacctgggcgacgtggtgaaaccccatctctacaaaaaaaatccaaaaattagctgggcatggtggcacgcgcctgcagttccagctacttgggtgctgaagtgggaggatcgcttgagcct

SEQ ID NO: 76127 - DNA, 1046 bp, Homo sapiens
aaactgcctaaatttataacctgactctttggacagtgaactctgttggctcggagaacaaatgtcagaacttagcaacctgaacagaagaatgcctgccttccattcacaaactttagtgtcagagcctttcagaatagcactgcagatgctaaaaagtttggaagaaaaaaatctcacattacatccaggagtgaaagtgttgtagtgtgtgtaggtgttcttaaagcagacaaattgctggattagtgttccctcaaagtctcccagagtctttagccccaggtagagcaaattgccgcagagctctcctgagatcacaaaggctaggggctgagatctgcactgtagtacagctgaaagaaataatttgcaacttgtctgttttcattaccatcaaactgcctgtggtactctcaatattacaagagcaaaccatgaagtcaggtctatttaaatgttaaatttgttatttccagggtttgtgtcttgttataatttctcttagtttctgattaacctaattgtgggataatagctatttggcagaactaaaacgtttatcttttctagtactctggagaggtaacaaactcatagcatacataggcttggcaattgtggctcaattgtggtaaggacagaacacttctcaacctaaccttctttattagtgctaacaaagatgtcagttatgccagggatttgctcaccagtaaacaaagccaatatagttaagcatattggttttattttttttactctctgtataataagatacttacactaaacctttaatttactaggaaagaaattttagaaactgggcatcccacggtattccttaggagctgctaattgtcccttcctacctccttgagtgggaatgagatgatagaggaaccaggaagaaagagataaaacatacatgcagcaaattcctgccagcaaacaagttttaattccaaaaagaatttagggtacctccatagtagaaagaaaataataaaagacagaacatttgcttcagcccaggagctaagcct

SEQ ID NO: 76128 - DNA, 1056 bp, Homo sapiens
cacctataatcccagcattttgggaggccgtgggggtggttcgcttgagcccggaagttggagaccaacctgggcaacatggcaaaaccccgtctctacaaaaaatacaaaaattagtcaggtgtggtggcacatgcctgtagtcccagctacttgggaggctaaggcgagaggatcacttgaggcggaggtggcagtgagccatgatagcaccactgcactccagcctgggcagcagagtaagaccctgcctcaaaaaaaaaaattaattgattgttctatttgcagagggaaagaagccaacacgacttgcccttacctctagagaagagttatttgtgtaatatctatcatttaaaatattctcagtgcctgtgataacttttatactctttttttcaatctgttatttaccactcacttcaactttagcagttcatcaattcctaacattttatttcctcccttaaaatcataacactctgacttcagccattgtgtaaatgctgttatagtctgagctcaagaggagaactgaataataggttttgagttccaaggaaatggcttccagagcttaaaaaaaaattcacagtttagcaataggacatttatgatagccatgcataataacaaaatatttttttgcaatggaatccttttttaaatgagtaactttacagaaattacattacctacctgcaagatgcaaaagattgcttaaattggccctataatttcaatgggctttaaatgcagtggaaggaagaaggtgttatacattctctcctcattcttattatctgtaggtttgctaaaataaagtagttttgaagtttaaatgggcttcttttagttcaccagaattttatgcttgtctaaaggtaataagaacttaaaggtaattgctacttaatattagaacaaaagaaatataaaacacacaaatacaatctggctttgctatttccacgtaacagtgctttcagaatgcaattaagctctttcattttagagacaaagatactcagaaaagcatttggagtatcagcaacc

SEQ ID NO: 76129 - DNA, 1025 bp, Homo sapiens
taacatttcagcctgaattgagaaattctatggcattttgcataatgctataaaatcctggttttactctttcaagcaagaatttctaatgtttatttttaaagtttgaatgagaaggtggtaggatataatagcatggccacctgaaaaaggtactggaaagtttgatcatcccttctcctcttgaagacccgcatttctgtctgtttacattttgaaaaggtctacaagggcccaactgtatacgccatgatgcttatgctgctgtaataagagtatttctttctaggtaatcaaatgagcagccgtctgatgagcatgcgcagtgccaatggattgttgatgctacctccaaagacagaacagtacgtggagctccacaaaggcgaggtggtggatgtcatggtcattggacggctatgatggtcaccagcaggagaaagctttgatgcatgtccacatatcattgactgtatcctgtaatatgcaacggcacagctagttttcccgatttggataaaagttgatctgtatagtcaacatcttgaactatatttcaaatgaatttaaatatcttttaaagaaaaaaacacctaaaaataaatcttaacagaaaattctgttctgattatatcaaggcaaatttttcctttcttgcaaattgctttgtgtgttcaatgctaggtctgatagcgatagcttttagtagacagcggtaggtgcctgcagaacttgtgtttttctcatctttaaaatacaactacttatgctcttaaatcaaggctgtctgcttatttatactagcgtaggcaacacttggatttcccttcttagtatgcttcataactgctttacagagagcttttgcttgttctttctcatgtatctcgtgtttatgtgcacagtgccaaaagaagactgactgggtggaggctctgccttgcctcaagaaccatcccctgcagagcatccagggaggtttctcgccccaatagcctcacggcacagtactcttgggcagtaac

SEQ ID NO: 76130 - DNA, 1050 bp, Homo sapiens
cagggaaacatacagataacttctttcttaggcgtagaagacattctaaagaacatctatgactagggattacaatgaatcttaactcctagttctgaaggtaaattgtcagatggtgtcggggagaaaagctcccttctcataagaatgtccctacattatgaatgaaactgcatttctatgcatttgggagcaatgctaacttttctctaaacattcaacattaaaatattcagacaaagaaatggtgaaatgagttcaatgataggggtcatacctctaaagttcctagaaattccataacaaagtctaacactaaacactgagctattacctctaactcttaatacattcgagaagctgctcagctgatttcacagaggggtgacaagggaggacaacagacacttcaaaaggcaagaagaggatggcaggagctcttttgccatggctaccaggccgatctccgagcggaaccaggatgccactgtgtacgtggggggcctgaatgagaaggttagtgaaccgctactgtgggaactgtttctccaggctggaccagtagtcaacacccacatgccaaaggatagagtcactggccagcaccaaggctatgactttgtgaattcttgagtgaggatgatgctgactatgccattaagatcatgaacatgatcagactctatgggaagccaatacgggtgaacaaggcatcagctcacaacaaaaacctggatgtaggggccaacattttcaatgggaacctggaccctgagattgatgagaagttgctttatgatactttcagcgcctttggggtcatcttacaaacccccaagattatgtgggaccctgacacaggcaactccaaaggttatgcctttattaattttgcttcatttgatgcttcagttgcagcaattgaagccatgaatgggcagtacctctgtaaccaccctatcaccgtatcttatgccttcgagaaggactccaagggtgagcgccatggcttagcagctggacgacttctggcagctcagaacccgctct

SEQ ID NO: 76131 - DNA, 1055 bp, Homo sapiens
ttttgtatttttagtagagacggggtttcaccatgttggccaggctggcctcgaactcctgacctcaggtgatccacccgcctcggcctcctgaaatgctgggattacaggcgtgagccaccgccagaatataatttttttttttttttttttttgagacggagtctcgcgctgtcgcccaggctggagtgcagtggcgcaatctcggctcactgcaagctctgcctcccgggttcacgccatttttctgcctcagcctcccgagtagttgggactacaggtgcccgccaccacgcctgctaattttttgtattttttttttagtagagacgggttttcaccgtgttagccaggatgatctcaatctcctgacctcgtgatccgcccgcctcgccctcccaaagtgctgggattacaggcgtgagccaccgcgcccagcccttatgatttttgatcatatacttactgaatcataggatcgttgagttggaagtaatcttagtggttatatagtctaacctcttcattttccatgaaaaagaaagtgaggcttgcaggagttaagtaatccgtagtctgactgctagttaggggcagacttggaactacatgaatgctaaaatgctgttctccatattctaagtctccatattctaaattcagtgctcttctcaggatgtctcattgttagataaaccaataagttgccttttccaaatcacttaactggcaggattctttctgtcatggattttttccgttttcttttttaataactactaactgcaattcattcccctactgaagaattttcagttttttaatatttcaaacaatgtttaatgaatatctttgtgtatgtctccttgagcgcatgtgtggacgctttcctagaatgtatgtatacctacctataagtggaattgctgataataggttgatatgtgttttcaacattactagctacagccaaattaccctttttaatgctgtaatcatttacattcctgcaaacagtatgagtgacagtggcttcacattcttgcccacactgg

SEQ ID NO: 76132 - DNA, 2511 bp, Homo sapiens
aaaaaatacgaaaattagctggacttggtggtgtgtgcctgtggtcccagctactcaggaggctaaagtgagaggatttcttgagtgtgggaggttgaggctgcagtgaaccatgatggcaccattgcacttcagcctggtcaacagcaacagaacgagaacctgtctcaaaaaaaaagtagttgaattaaagtgaagaactttgagcctgtaaattgtaaataagctccttaagggtaggatagtgggttgtatctttttgtcttagtatgtcagcccttaatatggctgtgatacaataagaaatatatatttggtctttgtccctgacagctgacctagagcttctaaatcccttggaattttcttaagcatagagagtcttttgtttgaatgagggtgataagagcatcttttgtttcagtgagtcaactcttggcaggcccctataatagcttcaggttaggggctggttgccagaaagaccaaggcatggggccccaccttcaacctctgggaaggcaaagaggggctagagatagccagtcaccaatggccagtaatttaatcatgcccatctaatgaaactcctaaatgacagtgtttggagagattctgggttggcgaatatttcaaggtgctgggaggctggtttgactggagaaggcatggaagctccacaccacccgcctaaaccttgctctttgcatctcttccatttggctattcctgagttgtatcccttataataaaccagtaatagtaagtaaagtgcctttctgagttctggggccattcaagcaaattatttttatttatttattttttgtttttcttagaatcaaggtcttgctctgtcacccaggctggagtgcagtggcatgatcatagctcactgcagccttcaactcctgggctcaaataggcgtgcaccaccatacctagctaattttatttttattttttgtagagatgaggtcttgctgagctgcccaggctggtcttaaactcctggtctccagcagtcctccagccttggcctcccaaagtgctggtattacaggagtgagccaccgtgctcagcatttagcaaactattgaacctgaggagtggtcatgggaacccctgatgaatagctgggtggtgtgaagtacaggaggcccaaaacttgtggctggcatctgaagtctggggcagtcttttgggactgagccattagcttgtgggatctgattgtaactccaggtagatagtgtcagaatgaaattgaattgtaggacacccagtcggtgtccagagaattggtgtgaggaaaagacccacacatttgatgtcatcagtgttgagaatgaaaaaaagctcggaatggcacatagtagatgcttggtttcaatttgtacttttatcatttatttgtttaaactttagccttgctgtgagctaaatattagagactgttctgttctagtcatctcccataaacagataatttgacatttgaaacacaatttcatttattctaggttggccataaatgtgtttactgggaggaaatctaacactttcacatgttcttgattagctttttctacaaagacataaccataaatgtattaatttgctgatgactttttcttgtttttccataggcacatactgacaggctttacagtgcagttacagtactatcactgacttacagtacttttacagattatagagtcagatgtctgcagaaatactctcttgacttgtgtgtgacaatgaacaggttaacttatcaaagcctgattccttatctgcagaatggggatgcttaattcagtaggttttattttgaggattgagatggtacatcaagaatggtaggcatggtgttagtatatacatattaagcactctttcaatgttagataagagataggagttgtgtgacttggttgttatagtctgaggtaatgatgaataattataattgtatgttgaggtcagctttctaatctctgaaataatagtgaaagtcaaatgagagaaaacaatttgttgtcctaaacagtttacttatatagtgagattaagttctgttcagctttatcagcttctctatttgactcaagaattactctggggtgtttttcagtaggttgttttcactacacatttttaaatagactttaaaaatgacgtagttaggccaggcgcagcagcttatgcctgtaatcccagcactttgggagactgaggcaagaggactgcttgagcccaggagttccagacccgcctagacaacatagtgggaccctgtacctacaaaaaatacaaaaaaattagctgggtttgcattcctgtagtcccagctacttgggaggctcaggtgggaggattacctaagcccagaaagtcaaggctgtggtgagccatgtttgtgctgctgctcttcagtctgggcaacagtgagaccctgtctcaaaaagaaaaaaaaaaaaagacatcatttccagagttcagtt

SEQ ID NO: 76133 - DNA, 1021 bp, Homo sapiens
ttgttttgtttttttttttccattttgagtaatggatgtctttcatgtcttttttgggccttatattcatccccccccccttacaagttttcttaggatgctcttcttctacaagtaactcctgtgacattttctacagttctagtgtggcatttaccaaatagcactgtattggttttttatttgtttacttatctgatatctatactagattttaagtgtctttctttttttttttttttttttagattttaagtttcttaaggatacggactctgcctcagcagcctttttcttgacaatgactatccaagtttttggtaccaagtgggtactcgccttgttgaatgaaaaggtagttttagcttaaccctttttcctattagatttgcagtatagttatcttatagattgaccttttattcttatttcttgtttataagaatatcctcatatgctttcctcccctgtaagactgtcttgtcaaaatcagagcattactcataccctcagtcagcagtactaccataataaaagttaattgtactctaaacctgttgacatttgtattctcattagccttcctttcttatcagatttttcttttttccttttctactgatacagtcgtacttgtcctgaaatactctctactgtcactgcttcagtttaatttatagatagcaccagatatgagtccttattagttctgataactctgaaatggttatttggtatttcttcagtgacaagcaaactatccccccacctgcctttaatggccagtgtttttgatttgcataccaataagcgatctaggtagaggtaatcatctactaatttgctaacctttggaacataattttttctctagtaagctgtaaatcacttgaagttagaagttggaatctctggccgggcgcagtggctcacacctgtaatcccagcactttgggaggccaaggcgggcagatcacgaggtcaagagattgagaccatcctagccaacatggtgaaacct

SEQ ID NO: 76134 - DNA, 1037 bp, Homo sapiens
ccatgttggccaggctggtctggaactcctgacctcaagtgatccacatgctttggcctcccaaagtgctgggattacagacagttgtgagcctctgtgctcaaccaactgactttaataagtaattgtaatttaaagtttcaatatttgtttgttttcagaaaagtaatatctttgtgttttttcctcaaattataaaagcaacacatactttttttgtgtgaatattttgtaagatatccaaatagtatagaagtggaaagtagggaatatttggtctattatcctcatttttcagagatattagttgaaaacaatattgtatatattcttctgaatattttgttaataactttataaacatcttctatgtatatttgtaaaaatgggatggtagataaacactgttctgaagcttgcctttttcacttgcgtttgtttcatgtcagttcataaagagcttcatgctctagtagtcacaataaaaagtagaaagatcagactagtctgggtattatatattttaaaaaaacaagtgaaaagaaaccatgaaattaattttaacagtgtattttatttaatacaataaaggtatatcaaaattattaccatttcaacttgtagtaaatataaataaatgagatactttatatccttttttcttttttctttttgttttttgagatggagtctcgctctgttgcccaggctggagtgcagtggtgtgatcttggctcattgcaaccttagcctcccagattcaagtgattctcgtgcctcagcctcccaagtagctgggattacaggcatgtgccaccacacctgactaatttttgtattttagtagagacagggcagaaagaaaaaaatctaatagagtaagtaggaggacgaagtgttccagaaactattgacacacacacacacacacacacacacatgaaactgataggttacctgatttgtttgaatgtatacattaaaaaaatattgattctttttaccaaagaatgtgggtattgtgaacccaaaatatc

SEQ ID NO: 76135 - DNA, 1597 bp, Homo sapiens
taagtaggtaagagacaaatggttgcattctttcgagtccttgatcagtctttcactgaatacacggtttagtctggcccagtgaatctgcatttttacataaaccatagggcagaggaagcaatcagatatgcatttgtctcaggtgaacctcagaggggtgactgagttctgtctgtcctttatccacaaggaatttccttgtgggcaaatggtgagggaggtatgtagctttttatccttgtagctatcttatttaggaaaaaaccaggagacaggtttgtctgacatagttcccagcttgacttttccttggcttagtggttttggggtcctgatacttactttgctttcacaggatgtattagtgatttaaataaaaagtgagacacaacttgtggagagagggaatgtactatgagagacagctaaatattcatcttcataataaatgctcaacagataactaaaaaaaaaagaaatggcatgtatgtatacatagaacatacacacgtattttatatatgtatatatgtatgtatatataacatacagcctatttttatacatgtcactagaaatatgaaggtaagtttaagaagaaactgagagttaaaagtgttctctatgcagaactcaggtagaggaggtgagacactgaattgttcttcatagtaggtttaatggaactgtttgctttttttaaaaaatacacacataattttgtgttacacaactatacgtacaacacatatgcaacacaaaagttgtatattaggggccccttatatggagtgtgtaaaaacattgctgtcaccaaggtagtgaatatttgcatcatttaactacttcattcgattgtcattgaataatttgggaaaaatctctctcctcttgagttattaaatgtttggcaataggtaggtgtggtttttctcttcctgtcttatctagtatttaaatattcaaatttaatgcagcacgtattgagtttctaatatgagcatacatagatagcagtgtgcagggttctcagagccactaccagtagatgggaagtctatagaatatttgcagtctagttgagaagataaggtactcatccataaaaatttgataataggccaggcaccgtggctcactcctgtaattctagcactttgggatcccaaggcaggtggatcgcatgagctcaggagttcgagactagtctgggcaatgtggcgaaaccccgtctctaccacaaatacaaaaacttagccggctgtagtggtgggtgcctgtagtcccagctacttgggggattgaggcaggaggattgcaactgttgtccaggctggagggtcgtggtgtgatcacagcttactgcagccttgacctccccaggcttaggtgatcctcttgcctcagcttcccaagtagctgggactataggcacacgccaccacaactgcctatattttgtactttatgtagaaatgaggtttcactatcttgcccaggccggtcttgaactcctggactcaagtgatccacctgcctcggcctcccaaagtgctgggattacaggcatgagccactatgcccagccttcaga

SEQ ID NO: 76136 - DNA, 1097 bp, Homo sapiens
tatctgtaaagtgaaagtacttaatctacttaacaaaataatattacatacttattattttctacgttgtatggtgattagaagtgggctctgtaaaaacctgcttttatattgtaattcttacacttttttcccccccatctttccccttagatttccttcatggatactttttcatagcattattatgtgatgtgagaagtttttttttttgaagtaacatggattttatactacagaatcaagagaattggcttataggaaaaattgatttataaaaagtggtacaggttttcatagataaccatgacaacatcccatatgaatgggcatgttacagaggaatcagacagcgaagtaaaaaatgttgatcttgcatcaccagaggaacatcagaagcaccgagagatggctgttgactgccctggagatttgggcaccaggatgatgccaatacgtcgaagtgcacagttggagcgtattcggcaacaacaggaggacatgaggcgtaggagagaggaagaagggaaaaagcaagaacttgaccttaattcttccatgagacttaagaaactagcccaaattcctccaaagaccggaatagataaccctatgtttgatacagaggaaggaattgtcttagaaagtcctcattatgctgtgaaaatattaggtaagtaaaaatagaggtataacagaaaacattttgctttaatttatctgtgccttataatgtatatgagaaggaagagggtttaagagaatgtaagtaatgacagtttgaattccagaccaagatcctttgttttcgtggaaacgccgtataactattgtttactgttaccaacatagagctaaaagcatgtggcttaaatgttaagtcactataacatgtttttttagatattaaagagttctgcatgggccctaacatttaaagccttgaaatttaccttttatatcaaaccacaaactttatgcaaaatactaaaaaagaattttcagattttgaatttctgatttccttaaagttttgtaaaatagtaataaatttgtaactacagtttaaattctttgatttttttaaattaatgatt

SEQ ID NO: 76137 - DNA, 1008 bp, Homo sapiens
tattctgttgtgtaatttttaaaagagttttacttaaaacctatgaaatgaccatgattgacaataatatatgcagattttggtatttttctgaaaacttaaattgttactggttcaaagaaatgttctctgaaaatgcatgttgaattaatactgaaacagttaatttttggataccttttcttcttctactagaaatagaagacttgttttcttcacttaaacatatccaacatactttggtagattctcagagccaggaggatatttcactgcttttacaacttgttcaaaataaggatttccagaatgcatttaagatacacaatgccatcacagtacacatgaacaaggccagtcctccatttcctcttatctccaacgcacaagatcttgctcaagaggtatgtattctaaacatcttgttgatgtctacaaggtaattagtagtggcaggaaggcaggattattggaaaatactaatgtgactataagatttgtttgaattaattactgttaattacatgttaataatgtattgtgacagtttactacatgcattttatcctaaaaacaaaaaaagtttacttcagagtcagaacactgtttcatgaagagttaattttttatatataatcataaatttggatagtaacaaatatttgaattactagagagcaatttgttaatgtttttagtatagttttatgaattttaagcattatacattataaactgagatagtgaatactgatgagataattataactgataatcaggcattatataacgcctaagatttattatgtctaggtatttggaagttttcctcctataaaaactgtagacatttcaaattattaaatcttaatatactatgggagtttttattgttaacatgatgacttaaattcttgtttctgatgctaactggtgttcagtgtttgatctgttatgcaaacatcttttaaatttaagatttaaaaagggtataaataaactctcctg

SEQ ID NO: 76138 - DNA, 1036 bp, Homo sapiens
tggtgattgttccattacactcatataaattcatcttgttagactgtcagtctttttttttaattatataaaaaaatttataaaatagagacagggtctcactgtgttgcccaggctggtctcaaactcctgggcttaagcaatccgcttgcctcagcctctcaaagtgctgggattacaggtgtgagccactgcacccagcctgactataactctttaagttgtcatctctgattttaaatagtcacataaatgatttaaaaactataaaatagcaaggtaactgttaggacagtttttcttttcttatgtaattattattaatgaattttatggtatgttgggtgaaacgttcaagatggaagtattttgtctataggcgtaagtaccaaaatattatttagtgtttttttaataagaaatactgttgttttatccataataacaagattgaaaactctaataattctttttagtgattttatttcttacaagtatttttattattttaatttgtacttaaaaaatatgaccctgcatacaggtgctactgatacttcctataatctaggaagaataatctttatttttgtttcttaggtacaaactgttttgaagccagttcatcataaggaaggacaagaactaactgctttgctgaatactccacatattcaggtagaaaatggacagaatactatatatgtggtttttccagcattcttctatttttttaaatcaaagactccagtactggaagagatgtcaaacattctctagcctattttgatgtttacaaccccatctataacatagtagttattgttggattatatattttcagatttaaaatgaaccaaattatttttgaaacaactttttctttaaaaattaggcaaaaattcttcccccctttggttgtattttctgtaagtttaattatctagggtgtgtagacctttacattgatgttatcttccgaagtttagtaagcattttagactttcataacccattccagagtatgcccttagta

SEQ ID NO: 76139 - DNA, 1035 bp, Homo sapiens
atagctatttctgtttaaattaagtaaaatttaaaattcagttccttattcgcactagctgcatttcaagtgctgagaagcagtatgtagctaatggctaccattattaagatacagaaatagcacatttccatcattggagaaagttctattggatagtgctagtataatcagaaaatcatttctagacatcttttgagtgcaatttatgatcactttgtacacacgcacagactagatttatggtcctagttattcagcatctgttattacagtggaatctgtactatctactgattctgttgtaaaatctagagacatcttcacacacttattttcatccagccccattcattgctttggtagagcaaagtgctgctggtcatttaagtctgtggaggggttctgaaatagtccagtttagggaatatagatcataaaatcatggaatgattttcataaatgcaaatttaaaaaataacctgatctttctattacagtctgatatgcatggtactttgacttttgtcctgattcccagtcaacagatcaagccgcctcctgccaaggaaacagtagtaagtgatttttaaatgttcattatttatgtgtttgtggatgctgtttacttctgttactgtttactgttacagaaatgtcactgtttcctgtactcaaataaattcaatcatttttatttaaataaatatgaaatatcaatgttttaaattagtaaactctgcacctttttttttggaaggtggaagatggaatctccatctgttgcccagggtagagtgcagtggtgtgatcttggctcactgcaacctatgccttccaggttcaaatgattctcccacctcagcctcttgagtagctgggattccaggcgcatgccaccacacccagctgatttttgtatttttggtagagacagggttttgccatgttggccaggctgatcttgaacgcctggcttcatgtgatctgcctgcctcggcctcccaaagtgctgggattacaggtgtgagcctt

SEQ ID NO: 76140 - DNA, 1056 bp, Homo sapiens
ccagtcacaaaaggccatatattggttcatttatataaaatgtccagaataggtaaatccataggagagaaagcagattagtaattccttagatgtggagatgaggatttatgagggaatggtgattactaatcagtaccaagtttctttttgagggcataagtatgttttaaaattgtttgtggtgataattgtacaaatctgtgaataaactaaaaccatccaattgtgtacatgagtgaattgtatatgaattatatatcaataaagctatttaaaaatgaaactttaaagtgttgaattaacatggaagcttgatgtattgcatctgttattcttaactttaaagcatagcagtttgagaaagaacacagtttcatttttctctcaatatttcatcacaggtatgctttatagtttggctatcattccatgttttcccttaattttttacagaacatacggaagttgatattgtatctgcaacctactttatgtttacagtttttttgcaggaagagaaatgaggaaatatagtttgtctttgaatttaaacagcttgattctctgtgcattgtgctgttccctgtatctcttctgtgtataagccctgaacttcaaaagtagctctgcaaactgaggaaacataacagaggagggttggaatatactcctacttacttatctacaataatccatccctcctgagtaaatgacttttgtcttttgagaataaatgtcagaagttaagacattttttttttttgaggtgggatctggctctattatccaggctggagtgcagtgatgtgatcacgactcctgcagccttgactgcctgggctcaagcagtcctcctacctcagcctccctagtagctggaaacacagatgcatactaccacatccggctaatttttttgtacttttggtagagatggctttcactatgttgcccaggctagtctcgaactcctgagctcaagtggtccacccgcctcggcctcccgaagtgttgggattacagacgtgagccacaatgcccagccaagacatg

SEQ ID NO: 76141 - DNA, 1002 bp, Homo sapiens
tattaacccaacctgatttactgattttattacctccttagtttgtttttatgggcatttgagtttgctacttctgtttggttcacattagaagcaacccaaataataaagcaaaggctttccttcttatgtaatttataaggcttttctgtcaagaatttgaaatatttgggagcagcacacattaaactaataaagataaaacattatagatcattataatattccataaaagctaaatgaggtttgatcaactttaataaatttttttctaaaataaatatcctttaatgctaattgacagattatgtaactaaaaagatttaatgagttttaaattttatcctctatatttgtgattaatatctcttttattttttgaaacagactgaagttaactagtccagctctaagagctactgtactgtagaaaacgtggcaaatctgaaccttatggatatacacactgagtctataaattaaaatgctaccagtcttgattatacgtgttagaataaactcagatttttcagagaaaatcattttgagaggagaaggaattacatttgctgtttatgatgatgtcatcatcatgaatatttttaaataaataactacaattcataataactgctgtattccagggcagtaactatatgatgttgttctcacaaactccttgaggttacagagtaatagattcaagtttagatattaggccgggcgcggtgggtcatgcctgtaatcccagcactttgggaggccgaggcaggcggatcacgaggtcaggagatggagaccatcctggctaacatggtgaaactccatctctactaaaaaatacaaaaaattagccaggcgtgatggcgggtgcctgtagtcccagctattcgggaggctgaggcaggagaatggcgtgaacccgggaggcggagcttgcagtgagccgagatcgcgccactgcactccagcctgggcgacagagcgagactccgtctcaaa

SEQ ID NO: 76142 - DNA, 1929 bp, Homo sapiens
tattcagcgtatacattatgtctgattcttaaaacaaccttcttaagtagaatattaatatctgcattcttcaaaaatgacggatattactcttactagttcattccctggtaccgcatccttattcaaagtattgactgcaaattagctgtttaatgtaagaatcagtataattatattgtattagacattcaagcatgaattttttatttcaaatatgaaatgagataaaaattaatagaaggagtattatattgttgtctgattcattttcatgataccctagcaaggatgtaatgacaataaattgtgcttttgtctaattttgggtgaagatctatgagtatttatatctttaatacatggccataattttgtttgaagagcttaacttttttttcccaaagattatgacaacgaggagatcttaacctatgaggaaatgtcactttatcatcagccagcaaataggaagagacctatcatcttgattggtccacagaactgtggccagaatgaattgcgtcagaggctcatgaacaaagaaaaggaccgctttgcatctgcagttcctcgtaagtttgaatgcattcccattttcctgtgcttttcaatttaccagctcagaacctaactatatcatgtagggaaattttttattcatttcattaaaacactgttgtcagtgaaagaggaactttaaccaaagattttgacaatttttaaattaaaaatagtcattattaagaaatttaaatttgtccttcaagtatgtactgattattttctaaacaaatttcagtttgggccccttataatttcctgttccatagagaatcagttcctgctgctttaaagtgatacagaagatagaaacttaggcataatctgaaacagaagttataagattatatggtacctaatcttatggagataaactttaggagaagatgagtagtagtgttttaaatgcaggatgaagtaacttgaagtgtaagcataaaatgtattgagataaatataactattactaagatactacaaactcatttttgttcatttttcaatctacaaaaaataaaaacaatgttaaacatgtaggcacttagcattttctcagtttattattttataatctgtgttacaaaatagaaattctttctgactagcagaattatcccctgtcctcactctaagccatgcctgttatttctatctgattttgtttgcctagatacaacccggagtaggcgagaccaagaagtagccggtagagattaccactttgtttcgcggcaagcattcgaggcagacatagcagctggaaagttcattgagcatggtgaatttgagaagaatttgtatggaactagcatagattctgtacggcaagtgatcaactctggcaaaatatgtcttttaagtcttcgtacacaggtaaagctagaactttgttttagggtttgaacttagaaggaatgtcatatagagtaatctagtggaagctatattttggtccaagaacagcgcgacctaattaagttctcatacggtttttcccactgatttgctatctgaaatcacacaggttgctaaatctctttcagtttcctcagagggaaaacatatacatacttacatatacaggttgactatctcttattcaaaatgcttgagaccagagtgttttgaatttcagaatttctcagattttagaatatttgcatatatataatgagctatcttgaggatagacccaagtctgaaattaaattcatttatcttttatatacaccttatttacttagcctgaaggtaattttatttttcctggggatattgaataaactgtctgctcctgtattttgactatgacccgtcacatgaggccagggtaacgttttccacttgtgctgtcatgtcactgct

SEQ ID NO: 76143 - DNA, 1059 bp, Homo sapiens
ggctggggtgagaggatcacgtgggcccagagtctgcgcctgcagtgagccatgaacatgccactacactccagcctgggcaatagagtaagaccctatttcaaaacagcaacgaccaaaacaacaacaacaacaaaaaaaacaatcaaaagaaaggagtgtaaatatgcttttaatgactatctttaaggagatttaaaggcatagtcaatgaaatgaggcaatctgagtgagccctctcaaaagtagatctatttaataaatatggagcaaaaaaaacaaggaagaacatgttactctgatacagtaagtcacctgacagagttaccatcttacatatttaaataaaaagtcaatgctgtcttattaataacatgttatcagtcaattattaatgtttaatatgacatggactacctcaaccatatctagcatagatctaaaataatttaaaaaaatttttctgttccaaaccatgtgagaagaccaaagggagaaaaaaagcagaacataaagtttcagtgggataaaaagaagagaaaagcaagagcactcaaatttggctccctgaaaatgtggagtatctacagagaaaagtcagtaatcctgaagagttggctgataactttggtggcagtcacatctccctagaaatgtcacagacccatgtgaagacgctcaaaggttaccaaatgtagatgccccaactttggaaagctgccatagtccaacccagtggcaaccatggcaatttttgggcaagtaatattacagaaaaaataatcagtttgaaagctcaagctaatgtagcttttaagcaccaggacaaattagaccaggactgtttcatgtttaccttcaatggaatagtacaatagtgtgaaaactttacctttggattcttgccttctttggccaataatgcccgaagtctttcttgtgaagggggtgcaatgaagataatatatggtttcaaatctgaattccggagagtcttcaatgactgtaaagagacattttgatttttaaaataatttgcatcatttaattacttcctaa

SEQ ID NO: 76144 - DNA, 4144 bp, Homo sapiens
actctggtaggatacttttaactctctgcagcagatagtatagggcaagggctctttactagagccaaaagtaaatggcattttaggtccttgctccaaccagaaaggttcactccatattacagatgttactattaggaagaggttatagtgtctagaatgtttgaaaacaaatgtttgtagggaaacagtgtgtgttcttgaagcttgtagttttgttggtgagataagacaaaatatgtgaaaacctaaatagtggtataaaacaggatatattgagtcccagatggttcataatatgagtcgtgaagatgccaaagcaaaggtaaccattgtggccgtgacagggttggaaaggagctcctgaggttgggagagacagaaggaaagctatgaaggtcgctccttgttctttggccatctctgactcatcctatattatttggttaggaaaggaattatctcacagtttttatcttctgtttgcagcctgaagagttgagagaaatcattgagaagacaagagagatggagcagaacaatggccactactttgatacggcaattgtgaattccgatcttgataaagcctatcaggaattgcttaggttaattaacaaacttgatactgaacctcagtgggtaccatccacttggctgaggtgaaagaaacatccattctgtggcatgttggacttgatctggcaaaaactgccaataggaggactgcccgacactgcagcaagattgaggataagatggaaggcagcagtataagctgtagatctgttcttagatctcttgaattagtgagacgacagttcccttaggcagtttgtgcatggcatcctttattctctatacatggctttagcggttcttgcctcattttgggattctaaatggaagctttcaacagagcattccattttgtcctgttaaaaccttttgttttcacctaaaccctttctgcttagttgtatctctgtgaaaaacttgtatacacaagcgtccatgtctcacacaaatattgatgtgattattcttaagtgttaaatcattaacacttaaatgacttcattgggaatattgagcagagggactgtgcttctatgcactgggcaaggcagtatttgcttaggaaactaatttagtcatcagagatactttcctaaaaaggaaaaataaaaaacaaaatggtgccactttgggttgaagctactttgttaggcttgaattcatttatatgtcttttgattcttaaaaaaacaaaaaacattccattagaagcaccagtttttttgctcagactttgtggatcagactctacactcaacacactctaatctacttaaaggtatacaaaatatgctgatcttttttaaattatgatttcctgaatttttttcttaagtcgtctcaactgatttactcacttagcttcccttccctcatcagcatagtataatagaatgtatgttacatttttatgaatggcaggtgttcattataatctgtattgacttaaaaagtttcttcctcatgatgctaatagttttttgtatacatgggaggatagcacatttgacagtttttgcatttttatgtatgagcacagtatcctatgactgtgctacgtatatataggtaataaactggaattctgttgatgaatatagctgctgtactgtatattaatatttaatagatcaacaaatggtcattgaaaacacttgtttagcattagaataaaattatatatgtccttgggaaatattatgacagttgactttaagatcaaaaggaagggaagacctgaaagtcatttgaacattttaggaaaagaatattggagagaaaaaggtattaaatatatagaaataggtttttaacctaacaaggtctgcctcttatgacgagaatgcaacagcttggtaaatcataaaagaaacatttaagctaataggattttcgtactgtctctatagctgtagctttaaaattcaacgtatataattggcatggaaacttaatttgcagtcttttcaagcctttaggatagtgtgatgtgtaacaaacaacctcaaatgtgaatgccttgattttatttttatggtgactttagctacagcatttcctatacccagagctaaacactggaataatactgacatcatttaatttaacataagcaattatgtttaaggagtaatttgtgtcatgtacatatttgattgattttttttcttctacataattttatttgaacaaatgtagacagtttatatgtcgcctttttctgttcaaatttgcatggcctattaagttggctggagagtgttttatgtggaaatattttcaagataatgttccttaggaagaaaataacattcttgggttgagggaaggaatgccatacactactgtctcttcagatctgaaatactccagtttagagccaggaaatttcacaggtcacaccgatttttagcattaaaaactaaggaatatacttagcacttacttaatcttttcagttttccagtttacgtctcaggaatgaagtgtagtctatggttgacaatggagttttgtgatcctgcttattgtaactgacaactgttttcaactccaagagctaaactattggcagttcatgttaagttagagtgagggtgtaggtagtgtcagtgagtggctcttgtgcctgctgtagacattaggcctgcactagggccatgtgctgtcaagattcaggaacatggctttaacaagcagatcttgtatcaaggcagaggtgatgccatgccatacttttaggaagtctgagatgataaatatttcaaggtcagtgaagtctatcaatcattctccccttcctcatcagcaatggtagatagaaatgtcctaaacttttctaaatcctagtgatgaggatgtgctgatattcaacatagtccttaaagtgaaaactgagttgttgctgacctccacaaaagaatatggaaaaaagccttgctgtacacctagttgtacagccactctggccaattccatttcctgtccctctgtggttctgactggagaccccagtgtgggggaggtcttaccatttaatatagaaatgatatcaataactaatgctatgtacttggaaaatccaaataaggaagttttaggttggtgcataactttgtttctcaaattttcgttgtcagaacaaatggaaggagaatattatttagactaatccagatttgctttctatgaaaatctaatgtctggattatcttccttttctcatggcctaagaaataaggatcaataaggaatgatttgaatgtaattttgtgaatgtgtggaaaatataaagcagggatttagccttaataaaggtaaccttctgacatctgttgttaatccccctttgtactcttttcctgtatctgcactgttattttgagatgtcatactgtacactgtattgtaaaaataaaaagtaaaattatatttcaaattttaaaagccactaagcaatttctcttgctatttgctcggccactcaaggtttccacacatgtaaagaccaccctcctcttcaagtttttgccaaaagcaagaccattggatcctccagctacaacacaaaatactttttgatttgttctttacagagggatagtgccccctgttggcacaggtataggtaggtcctgtttccttaattattaaaaccaacaactaagtgtattaaagatggacaacgcaaggctgtgaacttgaaagttttctggagaaggaggtatgtaataatactcaggcaaatggaccttatgtgcagcctgggatctgaggacactgaggcagcatgtgaattattggcaaatatataacatattttgtttctccagtcttcatttctcctttttttctgctgtacatctcccaaaggtcataaatcatacaccaacaaacaaaaagtttcttacatatatacacctgtcaccacagttcagctttccattcctattcctgatctatattcttctcctatgtttcagataactgactccacacaacaaattatgtgtccattgttttcttgatttctttttaacaaatgctaaactataaagtcatctgc

SEQ ID NO: 76145 - DNA, 1041 bp, Homo sapiens
cacttaagaataatcacatcaatatttgtgtgagacatggacgcttgtgtatacaagtttttcacagagatacaactaagcagaaagggtttaggtgaaaacaaaaggttttaacaggacaaaatggaatgctctgttgaaagcttccatttagaatcccaaaatgaggcaagaaccgctaaagccatgtatagagaataaaggatgccatgcacaaactgcctaagggaactgtcgtctcactaattcaagagatctaagaacagatctacagcttatactgctgccttccatcttatcctcaatcttgctgcagtgtcgggcagtcctcctattggcagtttttgccagatcaagtccaacatgccacagaatggatgtttctttcacctcagccaagtggatggtacccactgaggttcagtatcaagtttgttaattaacctaagcaattcctgataggctttatcaagatcggaattcacaattgccgtatcaaagtagtggccattgttctgctccatctctcttgtcttctcaatgatttctctcaactcttcaggctgcaaacagaagataaaaactgtgagataattcctttcctaaccaaataatataggatgagtcagagatggccaaagaacaaggagcgaccttcatagctttccttctgtctctcccaacctcaggagctcctttccaaccctgtcacggccacaatggttacctttgctttggcatcttcacgactcatattatgaaccatctgggactcaatatatcctgttttataccactatttaggttttcacatattttgtcttatctcaccaacaaaactacaagcttcaagaacacacactgtttccctacaaacatttgttttcaaacattctagacactataacctcttcctaatagtaacatctgtaatatggagtgaacctttctggttggagcaaggacctaaaatgccatttacttttggctctagtaaagagcccttgccctatactatctgctgcagagagttaaaagtat

SEQ ID NO: 76146 - DNA, 1018 bp, Homo sapiens
cttgcttttggcaaaaacttgaagaggagggtggtctttacatgtgtggaaaccttgagtggccgagcaaatagcaagagaaattgcttagtggcttttaaaatttgaaatataattttactttttatttttacaatacagtgtacagtatgacatctcaaaataacagtgcagatacaggaaaagagtacaaagggggattaacaacagatgtcagaaggttacctttattaaggctaaatccctgctttatattttccacacattcacaaaattacattcaaatcattccttattgatccttatttcttaggccatgagaaaaggaagataatccagacattagattttcatagaaagcaaatctggattagtctaaataatattctccttccatttgttctgacaacgaaaatttgagaaacaaagttatgcaccaacctaaaacttccttatttggattttccaagtacatagcattagttattgatatcatttctatattaaatggtaagacctcccccacactggggtctccagtcagaaccacagagggacaggaaatggaattggccagagtggctgtacaactaggtgtacagcaaggcttttttccatattcttttgtggaggtcagcaacaactcagttttcactttaaggactatgttgaatatcagcacatcctcatcactaggatttagaaaagtttaggacatttctatctaccattgctgatgaggaaggggagaatgattgatagacttcactgaccttgaaatatttatcatctcagacttcctaaaagtatggcatggcatcacctctgccttgatacaagatctgcttgttaaagccatgttcctgaatcttgacagcacatggccctagtgcaggcctaatgtctacagcaggcacaagagccactcactgacactacctacaccctcactctaacttaacatgaactgccaatagtttagctcttggagttgaaaacagttgtcagttacaataag

SEQ ID NO: 76147 - DNA, 1054 bp, Homo sapiens
agtgagccaagattgcgtgcgccactgcactccaccctgggcgacagagcaagactccatctcaaaaaaaaaaaaaaaaaaaggcttctgtctcaggttaaatcagttattagcttaaaattatgtatttttagcttaaaattatgttttttaaaaaggattataaataaattactgaaaatgaaattaataaaagtaccaggtttttttctaggtatgtgtttattatccttgttacaaaactcaaagaaatcaaatctacttaatattgaaacagtgtttaaaaaatccacccccacctgtattttacaggttaaagaaaatacaagagaagaaaaagattctaaaggaaaaatctgagaaggacttggagcaaaggagagcagctggagaggtgttggagcctgctaatcttctggctgaagagaaggacgaggatcttctatttgaataatctttcctgttctggttctttgagaaaccctaacactggcttcattttaattcacagtgtgtaggtttgatttgtgtggctatttattttttggcctaagaatttcactggttgtaaaatttacctagatgtctatttatgggattacttttgcagaatcataatttagcaaccatttatcatggatgaaagagatctgtaaaacctgcccaggaacttacagaatttactttgcagaagcgttatcatactccatttacatctgtgttacacgtgatctgcttaccaagcatattaggaaatacctcttaggaagcattagcggtctcaggccaattactgtggagcagctttcattcctacccacttgcaaaccttggcgctgttgtctgagattgctgcagccattcttgttaccatggtacttctcaaactttgtgaaaacctgcacttttccttgcatgacaggttcctgtcttgtctgtcatgggagccattctgccaatttaaatgcgactgtggtataaacagtaaaatgatttaaaagtaagtcattccgtttttattaatttactgttaagtcatgttctcatgctcaga

SEQ ID NO: 76148 - DNA, 1041 bp, Homo sapiens
gaaaccccgtctccaccaaaaaaatacgaaaaccagtcaggcgtggcggcacgcgcctgcaatcgcaggcactcggcaggctgaggcaggagaatcaggcagggaggttgcagtgagctgagatggcagcagtacagtccagcttcggctcggcatcagagggagaccgtggggagagggagagggggagggggagaggaagagcttctttgtgtttttattttccaagttctctgcattaaatgcacattaattttacaattaggaaaaaataactgttatacaaatgagcactgataatttgaaaaaaggggtttgaagttctcacacatattatttttttttttattctagtcatcattccccggattgaacgtactcttgcttatatcatcacagagctggatgagagagagcgagaagagttctataggtttgttgaaattggcagttattgatcatcttttgttttccatattccaaaggctgtatttgctgaatgacttgttggtttatgttctttagaattagcacagcttatgttttattctgataaataagcagcaagaaatattattaccagaagttgtggaaacaaatctgtcaaattttacatgtacctataacatggcatttccaaaaacttaggcctttcagagaaactgtttaggtttgattttttttttaaatatatgttttaagatagtcaaatgcagtagtgaaaagtggggaaagagtagaacaaggagtttgatctgtaactgattgtgcgtaatagagagaactcattacctttggacaagccaagactgaattattcttttttttttttttttttttgtgagacagagtcttgctctgtcacccaggctggagtgcaatggttcgatcttggctcatgtgtcaccatgcctggataatttttttgtacttttagtagagatggtgtttcaccatgttggccaggctggtctcaaaactcctgacctcaagcaatccacctgccttggcctgccaaagtgctgggattacacgcatgag

SEQ ID NO: 76149 - DNA, 1026 bp, Homo sapiens
tgatgcaactttttgagtacattaaatatttaactttaaatcagtataagccattctccttgatttctaaaaaatttcccatttgatgcacttattttccatctcttttatttcactatttaaaaaatatgactgcttagtgttgatggtactttttgctcaataaacttagtttttattaaagaaacactcaattttaggtaagaaagcaaaatttgaagtaaagaaattcctttgcttgggaatttctatattaatgctagtgagaaatatattaactattatattaactatgtataatatgatatattaactatattgttagaaatatattaactgttatattaactatatattaactatattaatgttagtgagaaagttacctcattttttaaaaaacctttttgactgcttgctagtgccaggccttgtacatgaaagtggaagcaaagaaaaaaaaaaaaaaaaggataattcgtagttcttaccctcagagttcacattctagaagctgaacaggtaaactatgtaaagtcgagcctaatgacgtaaactcaatcgagcattctctctgctcgattttttaacagttgattgctactatatttaaaataacatctgtgcttcaatgttatatattcatagaattcagcacattcagtgttgtatttgttatggtccaataggttatctatgcatagaaaagacactagaagggtatacaccaccatgtttacagtagttactcttttggatggttggattatactctattttactttttttctttgtgtttttttttattttattttatttatttatttatttatttatttatttattttattgatcattcttgggtgtttctcacagagggggatttggcaggtcataggacaatagtggagggaaggtcagcagataaacaagtgaacaaaggtctctggttttcctaggcagaggaccctgcagacttccgcagtgtttgtgtccgtgggtacttgagattagggagtggtgatg

SEQ ID NO: 76150 - DNA, 1011 bp, Homo sapiens
aataaataaacaaataatattctttcttttggcacttgtatttccttgcttcatgtgatatttaattaaatcatatagaatattaagtacatttcatacgaagaagtagagcattctagagagagtcacctgttcacagagtgtcatcgtactctgggcatcaggcagtatgattttcaaagggaataaggggcatcaagctagtgaagtgaaggttggttaaaagcttcctttgtagttatatttagaatagtattcttgtgggaaactgtatttagtagcatgctcctatagtgtttggggagtgagataggcacttcatgtttacattcaatgaagattagtgaattcatctttccatatttgttattattctgaattatctccttttggggaattttatagggaagatattttactctaattaaaaatgttgtctgactggtcctttcaggttatgaactgactggtttagccagaggtggggaacagttggctaaattaaagaggaattatgccaaagcagtggaactactggtggaactagcttctctgcaggtaagtagcaaaagacctggagaactcctgtagtttgatttgtaacagtcaagtggaggagagtcaggtcttgagtcagcatatactgtgctttgtacttttaactgttcccatgatcctatgtaaagcaaacataatattttgatttctgaagtgatggcttttgtaccattgtccctactttttaaaatttatgtattttttatttttttgagatggagttttactcttgttgcccaggctggagtgcaatggcgcgacctcggctcactgcaacctctgcctcctgggttcaagtgattcttctgcctcagcctcccaagtagctgattacagacatgtgccaccatgcctggctaacttttgtattttttgtagagacagggttttgccatgtttgtcaggctggtctcgaactcctgacttcaggtgatccacccgcctcggcctccc

SEQ ID NO: 76151 - DNA, 1043 bp, Homo sapiens
aacattgttgcattggagattgtttccaacacatgaagattagggacatattcaaaccatagcatcagttaaacctgtcagctacaaattctctatatagtctcactttcatcacatcaaaggataaaggataattttaacactggtggggagggttttttttgtcttttaaacaatgagaatagatgtcttaactttgtttatgtttatatagggcacagaccatcatgaaggctcgtttaaagggagcacagacaggtcgaaacctcctgaagaaaaaatctgatgccttaactcttcgatttcgacagatcctaaagaagataatagaggtagaatgaacttttcttagaatagtatttattttagaaaaatccagcatggcccttggcatttttttttttgttgttgttattttaattaatttttttctttcaaaagtaaaaataccattataagtttaacaagtgtcaaatatcaaatagttcatttaataaaatccaaactctttaatcttgcctgcaaagctccacttgatctgattggccccccgcctgcctctcttaccttatttagagcattcttcctaaggtcctccaggtacttttcattagctctttctcctgcctgaaatactctttccccagaacttataactggctcctttagctgttctagtctcttaagagaggctgttcctgatcacccaatctaaagtgaacaccatgtttgcttctctcacaattccttattttaattttattgtagcatgtactaccgcatggtatgacattttatttctagtctttttcttttttttttttttttgaggcaaggtcttactctgcagcctcaaactgggctccagtgatcctcccacctcagcctctcgagtagctgtgactacaggtgcatgctaccattctcagctcattttttttatttttagtagagacgaggtctcactatgttgcccaggctagtctttttgactcccgggctcaaacagtctttctatcttggcctccgaaagtgctgagttt

SEQ ID NO: 76152 - DNA, 1032 bp, Homo sapiens
cagttctggagctattgcagcctcggttgcccggccggggacccgagccgaaaagttatcgtcagaatgtcgggcaaagaccgaattgaaatctttccctcgcgaatgtaagtaaaggaatgggataagccgctttcacaggtttaggaacccggagcgcggtcccttcagaccctgggccacagtgagggtccttgtttcctgggaggatcctgagcttttcccaggttcttttcttgagtctagggcgaggcttcctgacggcctcttcgcgcattcctcctgagtgaatcaggctggacgaagcgatcccagccggtaggaaaaggcgcccggccggcgggcttttgtggaggtctgctgtctttattcattaatggattcatccattccacatacccttattgagccgggcactggatttatataactgaaccgtcgccacctctgccctacagagctcacagtttacgtagccagacattcgtctggaaaggccaaggaggttttaataaatgctctgagaagggaagtttactgaggatatagaagaggtccctaagccaaagtggggatggaatcgaatcgccctagcatagccctcggattcgatcttggatccccttactcattttccaagatcccgccaaatgtcacctgctgtgagaggatatccctgtgtttctgaggcactgcttttgctctctcaccgctgcaccttgttcagacctgtgttaataccggtcatcacgctgtaaagtagatatttgtttatgtgtctttctctcccactagactgtgggctctctccaggatgaaagagtgtcttaatccatagaaggtccacaaaaaaatatttcttgaaagaactcatgcttgggaatacgctcagttgtgggctgcctttcttttggggcctgaattctttgtcaggaaaatggcatatcactgtaggtgtttggctagtttgtaaggaaaattttgacgttttctcaaatgtgcctaacaacttgctccctttctcctcctcat

SEQ ID NO: 76153 - DNA, 5516 bp, Homo sapiens
gacgaagggggaggacagaacagaggcgttgcccggatgtcgaggcgcgcgcaccgcggaaccacccctcaattccggttcgcctcccaacccctccccatccagcttccctgcggctgcgcaatacgcggcacgcgccaggccaaagactaggagcgaagcgtgcacgccttgtctttctccacctttcgtctttggtcacagcgccatctcatggttagctgaaactttgaaagaggattcattcttcagaggcaaggaatcggagtcctatgtctttctcgcgccttgaaggttacttagctaaagctaagatagcgagaaacagtacttttcaggtccttccatgatctacattcgtccttgttctcggaggacccagactctatggttaatgatgaagaggggcctctattcgttcagcgcttgcgcatgcgaggaggttccgcatgcgcggtggagtgagcgaagcgcacgctgaggaggatcggcggccggtgagggggaagcaagtctggtctctgtgattgaagaagtcggctctgggctccagtgcgggaatcacacacatacctcaggtgactaatcccaagctcggtttctccaggaactcactttggtttgtgtccagtgacatgggtgttcgagagcgggtaggccccgggctaatacctccctttcccgtccctgcgcgggaagtggctggacagcaccgccaccacccgcgctgtcgtgggcctcctcgccggctccgtgtaggtcatcctgtgttccagaggcatcgttgttcgagcagaggaatctcgtgaaggaaagtgggccgagtggattgtacagcctctacaatatgccgaaagtgagaatgccatgacgatggggcggtctcaggagaacgctgtgacaccgtaactcttaaccccggctcaggacgctgagcactttgctttttccaggcttgagaattccatcttttcttccgccccaacagctctaccaaaaatttcccctgcgtctcagtggaaaccaaactggcctcttacctgagaaacctgtgggacgggcaccgtgttggaaagagcggggtccgagtagtttttcatctgataattgaatgagtcaccccttgaaccaaaactaaatgagacttgagtttattactgttactatcagtttgtcgtattttggcgacaatgagaatagaactgtgttaagcatatgttaggttaactatgttagttaagcataactaaaacctaagataaggatatattttcgggttaaatacacagtcatgctgaggtctctttatcctcaaaacttaggctttttaaatttttattaagcaaaaaacatggtttcttcgagaaaaagtatagcagagaagtctttatttcccctcaattgagttgttattcaaggaacaatctctgtcaatagtttgggggtgacttgtacagaactttgctacctattcttagttcatctggtgccaaaagatgtagttgtctcatgcacagtaatgtttgtagagattcggtgataactttctttttcaactataatgatgaaataaaagctttacttatgtagcactcctataccaagaactagcattcagagagcattcctaatacgtgttagatccaaattagaattatcacgagagttgtccccatcacataatatattttggaaaggaatgtgaacttctatatccattatagcagtttgaccatgcactgttttgagaaagaagtcctacctaccatttgtcatgcaaaataactgactatgcagggtatttgaaattagcctggagtttggttgatatattttgaaaggtggctgatactttttacatcagaacacataagagtattatagcatgttgtgatattgaggttctgtgggttaaagacattctggatttgatgtcggattacttgagtttagctcctacgctagtacttattaagcatttgttcttaaggaagtattataatttagtatttctgttccacctttcctgttcattgcttcactgtgccctttcatagtactttgtattgtaattatttgcttgctagtttgtttcccactctatacttaattacttaggtaagagtcttttttttttttcttttttcttttttctttttttttttgagacagagtctctgttgcccaggctggagtgtagtggcacgatctcagctcactgtagcctctgcccctgggttcaagggattctcctgcctcagccactatagtagtgggattacaggtgcctgccaccacacccagctaattttggtatttttagtagaaatggggtttcaccatgttgaccaggctggcctcgaactcctggtttcaagtgatccacccgcctcggcctcccaaagtgctgggattacaggtgtgagccactgcgcctggcctggtaagagtctttcttgttgtatcattagtgcttagtacatagtagctactgaaaaaaaaattaacaaattattatattacaaaatggaaataccttctttttctttcaatattttatgtttgactagcacataatggttttcaaaatgtttttacgtatacatgtgataccctcagtaaacctgtgatgtacatggcacagatgagaaactacagttcaaaggatgttatctttcccaagcagccacttctagtaagtagcagagcaaggactggaacacaaggctagagttgttccccgagtttactatgttaattgcctgatttgacacttcttgaggaccaaataaaataagaatgctgtgaaaaagataaagaggtgaagtcacctagtgtgacttcgatattgcggaatgatttttttaagttaaaaaaaaaatttaagttattagcatttcattaggcaatatgttcaaaaattgtcaaccaatatgcaggtttttgtggtatggattctttttgtacttaactactatctatctttactatgaataacataccatcaacagtattcctttacttaccctttatgttgcaaagagacttgtgcctcctgaagaaatagtattcatagtcatatcccttcaggattctcttacatgattgcccatgttttttaaccatcaaattaagccttgcttcccctaaaagcatcacctttactgtttggagaagcttggtaagtaaatgtggttttcactggtcaaatgtcttgcaactgttccatacatttctgtaacatagtttatttttatgcccaatttgaaactttttagctctcaaatttgagagctttacatacacatattcaacaacagtttccccacccccaccctcgaaaagccctgtttaaaaacgaaacaaacagtcagctgtttcttggtgggtaaggccattgaatgtctacttctctttatttgctaaatccctattttgtagggattttgtattccctacaaagaaatacatctctgctactgtcattaatatgctgctctttgttgtcaaacagatgagtactaatagtttgcacttattggtgttatgtactctggcactgaatatatattaatgttgctttttaagtaaaatgtttctaattataatatatttatgaatagttttgagagaatatagtcttactgataagaggacagactctggatccagacttcatggattcaaatcctgactcatcacctgttagcagtatgtgaaagaacaagtaacttaacctgtgcttcagttttttaatctataaaatggggagaactagggagaaagttgtaccacaaggagataggcaatggccagatcatataggattctgtaggtagtggaaagatacataagtcagtgggaagccactgagaagatataggcaggtgccaattaataagttattatatgaattttcacaaggttttcttaggcctttaagttctgttactacctacgttttgagcagtgacaacagtgaaggttaacagaaaaacatgaaaatcatcagccatgattagtttgagagcttccttttttaaatatgcttctacccaggctatgatttcaggcttgtggatcataaaaggagtagtgctgaaagtaggttgggtggatcaaagggaataattgtaaatatctttaatgcttggaggttaagagaaacttgaactttgtagtaatggagattaaagctattctcaagattaggtatacctattcaataaaagaaaggaatatttgggagtattggggataagagaagctagacattgtgaattcaaggaaaaagaattatgagaggaggatgcattttagtttattttgtgattaaaatttttttagtttttgttgttttgacatgtgacactgtaattttggctataataaatgacagaatgtatcatttggtatattggttagggtttaggtagaaaattttttcctttatatagtgagtggtagcgtatacaatgtttgctcacttcggcaaagagtagctttagttttctgattagttataatagtgatgcttcccatcatttgatatgccttaaagtagtattttactcttgaggtattcctttaatccttaggtcttggagtactttatagatggtcattattttttatgattcctctgaaactaaaggcagagaatcacccaagcattacaaaaatgttgagcaaaataaaaattaaagcttggttcctgaacattatctgttttctggtaccacttaagaagtttcaaaggatgagaagactaagactaataactatttttttcttcatcttttctttcagtggcaggatgtggaaattgattttttttttattttcaccttaactgaatacttacttaattcttttgtttaaattgcagaatgccgggtctaagttgtagattttatcaacacaaatttcctgaggtggaagatgtagtgatggtgaatgtcagatccattgctgaaatgggggcttatgtcagcttgctggaatacaacaacattgaaggcatgattcttcttagtgaattatccagaaggcgtatccgttctatcaacaaactcatccgaattggcaggaatgagtgtgtggttgtcattagggtggacaaagaaaaaggtaagtgagaaaaatatctgtaatataaatttcagatttaaaatggtttatttaaaaatacattttttgtaaattgcaagctgcagcttaaaaaaaaaagctccttttatacttaaaccttttacatacaaagttgttagaaaaggatgccaattagctatctaagcaagatctcttaatagtagtttaattagtacatcctaggattttatggatcagataacttgaattttatttctagtgtttatcaggatcttgataattgactcatggtaaccaaacttagagacaggtaagtcagagtactagttcatttacattggtaggcctgaatatgttggatgcctttttcttgatttaaagctaaaatagtaatgagatcactg

SEQ ID NO: 76154 - DNA, 1056 bp, Homo sapiens
tttgggaaagtttggcagataaaattaacatgtacttaatatataacccagctgtgccatttctaggaaaatttatgttcacagagaaacttgtgtccagtttttagtggcttcaggggtgatggaacttgattttggtggtggttaaatgactgttcttttttttaaacacaaagaacttaacactaaaagtggtgaattttactatatgtaagtcatacaatttttaatgaaaaagaatgctcagaatctgaaataaaatcagtgtatatgaacagaatataggaggaaaactacaaccaatttaatagatgtgaaagggcatttgacaaaatttgtcacccattcataataagtcagcaaacaagaactaaaagggaatttcctaatctgataaagagtgtctagaaaaacaccacagacatgctgtcctccagtattgagaacaagacattcactctcaccactgttactcagcattgtactggaagtcattgccaggcacaggtttgtaggtttcagccatttttggctatttgacgttgacaagttacttaacctttcatgggttttagtttcttcaggttaaaaagactggggggcgctgtgggaaagagagtgataatctaccatgcaggattgttgtgagggttcaagaagatgtttaagcacctaacatagttacttgtatatggtagtcatacagtagattagatagttttaatttgttcagtgtgtgtgtgtgtgtgtgtgtgtgtgtgtgtcttctgtgacgatagcctctttccttaaactaaatgaacatcttagtgaattttcctattctggagaaggaaaaggaagaaataggggaaagataggcatttgactacctttcatttggataattgaaaattattagttctctccagtaaggtaatggaatatatataattacctgataataaaaatttatttctgaaaacaattcagaatctctcatcttgtacagattgagtatcccttatccccaaatccaaaatgctccaaaatctgaaacttttgagcaccaacatg

SEQ ID NO: 76155 - DNA, 1414 bp, Homo sapiens
aaaaaaattttttttatcgtgattctctcctcagggagtaataataacaacttgtatttgtatagccgttttccatttatagtgtgtggtttctatatatttgatctatgcgagcactctgtagtaaggagagatgctagtttcttctttttccagaggaggaaacaagttcagagatactgtgttactgtcaagacttgatccaggtcttaggaccctaaattgtatactatctctactttttatacccacttaaagtgagtatttccctatggagatcttttattgttaaggaattattgtagccaaattatgttatttactaaaatgtaaaaacattttttataaatctcttatctttgaattgttgagcttttcattttatttctaggtttatagcattcttcgtcatgttgctgaggtgttagaatacaccaaggatgagcagctggaaagcctattccagaggactgcctgggtctttgatgacaagtacaagagacctggatatggtgcctatgatgcatttaagcatgcagtctcgtaagaataccttcttgactctccttctaccttgatatcacaactcttggcctgatatttaacagcatagcatccatgtataaaatacttgccaaatttagattaaaatattttgtattggccagtaaatgggccaatcctatatggtcaagtctgtgtagttttatgtatcatagttatgtagattcataaaccatatggtttatctcacacattttcctttcctagttattgtcctaagtggctatgggactaaagagcatgtctcaccaaaaactataacctcttgttttctctacctcttttgactctcctttgactttcagcccacaccactttagccagtcttccatgtagccttagcctgggccttactatcaccgggatttgctctgccactaaaatctttaattcacactttctgttcttttgcccctgcctcctattcatctagctcccagttggtcctattatttgtcatcttaattctgtatgttaggatctgattccaaaccttttttctccctgtcttttcgccatttcctgccttttctctcttatccaacataggcacaccatgatacatcattttaacgactttgttgccattattgtgagcttttgccttgtttttccttccatccatccagccttggatcaatgttcctgccttctctgtacttgtagactgctgggtgctactaggaaaaatcagtcttgcaggttggtccactgcatattcatggtctccagcctcagctgttccacattctctctgctcctggtcagttcttcagtagtggctattttagagcttttccacgttcttcctcagaaaaccactctatccctgctccctgcctcttggctg

SEQ ID NO: 76156 - DNA, 2317 bp, Homo sapiens
tcaatatcatttgtttttattgttttactacatatgtgtctattatcattttttatttaaaatgtaacctattgtatctttttgtagcttgcatttttacatataagcctattattaagcaggattcccccacaatgatagatgtatacttgatccatattaatctctatatagtatttcattgtgagaatatgctttatctgttcctctattaagagttgtttaggtaattttcccttctgtgccatttgtcaaacagggctgtgatgaatagtgtatgtgtctctatatgtagttgtttgagagtttctaatatatatgcctaggagtggaattgttgggtcataggattgattatatatctttaaactgacttggtttcaccaaatccttgccacaatttggtatatatctgattttttctcctttttctagtctaatgaattcacagtagtatcttttgatttgcatactcctgattgttggagaggtcaacagtttttcatgtttcttaaccatttgtatttcttctgtgaaacatctgttcacctcatttgcccattttctgtttatcatcttgtttcttatacatttatgttggttgtcttctcgttactttatgttagctgagtaaaagttccctccacccaaattctcttgccttttattcccaataagaccccttgcttattaagcctgatgcttgctcatgctattccttttttacatgacataactttctttttttctttttcttttttttttttttttttgagacggagtctcgctctgtcgcccaggctggagtgcagtggcgggatctcggctcactgcaagctccgcctcccgggttcacaccattctcctgcctcagcctcccaaatagctgggactacaggcgcccgccactacgcccggctaattttttgtatttttagtagagacgaggtttcaccgttttagccgggatggtctcgatctcctgacctcgtgatccgcccgcctcggcctcccaaagtgtctttttttctttttaatagagatggaggtcttgctatgttgcctagactggtctatgaactcctggtctccagtgatccccctgcctcagcctcccaaagtgctgggattacaggcatgagtcactggtgcccagccttatgtatcataacttttttacaatagttctacctttactttttacagtgctactcctcttttagtctttatttcatattttcatttgctcactcattcaacaaacatgccagttaataagaccctggtccctgtcctgtggcacttaggagggtcagatgaaatgctactttttgcatgaagcccttcctgacctcattaactggaagtaatacctttctgtcctgatgcccacagatgtactgttacatttaaaagtttttccatgttttttttttctattcaagatagattataaactccttgaggcagggacagctaattgcatggaagtaatcaattatagtagaatatcagatgtgttaggcattaaattgcttgttttagtcagatcactaaaattttgatttcactaataatcagttggggtgtaagtgcaaagctaagatttgaattctaattgtgacactaaagccttaactattatatgcattaactattatatgcttaactattatatgcattgttccatagtgtttggtttcacatttatcagtaatataaccttgaccttttgttatttatttatgtttttgaccagagacccatctattttggatagtttagatttgaatgaagatgaacgggaagtactcattaataatattaataggcgcttgaccccacaggctgtcaaaattcgagcaggtaaatgattttttaaatgatttttacagtattttgcatgcatcaaaaaagctattaaataatgagacttaccaaagaatatgttgctacatcaacatctataaatttttctaaatggttgttttttataacaaaagcttaagaaattattttggcttctgaatcataaaatttatatattgacacaagtagaaacagtcttgtgagttcagctaacctaaaggtagccctttttttaaaaagaggggtttgattgttttgttttagtgcatactttaaaatattccaaatttttacaaagatgagacataccatgcggaattttctccaactagccttttccacccagtgtatcataggtacccttccattgcagaacataggaatctttctcattcttttttatgctgggtaatgtttcatagaacagataaaccttaacataaacccg

SEQ ID NO: 76157 - DNA, 1040 bp, Homo sapiens
cctccctgctgaaatgctcacctaaaccaaataggatctttgatctttgtttctttttttttttttaatcacatttcataacaaaagtgggttttttactcttaaaattgagcagtggttcttggtaatatttctagatgtttgtgatttatgtttaggctttgttggtttctactgttactatcacagtggatggagattcctattggtagaaagccagcgatgccaaacctcctttacaataaagagttgctgtgcccaaaatactgagagcactttaaaaaagagtaacactttcttctatctgtacacatacaagttttatgaggtttgatcagaatctttcattagtgataaaattaactggatggctgtaactcagaaggattcttccatcagtttagttcagagacaaattatccattatactgatgataattgcagttagtttagccaccaaagatacacggaaatgataattctttctattcagtatcgcagtgaactgtttatactattgcattagatccctgtgttgatttgcttttgctacattaacaaatcaccccaaaacgtaattgccaattctgtaggaccctaaattactgtcctgtagaattggcaattacgttttggggtgatttgttaatacagcagattaataaaatctcaagcatcctaatagttgtgggttctgtaggtacattcataaatgaatttttgtctttctcttttagattaatctaatagctcctcctcggtatgtaatgactacgacaaccctggagagaacagaaggcctttctgtcctcagtcaagctatggctgttatcaaagagaagattgaggaaaagaggggtgtgttcaatgttcaaatggaggtgagatcaatagattcatttttaataatgactcaggaggttcctaaaaggagttcttgtaggtaaataagagctgtcggccttggaatgtcatattgtaggatggtcattcaggcctttgatcactaatggtgttagggtcaccccccgtccccagcc

SEQ ID NO: 76158 - DNA, 1632 bp, Homo sapiens
gttgtctcctgtcttttccttgtccaacaagaaagaagtgtgtgtacgtgcgtgcgtgcgtgtgtgtgtgtgtgtgtgttatggttccttctatggaaaggactagtaagctagtaagtagtagtttgagcctggaagacaggtttttttaacaggatatctatttgtggtcttgaaagatacagccattggggttatttcatgttttcagttttagcttataaaaatgacagaaaataattttccattttaatacatacatcctttttctatactattctcataagtttcacctcttatttatgtaatggaatttattgctgataagtcactcaaaagtgaacagatatgacagagttgttagaaaagtgttaaagagagaaaacattaggcagtaatagtattgaaattaaatttgtatagtatttactacttcagtttgaaattatacctctgcttccacagcccaaagtggtcacagatacagatgagactgaacttgcgaggcagatggagaggcttgaaagagaaaatgccgaagtggatggagatgatgatgcagaagaaatggaagccaaagctgaagattaactttgtgggaaacagagtccaatttaaggaacacagagcagcgcttcctggctgtaaatcctagacttgaaagttttccagtattgaaaacttcaaagctgaatattttttatttctaagtatttaaatgttctaacagatcagaacatgaaatgccctcctaaatgtcagctgttgtcacacagtagctccaacactttgagcatttttaagggagtggcctcatttcactagagacaaatctttaagaatagttctaaaattgggcttgtgatttccatttctgatgtctccagattggcacccctttctagttcaatgcctcacgagatttgccaggggcatccaaggcaaacaatcccaatctttctatataaaatgtattcaagcaaacatcaaataaatttctgggatatttaactataggcttcttccttcttgtcaccagttaaaagcattttaatactaagaccctaattcttttatctttattttagtcttgatgtggaactgtaggagcaggtgaataaaggatctctataacagatcctttcaaaagaagagttttagagaaaataaatttaactttaaccacagtgaaagttgacccttagcgggacaaagccttaaaatgcattgaaagaattagatcggttctgtgccttttatctatttgagattgatgacaacctgtgtgagagaatttatcacaccacgtccttattggaataataagctacttgccttgagtttataattcagggtggtaaagtatgtttttaaattttaaaaagcagctgcattttttatttagttggaatatcacccaattttttatttttattgctattaaaatatccactagatgccacctagagctccagttctttataacaaaacagggatctgtttgaacacttactgttgtttttttttttttacatgtttccatcatttctgtctttaagaactaattcgtacataataagtttcataggtaacacattatttgaagttacagctacagtagtcaggtgtaga

SEQ ID NO: 76159 - DNA, 1885 bp, Homo sapiens
actgaaatttgttatacttcaaaagccataacttgaaaaatactggtggcgtcgatggtgagtgatttttatcccacgtgggccttttgctcagttccatggcaattttgtaaattgaccctagccagagaatagatcagtatttcactgataccacgaggaaaagaacaaacaaaacttaaaagtattcatacaccttgctaacctaaaagacagcagggacaagatacatatgaggacaaggtatacacccagttctgaataacttgaagaacaggcttggcaaagaagtaagtttatccaaatcttgaatttctgccaggcatggtagctcatgcctgtaaccctggcacttaaggggccaaggcaggaggatcacttgaggccagtgagctgtgatcactccagtgcactcgagcctgggtgacagggcaagaccctgtctcaaaaaaaaaaaaaaaaaccaaaaatcttgaatctcccatcaaagccttttcattaaaaatacaatttcatctactccctactgtacctttcactgatgtcaagtggctatcaattcatatagctgaaaattagtgatagtttgggtctcatttatgcataaattaattgaaaatcagtaatggccaggaagaaatatgaatattcaaaccacttttttctttttttttttttttttttggcaaatggtgttatattgcctgggcaggtctcgaaatcctgggctcaagctatcctcctgcctctgcctctgtaagagtgtgagccaccatgccccacccaaaccatttttcatatcagttatagcaaaacaagacaaaccagttcttaataatgttcaaagttggacccatagagacatgctaagcactacatcatgctaagaagaacagttattactcagctgccatacttcagccattctacttttacaccaagaacaaaatggctagagatttttttaaaaatacaaatgccagtaccttgccgagacttgttcactgatttgccccaaccccaaggtaatggtcatctactttgcaacctatggagatcctgatagctcccatacaaagtgaggtacactgttgccaatttggaggcaggaagccatcaaactaaacgtagtttaattcagatgaacacctatcgatattcaaaaggcaaaacaaaaaaactaattccagggacattagaccttggtgaaatgccaaatggaaaatggtgctttaaaaggtagtctcttaccatataaggaataagtaaaacattagcttgtgatttctcattattcaggtcaatgttttagacacgactaacaagggacagttcaaactattaaagagaacaaatttttacttaagcactttgaggtatccactccccttaaatgtaagttatgtattttatctgttgattaaggggaggtccaagcatttgtacttggcaggaatgctggcaatagcttgtgccagattactgtataaacttgaaagtaataaaaatgttctttaaaagtattgtatgatacagacttttcactacagattaaccttccaactggtgaagtttcttggtacctatttgtctcagcttatattcattttaaaaccaaaatttaatgccttgatataaatcttccccatttacatctttttctgtcctttagagcgctcttactctgcattgctaaatgcccatttttcatagaaaagctatgtaatgtatttttcgtatacgtgattatgttctccgacagagtccatgacttctgtaatgtataatatttatgcaggcttgttttctaaagcaaaacaatattctcaatgtacaaagtttggccaccatccccactttaagatgaactatgtcttaatgacag

SEQ ID NO: 76160 - DNA, 1086 bp, Homo sapiens
tatgtttatgttaaaagcaagcatagaatttggagtttgatctcaaattgtttaacttattggaaccccagtttccacagacacaagatgggaataatatcttcttactatggctggctattgtgaaattagtattatgatacatattaaggtatgttgttaaccctaaagcattgtgtaagcctcacctattatttttaggcggaagcttatgggccatcagcacagaaactgaggggaaagattattaacataaggattacttagttgtattcttaaaacgccaagaacataccctttgttcaattctgaaattcacttcaaaactcacaccactctgtctcatggagaaagccctgctcggctcccaaagctgtcatttcattagtgggacattactgaggtgcaggagggaggcccctgagatcttcaggccagggctgaagttgtaccttaccagtgggaacgccattatcttccagagcagacacgagtgaaccacgaagagaaaacccacccactggcctgttctcttcctgtagaggaaaggagacccaattaggaatttgtgaatgaacaaaagggaagagttgcactccccttacaactcaggccagctaaagaagtgagtgcaaatcatttgtaatagaagatgaagctgaacttggacatcacatggccaaagctgcatgcatcagtaaggaagcttgggcctcttcatttcacagccagcagcagtagtgcccatcaatgttgcagttaccaagtctcacagacttgcaaatctgcttttcattcctggagatgtctcaaacagagcctctgatccaatatgctacccggaaaaacattcactggcttccttaacccttgtgtgcatcttacaaagcaatcagaaatatatatttatagtaatcatttctttttttttgagacggagtctcactctgtctttcaggctggagtgcagaggcacgatctcggctcactgcaacctctgcctcccaggttcaagcgattctcctgcctcagtctcccgaggaactgggattacaagcacacgccaccacacctggctaattttgt

SEQ ID NO: 76161 - DNA, 1132 bp, Homo sapiens
ccaagtggctgggattaacaggcatgcgccaccacacctggctaatttttgtatttttagtagagacagggtttcaccatgttggccagtctggttgaactcctgacctcaggtaagccgcctgcctccacctcccaaagtgctgggattacaggcttgagccaccgtgcccagcctcgtgagcacatctttgggccacatctccttttatgttctagatgctattggtttgcctttgtttgctgattacaacaataacagtcatttattgagtacttagtgtgcaccaggcttttgtaatatctcctttaattctcaaaaagccctgcatgatgtgatatatgaaatggccattttgaaggttggaaaatggttaaatgacggtttcatatggttcaaccaaatattattgtcctgattttcaaatattactgccctcaatttcagaatggaactgagtctcaaagaagttaagcaaatggcttaaggccacaggattatttagtgcctgagctcgtattcaaacccaggcctgtcagtgccagagcatgggatcttaggtactaagctgtttctctttgctgtttttgttctcaaggaatgttgtacctggttgtcctgaccacttcttttggtattgaggttcctgcggcctaggacatgctcaccttctctgtctccccggacattgtgtggaatgtcatgtaggcacccagcagtggccaaatggatgttgttagcttgatcagatgacagtgctgagatcagaggaagttgtccctgtgtacactcacacccttctcccagcctcatccccagaaacgggacacaaagctgtttctctcccacaattgacaagtagtcagccacgtctggcagagcacttttagaagatggtggtagcccctcactagcaagtggaagtcatacagatactcacactcagggaatgaaccatactgaggcaatatgagagagcccagtggaaactgtgcatataacagaagccccgttgccttccaatgcctcctgcatcctccacaagatagaggcaatgagctattttgaggcctgtggtgacctctgacctctttcttttagggtcctgtattgattagctacctttgtaggg

SEQ ID NO: 76162 - DNA, 1008 bp, Homo sapiens
ggtcccctcccgttctttccccacagaactcttcctcacacgcttatttatcttttcctctttctgcatgctggttcttagggctccccagaataatccagaagtcgattccatcatggcagaactcaaggtggaggcgccggccagcgtagactggcagaaacgctgcctgaccctggaaactcagcttttccggttccgcctacaggccagcaagataagggagctgctggctgacaaggtgagtccctcagagcagggagctgcctctccacacgcagaggtttatggcagggagggccgtgtgagagagggagagttgcggaaagtcaactttcagtaagatgcttttccccatatgcaaaatgaaacccaaggtagtttaagaccaaagtccgagcagtttactaagctgttatcttgcttgcgtctttgctcgctcattaaggcacaccaaagacatgctgccaatcttctcggtcccccatcacttccggagtcacctgtggctgcagcggagaggttctattattcccttaacgtttctttctcagtgtggggaaggacggtgtttcgggagaaaacagaaatctctacccttcctctcaccctttgttaaataaatgagctacaggaggtgttctgctttcctggtaacaaggacacaggctttggagccagacctaacttggctctgccacttactggctagatgaccctgggcaagtcccttcacctctaaggcaaaaaaacacaaatgtctacttctaagagttattttgagaattatatcagatcacatatgtaaaggtcctgacatagaataggtcttaaatgggaataattattttatttacaggtttgggtgggctggtctgggaaactgaccacctttcctaatgtttctgtgggaagataacattctattttattttattttattttattttatttattcatttattgagatggagtttcgctcttgttgcccaggctggagtgcaatgg

SEQ ID NO: 76163 - DNA, 1049 bp, Homo sapiens
gaggaatatataatcaaaaatgactaaatacttgaggaaataatctacaatgagtgagtatccacagacacaaaaaacaattagactagatccccaacaacttctaataatggaactgttggcaagagactatgaaataaatgagttcaaaagttttgaagacgtaacaaagaaaatgaaagcataagacaagaacaagacactacctaaaaagatcaggtagacttgaaaactaaatagaactttaataagtgaaagtgtttttattgaaattaaaatgtattaatggatagattaaacatcagattaggcaccatggaagatagacttaatggacaggaagacagacctaaggaaatcatccagaatgctgcctacagaaatacaaatacagcagttgagacctggatgttagaatgacaaggtcctgtatctatcaagtaagattccatgaaagatagtggctgaaaatttccaaacttgatgaaagatgtgaagcctcagattcaggaaacagaatgagtctaaccagggtaagtttttaaaaatcacagtttggttagatcattgtttggctgctgtaagaaagaacctcaaataacaatggcttaaaccaggctgatgtttctttctttctcatgtaaccttccagacataagcaatcaagctctagggtgatggtctctggatatttgaagatgggtcatctgatagtcacattccagccccttccctttaagttagtgactcggaggtttcatacctttcttctgctgatatgccactggccagatcttattcacatggttatacccagctacaaagaaggtttgtacatttctacaaacagaaatgtagtctttattctgaataactatgcgctcagctaaaagttgggggttctatttatatgagaaagaaagagaggatagataatagggaaaaaccagcagtctttaagtctagactaataggagggataacaaatagaaacagagtattcatacctcaaatcagtagagagaggaaatgaaaaaaggaaagtctat

SEQ ID NO: 76164 - DNA, 1087 bp, Homo sapiens
gaggaaagcaaccgtctggttcctccagcctcatagtcctcgtctgagtcacaggatcgatctacttcctctatgtgcgcatcccgcacaggcaggcagcccaggggtcgctgtggacagcagtcttccatgaatgggagagccagtgggggatgagggagtctcctctctctgaatacataggctccgtgaagctgggaatcgtggatatggaccgatgacaggatggggaggtggagactatagcatcccagccaggctggcagcagaatgaggcttgcttggagaagcaccagagacccagacaggcagaatctcacactctggagggatccagccaactgattttgtatttattgtggggttacgtggggtagggactttcatcaggacatagagtggcagtcatgtgcttcgggggaagcaggagagtgggtattgtgaggaggctgagaagtaccttgtcctcatggctccgatagtagtagaagattttcccaacaagagcgcaccagaccaccttggagtggccatgctttacctgtaagacagaaatgaactggcattatgagaactaggtaactctagaagtaaatccaggactggcaaatagaagccacagggagacagatttgacctatggtagagatggagatgccatttgggctccctactaatggaaccacccctttcacagtgagggtgccatgacaccctgtggcaccccagccatcatgggctattcagtgacctatgacctgccatgaaacgattagccaggccaatcagatgtcccctccaggcatatgaaaataggaagaacttgctaggtggcagaagccacagttgtcagggtgccgggagggagggagggaaaacagcaggctgaagcccttgggcaaccatgcatcatgaaggaacagaagctgcacacgggcgaaggagaatgacataaacagattgaacgagaagcagagccacacagcgagcctgccagccctgagcttgctgagtgcaagtcgctttggttcctgctggtgttctggtctagctaatgtacttccttgttaacttccattttcttggg

SEQ ID NO: 76165 - DNA, 1924 bp, Homo sapiens
atctgattggcctggctaatcgtttcatggcaggtcataggtcactgaatagcccatgatggctggggtgccacagggtgtcatggcaccctcactgtgaaaggggtggttccattagtagggagcccaaatggcatctccatctctaccataggtcaaatctgtctccctgtggcttctatttgccagtcctggatttacttctagagttacctagttctcataatgccagttcatttctgtcttacaggtaaagcatggccactccaaggtggtctggtgcgctcttgttgggaaaatcttctactactatcggagccatgaggacaaggtacttctcagcctcctcacaatacccactctcctgcttcccccgaagcacatgactgccactctatgtcctgatgaaagtccctaccccacgtaaccccacaataaatacaaaatcagttggctggatccctccagagtgtgagattctgcctgtctgggtctctggtgcttctccaagcaagcctcattctgctgccagcctggctgggatgctatagtctccacctccccatcctgtcatcggtccatatccacgattcccagcttcacggagcctatgtattcagagagaggagactccctcatcccccactggctctcccattcatggaagactgctgtccacagcgacccctgggctgcctgcctgtgcgggatgcgcacatagaggaagtagatcgatcctgtgactcagacgaggactatgaggctggaggaaccagacggttgctttcctcccactgcaccctggtgatccaccccacagagcacagccccacctacctcctcattggcaccaagcatgaaaaggtaaggaagagggctgggcctccagggccaagcttggacctgtgattctgatcttcccttctctctttctcctgagcttcccaaaattcaaatttatttccttttggacactttggcaactaatattctctgaatgggaatattcctttatactgaatttattcccagtgaccaacattgcttcactgaggtcatgtaatagaatcgcaaatttggaaagttgggttcatgttcacctgatcctcagtctttccaggtagccctgactcatgccaaccaaactagctgaaccccacatgggcttggtcccttcaaggagtcctccttggagctcttgcctccactcttcccaccccgtccccatccgatggctttccgccctcttccaggatacgtggctctaccacctcacagtggctgcaggtggcagcagtgccaaggtgggcactgcctatgagcagctcattggaaaactgatggatggtgaaggagatccaggtaaggcaagggtggccaccactgcttgggttggagggtagtggcttggtgactattggtcaagatcccaaagaaagcagtgttgtaccctgaagctgtttttaaaacatctaagccacagaggggaagttcccatccaagctccagggcccctctgtctccggctgagatactaaggtgaccactctgcatctgggggagtttatctgggaagcaggctttccagggacctgggtaaatgttttacttggatcaagctgccccgttgctggctgggcagagggctgaggaaagaaggtagctggttaatctatagttagagtttgtaaatcaacaagtgaagcctaaattgggatcggactaacctgtttggagtctttcttttgctactgattatcagggccctgaggaactaattaatggcatataccacacacacccctttactactgctctgaggcttgtttgtttctgaccaattcatatgcccctccatccagacttgacacagtaagaaagaggcctcccctgcacacatccacctgcactcagacacccacaa

SEQ ID NO: 76166 - DNA, 1416 bp, Homo sapiens
ccctgcctcaaaaaaaagaaaagaatagaaaatagaccaacctcatgggatggctaagtgtgttactttatgagagtgaaattttgtataagcaccagctagttatagctaaagactaagtacttcctataccaattccaggaaatacagaagtagacatcctgactttctatcaatttgagtaagaaaatcccatccctccatctcagtatgtctccaggcaaatagtttccagtagtctcttggactcttacctcatccagtcccctaatctataactccaggtaccagatttcccttactaaatccagtaagcttaatggtatcttcagaatgaaccatgccctcctgttggtatgagatcagcatgaccctgcatctgctctgtgtcatactcggttatatgtttctggaggcaatacaaaataggctcataaatagtgggaaaagagtactttatctttttggaaataaaggtaacagacccagagaaagccccatccctgtttggaatccctgctgagtcctggtttcttattctcttctttgtaggctgtactttcgcagtcaagtcaaaggggagacggaccgagaacggctgctccttgcctctcaaaccagtagagagatagtggcagggaggtttcctatcaacaaggaattggctcttgagatggctgccctgatggcccaggtaaggttctgttcaggaagcaggagggtcgggttgccagcttagaatgaatgcaccatgcagcctgaaacacaggagagattctgcagatcctgtggtgctcaggagagggcagctttgccatctctgggatggaaagcagctgacttctacagatcagagctcctcactcaccgcagatataggatgcgtgcagatggctggacttggaatccagagacctgggtttgagtcctatataccttccaactatgaggtcttagccaagtcacttcacttctctatgctttagtttccttctcagtataccaaaataaaaaatacttggccgggagcagtggctcatgcctgtaatgtcagcactttgcgaggccgaggcgggcagatcacctgaggccaggagttcgtgaccagcctgaccagtgaaaccctgtctctactgaaaaaaaataaaataaaataaaataaaaataaaaattagctgggtgtggtggtgggcgcctgtaatcccagctactcggcaggctgaggcaggagaatcacttgtacctgggaggcagaggttgcagtgagccaagatcatgccattgcactacagcctaggcgacaacagcaaaactctgtctcaaaacaaaacaaaacaaacaaacaaacaaaaacctctgccagcctccacagggttgtactaagtatgatacctggataattgtatcatgtaatgt

SEQ ID NO: 76167 - DNA, 1998 bp, Homo sapiens
tttggagatctccatcttgaatatctacaagcagtgtctagactagaggactggtgcttgggcaggagtgggggtagggcagccatggtcacttggttcaggcttttgagtccacagaggagaagaaaagaccatgttgaggaagaggaggggtcagggagcagcctgcatcctttcataccatagtgttgtggtccaggatgctgacgccatcctcattcacagcaatccacaccagagcgttctccttggaagacagctgggcaggctggggaaacagaaacaacccatcagatatatccatagttagagattttgaactataataactttctgagaaagaaggcacatccagggatctgctaagcagtgatttccagccacctcatcttggaaaacaaagatgatatttgtacagtgtatgcaggaaatagacaaggctgcttgtgacaggagacccttggccttggggctctggccacctactaaccatctcaaaggcagaggcgatcattcttttgatgtccctagaacccatgctgccacagcacactggatggaaagctctgtgctacagaatagaggccagccctagctgctctgttaggggaatggggaacagctggttttctcctagtcttggaaacacggcattccacctatagtctccaagccgaagtgcttctgacttcagccaatctcctaggtgctgtaaaagaaataggaaagcaagaatgcagtcctgtggctttaggccctatcagtaagaaagtgactatttagtggacattcctgtaatgactaattttcactgccaggactacagtatggtaatccagaaaatctctctcttaacccaaagggaggcagatagacattggacatgccacctttttcagaagcttttcctaagctcccagaccaagtgggtccctgttatatgcctttataacacctctgtacatcttcatagcatttgtgatggcttataaatatatattaaatacatagagaaaaaaatgaatacgattatttgatgaatatacatctcctgcactagatgggaagctccaggaaggcaaggactgtgtctgattttctcacttcttataacctcaaacaaccagcactggacatagtaggagctcaactatttgttgaatgaatgaatggccattttccgatctgtggcttcagtaaacaggatcactgcccagctttgagctgtaattatctataaagtttatgcacaacagacacccagtgaagaaaagttccttctgaaattactgttggccacctggccttcatacagaggtgaaattaactgttggctaagtaatttgattcccctgtatgccatgtcaaaccagtggagatgtatttgtttaggttatacattgttctttcaaactttaaaaaaaatgaaagcactcttgagagggctgttatttcaagtctgaatctttgtgtgtgtgaattagttgatcacatcttttcttttggggcagtcaacaaaggacaaatgaagataagcaatcacaattctgctctggactgtggaaagctggactaggccagaaacagtggagggatagtgacctctggtggttactggtatggaggtaggggctgcaaattggtatggctcaaacatgagcagttggggacacacctaagggtgtgggcagctccttccactggcacttacctgagcagcaaaaagtttagcaccaaagaaaggccatttcctggccacggtcaggtagatgcggatgcactcaggaggggagcatccttgcaatgttgcccattttgtggtcaacatatctgccaggtgcctggtgtgggcagatggagagaaatagtgccaatgaagtgccgacgtgtcttcattccaggcctgagacctccccacagtgacttgctgcaagaccttgtagcctacctacctcagctgttcagcgggggccccatgtctatagcgcctggggtgga

SEQ ID NO: 76168 - DNA, 1047 bp, Homo sapiens
gttcacacttttcaccccacaacttggggatctagctgagacatttctacctcgaacaagtcacatgtaccacaggttcctgaataattcctgcagggctggtgacagacataacagctctggttttataatatcttgggtatctctaaggccaataaggataacattatctacccagagagtttagaagaaaagtaggagtccaaaggaagagtaaacaagaatggagctgtgttcacactgaatttggggtcaatctatttcccccaccctctctcctccccaacccttcaggaaccctttagtttattaatcttatacagaagaaactaacttagaaacaaaggattcaatatttgcttatttattctttgttaacatgagagtcccatgtctgaaaaccaaagtccaatttctgtctggccttttgtctcatccttcttggcaaaagtagcttttgaactgatataaaaaaaaatgctgagtaacagaaaagtattaatgtgcttgacaccatgactgaaatactatgatcttgtttgtcaataaaaagcagctatctgtgaaccaggtaactgtgtgttttggaagatctgtttattaacagtaaataaataagccctgtacagaacacaggcactaggttgacagactcgtcttttgtaggacatttcttcctgctaaccagtactgaagggcttgtttttttcgtaactttacacaaggggtactattggaaaatatagctttctcaagacatctgatgtcagtttcccattgttttgcttcacaaacatcaacaaagtaaacctgaacatgcttagcaatttccgaaagtgttctttgctgacattacttttgacatactgtgtcaaaattcttaaggtctcccctcctttggtaaagtaggcaaaaccttacaaggaaaacactataatacacggaaatatactgagttagatttccagtcacctgctctatggctctaagatgcactacatccataatggttcctaggactgtgtccacctgatggtttggagtacg

SEQ ID NO: 76169 - DNA, 1065 bp, Homo sapiens
agtgatggggtttcaccatgttggccaggatggtctcgatctcttgaccttgtgatccacctgccttggcctcccaaagtgctaggagtacaggcgtgagccacctcactcggctgggtcctttcgatttttagagacagtgtcttatgctggtacccaagctagagtgcagttctatgatcatagctcactgcagcctcgaactcctgggctcaaacgatcctcctgcctcagcctccctagtagctggaattacaggtgcaagctactgcgttcagctgatttaggccctaaagttggaattttggaagaaaaatttctgagattgctgtgatggacattttgctgatggaggtttcccctagacctatccatttgttgtctggatctgtttcactgtatactttcatagcaccttagaacccaaataaaagcaatttccttttcctccatgcatgttcccctcattgcctggagttgactggtaccacttggtaatcttactgtctgtgtctggctctctcttcagaacagcatgatcctctctgctgccatcttcatcaccctcttaggtctgcttggttatctccattttgtgaagattgatcaggagactctgttaatcattgattcccttggcattcagatgacttcatcttatgcttcaggcaaagaaagcactaccttcatagaaatgggcaaggtcaaggatattgtcatcaatgaggccatttacatggtaagtatttaaaaggtaagtattacaggcctctctggaggaggtagccagcccatgggatgttcccagatttaaactaaaaccgtaaaagtgagacttatatttaaaaggtaaatctctttatttttaaagagatgcagcaggttttcatggatagggaattagcatttcaactttatcttcaagaccaacttcaaaattatcactggcattttttccttctctttctatcttttttctttttttttttttgagacagggtctcactctgttgcccaggctggagtgcagtggctcgatcacagctcactgcagcctcaacttcc

SEQ ID NO: 76170 - DNA, 1057 bp, Homo sapiens
cattccgtctcaaaacaaaaacaaactgtgggtttgttttgagacagggtcttgctctctcgcacaggctagagagcaggggcatgatctccgctcactgcaacctcgacctcccaggctcaagcgatcctcccgccttggcctcccagtgctggactacaggcctgagtcaacgcgcccggtctaaaaacgattttaatctttccacttaactattgccccgacgaggttttttcgaagacagtcaaggccggcccggaagaacgcacaaccatcagcccccagcagagctctcggcgcgcaactgaggctgcgcaggcttagggcggggcgtggtgacgcggctgccggaagcgggtctggagcgggcgagacggccagggccggcgagcgcagtgcagcgccgcgcggtgcgggcggccgagtgggggcgtcatggaggatgagcggagcttttcggatatctgcggcggccgcctggcgctgcagcgccgctactactccccgtcctgccgggaattctgcctcagctgccctcggctctcgctgcgttcgctcaccgctgtcacctgcacggtgtggctggcggcctacggactcttcaccctctgcgaggtaatggcaagtcggcccctccccgcgctcgaaggagggggttcggctttgggagggtctttggggtctttggtcgagcccggacctctggtcggcccctcctacagtgataggacaggagggcgggaactcacgggttctggggacgatattccgctgctggacagctctttaaatgacgtttagtgaaatgtgtgctcctggatagtacattccccttccgtggctgtgctctgctccgtgggttcactcagcatacatctagttcttgcgcgacggcctaaaactttaactgccatgtgttctatgtagtataggcgcgcagtaatttaattccaagagttcaaggaactactaagtgggtcttcctcgtccatcccttctgctcctcaaagtagtactgctaacaatactttacgtagacttccacaaactgtctttg

SEQ ID NO: 76171 - DNA, 1009 bp, Homo sapiens
tctgcatacctcagacagactaactccaatgtatatttctgccttacactgggtattagaacctcttatactaataactgtcaatagagagatttcttcacttctagatgagattgggctctcatctagagacaatttaattagacaatttaaattagtctaatttaaattggcttgatgtaagttatggttgctcttattctctgaacgtaacagcagctgaagtgaactctaattttaggtctgcagttttaacatcttccatttctaacttcattatagccccagtgtccaaaggctgaagctaacaactaagtttcttaacagcttatgaaatgacatactaccagataacaattctgacattaatcacccagaagtaaagacttggtattgggaaaatgctcttaaaattaccatttgattagtattcatctgccatctttctacactgccaagatttgcttaatataaaactcagatgaaacaatcgtgaggctgggaagaatgggacagttgaaacaataaatgcttgtcatctcagaagataagcattaaagatggagataaagaaaaattcatgagacagaagatctaggcaatgatttagaggaaacctcctcccaaaaaccccagaggaagaatatgacctgtgtttcaaattttgcctttctgaactatttaaaattatgtgtatgtttttgctttgtattttaaaagtaaagctgctgtcctcaagaaacaggctaaaagtgtgttgcccattgggggtttgccctgacatcagttatagttacttacttgccaatcagcagatcaaatgttcgttccatgaccttctggataccaagtcgatcaatatctctcatggaaaaatactggatatcatagttctttaaaataaaactgtgatgagatataaagggaggagtccttagtttaaagagcatttttaacaaatatgtatttgggggagagggtgggtttgttgtagtgacctgcaatagac

SEQ ID NO: 76172 - DNA, 1119 bp, Homo sapiens
aaagggaaaaatagggcagagggaagaagtttacaagggattgaaaggtattacccaggcttctagttacttatcctagggcaggacccatcctgagctggatgtctatttgattactttttctagctaacccttctttctagaaaagctatttttaaaggaagtaactactatttgaacaacatttcagaatccatttttatgctttggtttttattgtctcagtttaacatttctgtgaggtagacagtgttatccctaagtgacagctaaagaaccttatgagtacttcctgctaagtggctgtgtgatcaaacatacagcctcagagtatccagccgtggtcccaggtctaaccccaaaatgtttagaaggaaggttatccaaacttctgactactccccactttgcttctctttgtagagtgacaaccaacaagctgctgctttccattatcatcttactggagctcgccatcctgggaggcctggtttactacaaattctttcgcagccattgaacttctatagggaagggtttgtggaccagaactttgaccttgtgaatgcatgatgttagggatgtggatagaataagcatattgctgctgtgggctgacagttcaaggatgcactgtatagccaggctgtgggaggagggaggaaagatgaaaaaccacttaaatgtgaaggaacaacagcaacaagaccagtatgatataccaaggtaataaatgctgtttatgacttctttaaatttacatagtactgtagcatattaataccctgtgaactgcaaaaaaccaaatacatttacagtagtattggtcaccaaaatagaggggaaactttacaattgtgagaatgtgtaaatgttctcattaaggcagtattgacccagacaaccatttagtattcatctatcccctcaatgcctcataattctggaatgcctgttgtgaaacatgtcagtgcacagtgtctcctaaattctcacacgtgcttgattttctgattcatctggtgaactgggagtaggaagttggtcatagacaatatgccctccttctcttgtctgaccaaagcttgaagcaatcacatctactgccaggttagctgt

SEQ ID NO: 76173 - DNA, 1058 bp, Homo sapiens
atactcgaatgcctgctctgtgcttgctgggcactatgcaaggcattcagaatgaggggaacatgccagacatggtccctgcctcatggagcatatggttatttacttggtgtagtccaaataaataagtagtttgattagtccaaactaggcatatttccaaatgagtgagggaagaaccaggctatctgctcactactttctgccttcccagctggcagagatggaggaggagctacgttatgcacccctgtctttccgaaaccccatgatgtctaagcttcgaaactaccggaaggaccttgctaaactccatcgggaggtgagaagcacacctttgacagccacacctggaggccgaggagacatgaaatatggcatatatgctgtagagaatgagcatatggtaagttttagctgttttgtttgttttttttttcctttaagggcctgtggtacaaaaattaactatattgttggggtatttcatgttatcagtgtatactagactcttgtttcatttttttcacccttatcctcttttctgcatccagttcctgttaccccttggtatctgctctatttaaggcaggcctttcgaactatatgcatatttagatttctttttatccttaatataatacagtcttataataaaaaaaaaacagtgctttgtatgtagtagaatgtaaatgttacctattcttattatctggattctgactcattgatctaatttcttttctccttgatcttttttattctctcatataaattttagaatcactttctcaggtatgcctggaaaattcagttaggtttctaatttatcagaatattgttacaaaatcaatccaagctttcctttaccttaatgtcaagatggcccagcaactgagatacagtagccaatgcagggcgcttctcgagaaggagctttttatcattttattctgtggtaatagaaagtgagcaagactccctctctagctttcaggattctgatttataaaattggactaattgaacatctgtattctgaaaccatctagagcagc

SEQ ID NO: 76174 - DNA, 1334 bp, Homo sapiens
tgacataatatagccttacaaaatgtttcttcttctgccattaaaaataacatacgggggccaggtgtggtggctcgtgcctgtaatcccaacattttgggaggctgaggcaggaggattgcatgaggccaagagttggagaccagccttggcaacatggtgagacctatctctacaaaaaaaaaaaagctgagtagtgtggtgctgctcacttgtaatcccagctgctcaggaggctgaggcaggaggatcacttgagtctagcagtttgaagttttagtgagctgtcatcacatcattgcactccaacctgggtgacagagcaagactccgtctcaaaaaaaaaaaaaaaaattatgaagaagtatgtgaattgagaggccatatagtataatatttaacagcaagaattcaagagccagattgcctgagtttaaattcaccttctagtagcagtgtgaccttggacaggttactttaacccaattagtttttcctgccaaatggggataaatcatagtatctacttcacagggtttttgtgaggagtaaatgagttaatatatgtaaagtccttagaatactgcctgataatagagctactagccattttatttaaatgaaaattaagaataccagccctgtatacaactattcttacctttttttttccagagtacttattttctgacatattagacactttccacatttatgatatttacagtatattgtttgtcttcctttcactaggacagtggtttcattgtggtccatgaaccagctgcatcagcatcatttgggaacttgttagaaatgcaaattctcaggccccaccccagacctattgaatcagaaagttttaacaagcagtgtgttttcacagccctccagggggtttctgatgaaggctaagtgtgaaagccactgagctagaatataagctcaatgttgtctttttttcactgtgtttcctaagtaccagaacagtgcctagcacagactaggtgcttcatagatacctattggatgatggaatgtgtgaattgttggaaagaaaatattgatatatgattgtgatttatttctattctgttgtccacattttcattactttaaaaatgggtatattccacctattaaaacaacaaaaactgtatttctccaaagtacagtctccattcactttctgcctttgaatgatactagagacaatgtgtcctgttttaggaagtttttgtgtaactgtccattaccacttacaataattattaatccatttaatatttcattaaatacctatggccataatttctactcttggttttacaacc

SEQ ID NO: 76175 - DNA, 1054 bp, Homo sapiens
ctcccacctcggcctcccaaagtactgggattacaggcgcgagccactcgcccggccgggttccacttctgaaagcttggggagccgctgggccttccaagaaaagtgctccacctcccgacggcaggcagagcccctggcccggctatctttccagggccgaaagctaacagtcaagacgcgaaacgaggaattcgggtcagggtggcaaagcaaagcgcgatgacagtgaggacgacgtctagacgcaaacatacatcaaatcgggccgaagcccgctgtcgccgcgcgggctgaacctggcacccggagcaacgcgcgaccccgggacgagacgctctcgtccgagccaaactacatcccccggcgtgcactgcagcgcccgcccctcgccggccggcggggcccgggaggaaggcggccgcgctgccagtcccgcaggtcccctaggcccctttcgctgcggcctttccccaacccggacccggcacttctcgggttccgcgactgccgatcgccccggcgcggcaccgctccctcaggagtcgcctaggccgcgcagtctcccgacttctcgtcaggctttcgcgccggcgctccagcaatcactggctggagaaggtgggcgttccggctcgagaggaccctgccgcggctccggaagagcctcgtcctgggcggcggtggtgcggcggtcgccgttatggccactgggctgggcggctgaccgccgggctaggaaagggcccagggccccgaatctcggtggccgctgctccagcgcggcctgcgccatggcctcctccgccgcctcctcggagcatttcgagaagctgcacgagatcttccgcggcctccatgaagacctacaaggggtgcccgagcggctgctggggacggcggggaccggtgaggcgggggtgggccacgccgtggggagcgcagccctgcgcgctttggaaggaagattctcccaccttcctcccagacccgggcccgcgtctcctccctccgcgtcctcagacacgccccctagggctggcttgtcccagcc

SEQ ID NO: 76176 - DNA, 1031 bp, Homo sapiens
ctaatttgtatctcctgggccctcatttttattagatcaagttcattggctgttgattcaacacactttggttaagctcttaatatgcactgagcatagacatgaccaagtctgaggatagtcagtatactgtgtaagtcccacagcacaatgctgggacttgtcacagtacagaaataaggggcaggtgcaaaaaaaggatcaatagcctggggccgggtgctgcggctcacacctgtaccccagcactttgggaggccaaggtgggaggatcgcttgagcccagagtttgaggccagcctgggcaacaaagcaagacgctgtctctaattaaaaagaaaggaaaaaaaaatggcccgggatgatcaagaaatgtggaaaaagtgtctgtgaagagtgtcaaaaaaggttaagtaggaaatggtgaatgaacaattagattatcacacaacctaaattaatagcatgtggattgagattacactgtagctagactctggaacaaattattctttagaatgagaaatcattgcacaaccataataatgaacagtgttttcttcttttgactgtaatcaaacttttaattcttagtttttattctggtaaatgaaaacaaaaaataatcaaaaagaatttttatttgtcattgacagttcaatataaattaagtaaaacattaattcatttattctgcactattatcagaatttttctaatttttccgtaaaatgaccatttctaaacatatagcttaatggtcaaaacaagtgcaataaaagattaatttacaagtatcagaagtgaagactgtggtcctataactctttcccccaccaaagttaaaatataattgtcattccaggaaatcaaaatcttttagaatagcacactccaaacaagtgatgggaacactactaattccttagacttcctttggcagcattacttttgataagaagtctccaaataaaatacaaaattttggcacagacattttaatcttgtcaagacaatgtaaggaaatgccc

SEQ ID NO: 76177 - DNA, 2292 bp, Homo sapiens
gcatttcttttttttttttactactccaggcatctctgaccaatgtgaatagcaggatctcagctatatgacattgtccaaggctctgtagaatgggccttatggacttacttgaagaagatggatatacatgggtgtcaggcaggcactaatattaaattatataaataggggaatataaagaccaaatgtatgcattatatatcaaacaaagcattctgatgagaggtggtctagcgaggagatctaaaatggtaattacattttctctggctaaggactggagaatgaagagataaggacaaacactggccctgtgaagtacatggagaacatgtgatccctagttgtttttatgtcatattccttatccctggcagatggcagacttcattcttaacactgtgcttcatacctttctctttaccttccagtgactgtcatgtggcatgggtctctgcccaagctcgtaatgagactatagcaaggcggctgtgggacgtcagttgtgacctgctgggcctcccaatagactaacaggcagtgccagttggacccaagagaagactgcagcagactacacagtacttcttgtcaaaatgattctccttcaaggttttcaaaacctttagcacaaagagagcaaaaccttccagccttgcctgcttggtgtccagttaaaactcagtgtactgccagattcgtctaaatgtctgtcatgtccagatttactttgcttctgttactgccagagttactagagatatcataataggataagaagaccctcatatgacctgcacagctcattttccttctgaaagaaactactacctaggagaatctaagctatagcagggatgatttatgcaaatttgaactagcttctttgttcacaattcagttcctcccaaccaaccagtcttcacttcaagagggccacactgcaacctcagcttaacatgaataacaaagactggctcaggagcagggcttgcccaggcatggtggatcaccggaggtcagtagttcaagaccagcctggccaacatggtgaaaccccacctctactaaaaattgtgtatatctttgtgtgtcttcctgtttatgtgtgccaagggagtattttcacaaagttcaaaacagccacaataatcagagatggagcaaaccagtgccatccagtctttatgcaaatgaaatgctgcaaagggaagcagattctgtatatgttggtaactacccaccaagagcacatgggtagcagggaagaagtaaaaaaagagaaggagaatactggaagataatgcacaaaatgaagggactagttaaggattaactagccctttaaggattaactagttaaggattaatagcaaaagatattaaatatgctaacatagctatggaggaattgagggcaagcacccaggactgatgaggtcttaacaaaaaccagtgtggcaaaaaaaaaaaaaaaaaaaaaaaaaaaaatcctaaaaacaaacaaacaaaaaaaacaattcttcattcagaaaaattatcttagggactgatattggtaattatggtcaatttaataatattttggggcatttccttacattgtcttgacaagattaaaatgtctgtgccaaaattttgtattttatttggagacttcttatcaaaagtaatgctgccaaaggaagtctaaggaattagtagtgttcccatcacttgtttggagtgtgctattctaaaagattttgatttcctggaatgacaattatattttaactttggtgggggaaagagttataggaccacagtcttcacttctgatacttgtaaattaatcttttattgcacttgttttgaccattaagctatatgtttagaaatggtcattttacggaaaaattagaaaaattctgataatagtgcagaataaatgaattaatgttttacttaatttatattgaactgtcaatgacaaataaaaattctttttgattattttttgttttcatttaccagaataaaaactaagaattaaaagtttgattacagtcaaaagaagaaaacactgttcattattatggttgtgcaatgatttctcattctaaagaataatttgttccagagtctagctacagtgtaatctcaatccacatgctattaatttaggttgtgtgataatctaattgttcattcaccatttcctacttaaccttttttgacactcttcacagacactttttccacatttcttgatcatcccgggccatttttttttcctttctttttaat

SEQ ID NO: 76178 - DNA, 1654 bp, Homo sapiens
ggaacttagggttcttggattccaaagcagttgaaagggactttgtctagcttaagcaagaaggaaatttattaaaatattagtagggagaggagggacccctaggttgaaagggaagactgaagagccaggctaagaagtgtcagagtggcagtcagccagccggggcattgctgctagagtgagcgaatgccagctatctttagtgtttaggttgtattgcttatcatccattctctagggaggaagcattggatctccttcctcctatcccttcatttttactcttttgattagaggcaaacagggactttattaatgctctcttcaaactatattgaggggaaaaggtgattctgcagaaggaaatcaggttgctattgccgaaacaaagtagaatgttcagccaaagagtaacagttgtccactgtgtaacaaacctggctctgtacatgttgcatgtgtgttatctataaggcatgcaagtagaaatgtatagcagatagttggaaatgtggttctgaagtataagaagatagatttatatagtatactggattgattttccaagagtgactggattcttcttccctagagattttaagaaaaaaaaaaataaccctttatcttggttttgactgagtggtttaaagaaagtcagctctaaatccataacttactattggattgacttttgaagagcctttcctgtgctatggattcttaattcattttgaagatccaacagcagccgtgtagaccaccatcaagaaatgaacataaaagtcttttgattgaagccttaagatttttgcactggctcttctttctgcctgcaaccactagtctgctttatgtctctaagaatttgcctttactggacatttcatataaatggaatcatatggtatgtggccttttgtgactgacttcttttactcagcttaatgttatcaagggtcatccatgctaaagcatgtgtcagtacttcatttctttttattgctggataacatttcattgtatagatttgccacatcttatttattcattcatcaggtgatgggcatttgggtttgcactttttagctatttgaataatactgctgtgaccatttgtgtagaaatttttgtgtggacatttctcttgggtacatggaagtggaatttctgggttatatggtaactgtgtttaactgctgaggaactgccaaacttttccaaaatgactgccccattttacattcccaccagcagtctatgagtattctaatttcttcacatcctcagcaacacttgttattgtctctccttttgagtttagccatcctagtgagtatgaaggaatatcttgtttttattttcatttcattttcctactaatgatgttgaacattctttcatgcgctttttggttcatttgtttctttgttggggaaatgtctatcaagtcctttgcccatttttaagttggataattgtctttttattgttgagttacaagagttcttaatagtctagatgcgagttccttgtcagatatataatttgcaaatattctctcattctgtgggttgtcttttaactttcttaatggtatcttttgaaatgtaaaacttaaattttgatgaagtccagtttatctattttttgt

SEQ ID NO: 76179 - DNA, 1147 bp, Homo sapiens
agaaggaagatcatgccactgcactccagcctgggcaacacagcaagcctgtctcaaaaaaatgaaggggatggggtgggtgtggtggctcatgcctgtaatcctaatactttgggaggccaaggtgggaagattgtttgatgccaggagttcaagaccagcctggtcaacatagggagaccccatctctaaaaaagaagggggtggtcaacgatgttaagtgctgctgagaggatgagtcttggctctgctgattcctgacttgagtttccagtcagaaatacacagaggtccttagcactgtctactctagagccttcttagatctgtgagatggaagtataaattactgtgagcagtacttctgatgtcaccatgggcaaaagagtccatatgtgaaggtcacatgcttatttacatccttttctgttttgggctattctgcaaaatcaagtcctgtcttaccctctcttcatgccacccccaaccaggctctggcgttacgacgtattctgtacaccctggcacagtccaatctgaactggttcggcactcatctttcatgagatggatgtggtggcttttctcctttttcatcaagactcctcagcagggagcccagaccagcctgcactgtgccttaacagaaggtcttgagattctaagtgggaatcatttcaggtatgaatgttatctctttttgcagatgagatttattgctcaaaggagataatttgggtttgtctgggtatacccttttttaaaagtacattgtctcatatagcttttgtcttttaactctagagtttttaccttttagtaggggaatttgactctcttttgtaataactgctacatttgattttatgccatcttttatactgataattatgcattctgtttgttttcttcctgtctttgttatgtcagtccagttttctttattcttttttggattcctaattctattgttttacattaaaaagaatttaaaaagaatttgaggccaggcgcagtggcttacgcctgtaatctcagcactttgggaggccaaggtgggcagatcacctaaggtcaggtgaaactccgcctcaaaaaaaaaaaaaaagaatttgaatctgcatttctctattgtcctcaggattga

SEQ ID NO: 76180 - DNA, 1562 bp, Homo sapiens
gtgtatgtgcatgcgtgtgggtgtgttttttttttcttgtttattttgtcccagagtcacaagctttcataattttaactttttgtattggattagccatttctcaaggccataaaatgccagttgtggacagattgacctacagaaactagttatttcttcttctgggctgaatcttgtgatttcctaagtcacaagtgccttagagagctcaaaccaaagccaggtgcctggctaagcaggtattcatccagttcttgtgctgcagagaacagctgtaagctttgcccttgtaatagaatcacttttgtctttgagcaaaagcagaaaacttttgtcatctttcctccaactttccttaaatggacactgtttccttaaaaggacaacagtggaaagaactaaagcaaacctcagccagaagacacagggagttgcaggaacctactggctgagacagtagaatgaagaattgatgagctctccttctctgtctgcaggaaaatgctgtccagtggggtgtgtacatcaactgttcagcttcctgggaaagtagttgtggtcacaggagctaatacaggtatcgggaaggagacagccaaagagctggctcagagaggcaagttcacctcctttcaattccctcctattactgctgttttacccctcacagtaatgatgattcattctcattgtttcttcccagttttggaattcaagaacacctaaggattccactgatttgctgatctgaaactagtactatgctctacatataatggacccttaatgaatattattaatttatttttctttacctatttgctaatcagatacctctgttgtgaagaaagggtaaaaatgtgtgttttttaaaaaaatgttggaaataacattagatttataatgccagctcaaaaacagagctgaccatttctctttcatatgttggctgacaggagctcgagtatatttagcttgccgggatgtggaaaagggggaattggtggccaaagagatccagaccacgacagggaaccagcaggtgttggtgcggaaactggacctgtctgatactaagtctattcgagcttttgctaagggcttcttagctggtaagtgtagaactagagagactatgttgtgggtcttgaggtcaacatggcagattcaactaaaaggaaaaggtccctcttcctcatagaagtggtggataaaatatagccaaaaacttctgtagctgaactcatagtcactgggacacaatttatgtcaaagggatatcttccagaggcagaaacaaaaaatgaattcaaaacgtcatagcagtgagtaagagctgaagccagaaatctcatgggagtctcagcactcagtacaggctttttagggtctggggtctaaatacttacacagggataggagatgaggccacaggcctttgagagctggagctgtatttgaggttctacacaaagttgagattcacaaagggccatctggtccatagtatagaagctaataaaaatcctggccaccagctcagagacatgacaaagaag

SEQ ID NO: 76181 - DNA, 1073 bp, Homo sapiens
ctagtacactataggaataagtgtactattcctatagtgtatacttttttttttccagaaaaatccctctggggtatgagcactattttcagttctggttcaacttttcattgagattctatgtggataagaggatcttgtagtgaaaaaaagataaaaagcagtgttttcatctgagtgtgagaaaccatgtgtgcctagaggtgggagaactgagtattcagaaggcagaaaaaataactgagagctgggtgaatgatcccacaggccctaagccctagatggttggggattagcgatgtataattcaacttctgccagcgttggcggcagcgctcccacgtagccagcctgaggctgtcaagctctggactacatttcccagaaggtctgctccccgggctgtcgcaatttgaattggggcgtgtctagaaagagaagccatagtcggcgagcaacgctggagcatcccgctctggtgccgctgcagccggcagagatggttgagctcatgttcccgctgttgctcctccttctgcccttccttctgtatatggctgcgccccaaatcaggtctgtgcaaatgtattgccttctcttgagaattcttgttgcggggcgggagggaaacatagaatccccaccaaagctttcttggaaaactcccctgggggggctccaagatggcggagcccagagttcggtgggttggaggcgaggtccagctgtcctgggtgccaggaggacacccgagaccccaggcggtgagaaagggcggcagtccggggcacactgcttttccctggcctgtttttcttttgtctaagcaccccctgattctggctccagggaatcccgagggtaaggctacctcaaacgcttgagtttcggactcttcaatgggatatggcccgacgctgttttccccttattccccacgccttaaaccagccttcgaggtacaaaggagcgattccacatttcgccctctgaaactgatagcaatcgtaacatctgcggccccatccttgctctctcgttgctgttacaatcgcttgttctgtgggcggatg

SEQ ID NO: 76182 - DNA, 1041 bp, Homo sapiens
gtgcagtggagtgatctcggcttactgcagcctccgcctcccaggttcaagtgattctcctgcctcagcctcctgagtggctgggattacaggcacccaccaacatgatcagctaattttttgtatttttagtagagatggggttacaccacgttggccaggctggtctcaactcctgacctcaagtgatccacccacctcagcctcccaaagtgctgggattacatgcatgagccactgcacctggcaaaatttttaaataataaaaaaacacctagaataaaaagataaaaatcatccttcacactctgcttggctctccctaaaactccctggaagtaaccactactgcccagtggctggttatccctccagactgttctctatgtataaaaaatcatatagttttgtattccagttttttccttacaacattatatcactaacatttttatattaattacatattatattaaaatatgatatttaatgactgtatattttattacatatttaaggcagcaatgttaaacactcagactctagagtagcaactgtccaatagaaatatgatgggaagaccaggcgcagtggctcacgcctgcaatcccagcactttgggaggctgaggtgggcggatcacttgaggtcaggagttcaagaccagcctggtcaacatggcaaaactccatctctactagaaatacaaaaactagctgggcgtcgtggcatgcacctgtaatcccagctactcgggaggctgaggcaggaggatcccttgaacccaggaggtggaggttgcagtgagccaagatcatgccattgcactccagcctgggcaacagagtgagactatgtctccaaaaaaaaaaaaaaaaaaaaaaaagaaagaaagaaatatgatgagaaacacaattgtgagccacatatgtcattttgaattttctagcagctacatttaaaatgtaaaaagaaattggtgaaatttatttagtaacatttaattacacattcatttattgagttaataaatatgtactt

SEQ ID NO: 76183 - DNA, 2133 bp, Homo sapiens
gactgccaggttcgggcctacctgatatgttgcaaactgcgttctgcctacttgattgctgtgaagcaagaacactcacgggccacagcccttgtccagcaggtgcagcaggccgccaagagcagcggggatgcagtagtgcaagacatctgtgcccagtggcttctgacaagccacccccggggtgcccatggcccaggctccaggaagtgaccttgggcagtggggccaggaacacgtggcctgagagctgggcaacagcagtgatggcgatgccctccacctctttcctccagtggagtgggacttctctggctctgccctaggttggaaagagttggattggaccctacttgccttcccgggcaaggataggacctttcacgcaagtgccatgtttctctaaaattgtggaatctatgtgtgtttgtctggagatggccagttctttctacctcagagtgagtgagtgagtatgtgtgcacacacgtgtgcatgttcctgtgcgctgatgtttacgcccaagcatttctgaacaaatgaaactcttctccatttaaaagaggcactttactttagacttgccactctgaaaaccttccctgcgttttggttcttgacccgggttgtcctgtttgtatagtcccccctctgtggacgtgctttagtagctcctcttacctagagggcttttacagagaattagagcaacaccaaaaggattgcctcttttccttccttcccattccaaaattcagagatggctttggggcaagtgctacctgtggaataaacctgttttccaggtgtctcttctcccaagcacaagaagtcctggagtctttggaaggtagtctgaatagaagggttttcaggtgcaggcatctgaaagctgtgggtatgtgtataaatgatcaggtctgtgaggctaacacgggcaagagggaaagaaaggctaaccatccaaacagggatacaggggaggcggtggggggtggtggggggagcgggtgctcacaagcacagagctgcctgttgtgaatgtccctgctgcaaagttggtgggtgagagaatgggacttcctctttgagagtctggggagagaaaaggtggccaggatcctaggactgaatgactcgattttacctatttgagctgcagtcctgtttgcgctccttgaattggttaggaagctgcttccttttccctcctgcttcccttcagtctcttcaggaccacaggatggatatgcagacatgtggggtcattgggaagggagtgcgcttcttttctctgtcttagaaaagggagtcaagggttggctttggaattgggcctctggacagagtcagaatgagggaataatgaataggtcacatctggttggtggaaaactaggtgaagtgcttctttaatatgcactgtcttgtcttcccacgcaagatgtgacaatgtttgagaaaaggtgtgtcatactcagtgacttcaatttgcaaatgtggggcctaaagaaagctctgcagctctgaacctctcactggccagagctcagcctattggtcccatccatgatgctgagacaaacagaaactggaagctgaagtcagtgtctctggtgctcagaaaccctgtggatttccctctgaaccaagatttttagtagtaaaataaacaactcatggacatctgtcagatgagaagttttggtcctgttagagaggagaaagactgtaatgaaactactagacccatttgggctaaagtttggcttttccttccttgagtcatagaacgtatccatctcccaggaaatgtccttctctggcgtctgcttgcccttctgagtctgccttttttgcactgaacataagcactttatactaatgggtcacaaatcttgcagcccttaatttgggataagaccagattttcctgacattttcctctaactcattgaactatcaaattataggcaaccactgactagactgatatgagatgaggctaaaagcctttgaacaccacgctgtagtctccaacagaaaaacaccaccaaaacagatacccatgttgaggggttgaatgttttactacaaacaagccacaataaagtgtctatcaacatgtttctt

SEQ ID NO: 76184 - DNA, 1050 bp, Homo sapiens
actattggtgtggggcagaaagggtgggagcagttgtctgtaggtgatgaagctactcttgtccattccttgaatcctgaaaaaaaatctaaagggaatcatccctggatgacagtgtgtagtacaagcctagaaagcctacagaggagctggtagtgggagtgggagtggagggaggattagcatcacaggctacaatcagactacactccatactccttacagtaggccaaaaggctcctgcacgttctggcccctactgatgtcaccatctttatctcctgctactctcttcttgctaagcatcgatccctggcctcctcagggctcctcaacacaccaagtccttaattcctctcagcttttatacttgccagtccctctacatagaacacaacatctggagtaaatgctctaccactaccatttattgcctccagaggcttaattgctaactattttatgtgtttgtttactattcatttctcttccagcctataaactctgagggcagggctcatctctcttgacctctgttattgtacctggcacataggtgctcaataaatgcttatcgattcaatgactggaccctatctggttccacagtgcaccataatattgtgagtctgtgcaggacacgagatcaccatttttttggtcttgtcataactgctcacaaggtacttgaggtctcttttcccactatatcatttgttttccctttttcattgccatattattcgacttctcagtctcctggcctcagtcacctggggcccctcatgaggctggactgtgcatattctgtcaccacaggcacatgaacacacttcagctgcagatggaagtgaccaggttcttgcatcggtgcgaaagtgctgggacctctcaaatcaccactttgcctctgccaaccctgtttggaaataaccacatgaaaatggatgttgcctgcaaggtacatgcagcgtttcagacctctggcagactattgtcatcttttagaacacttatcataattgcagttgtctagtgattatttcagtt

SEQ ID NO: 76185 - DNA, 1159 bp, Homo sapiens
tgcactgcacccagctacattcctttttttatctgaatgttccataataacttggagaaattggctgagatgtaccaaattttgtaggaaattgaaggagctcaaggcagactttaatttcactctgccaccctaattcaaaacagcagccaatgcaaatgtacagatagacatattttctaagattgatccaagtgaaatcagcagttcacaaagttattatgactatacccctacaggacactgaaggggggtgtttttaccagtgcttagctactgactattcttagctactaaccaggtcttaagaataatgtagaagtcatgttatatggagttgagttgctaacttttttccttttcctcagtttccagatgagtttagcagtaaagatgcttttcccaggcacaaattgggaatggaaatcacctagttccgttccctctgacagctgtaatccagagagctaagctgcttacttcattagcttggtataagctgacgacagcagtgcccttgctttatatttgtcagagctaggaaataagccttctttttttctgctgtaatcatagttacccttgaactgaaatatcttacatttattctcaagcaggtagggagaggagaaaagacattgtgaaaattacacctgaatgcctggagcatggaagacattctgtccctagccttttccctgtgtattttgtccctttgcccactctgcccaaagactgagctttctaaaacataaatagattcatgttattcccctccctaaaaggctttcagaggatctccatggccataggaagaacttcagattccttagcatgctacagaactaaccaggatcaggcctccttatttctctaatttattttcaccacaaatcctatgtgtaccttacattccagactcattaaattacttaaattttcctgatataccatgcactttttttttttttttttgagccagagtcttgctctgttgccaggctggagcgcggtggtgagatctcagctcactacaacctctgcttcccaggttcaaacgattctcctgcctcagactcctgattagctgggattacaggcacatgccaccacgcctggctaatttttgtatttttagtagagacagggtttcaccatg

SEQ ID NO: 76186 - DNA, 1096 bp, Homo sapiens
ctcctagagcatctaggaatatgggccaaagcaaccatccaaaaccagttactttgaattctgcatgttttatttacaaacttaaatagattttctattctcctccatagcattattgtgtttgtcctgatgtgaacatttttggtcattatttaccataatgattactgatcgcataggaaggaagacacaccatacttactctacagtttccgtgaccctagcataccactgcctccctccctcctggaggaattacccacacaccatactgctgagatttgaaatgggcagttagtattgatgggggactctttcattcaacaattctaccctcaaagagccctccattgtaccagggagacactgtaagttgatgctgtctacgaagctcaaaacaaagaagtgactcaggcatttatttaataatttttctttctctgttttcagtgtaccagaggagccttcagaaaaaccagaaggtaaggccaaatcccgttctctgtgactcttcatttgtgtacttaagttgactctatcttcagcatatcagctgtgactgatatacttgtccaacttatgcactccatccaacttgtttgccaaagcaaattcttggcatttgtatcagcctgtttcctctgaagttcatcatattaacctattacactggcctattagcttccagcattgagaaggccagcaaccaaataatttggttcttaactttttagtaggtgattttattttagtttttcttaagtttccctttaccatcctacctccccatgctccctccttacccctaggtaatccctgttaacagtttggcctgtatctgtccacaacaggttagtttttagagtgtccagtggctcagccatctatttgagaaacacgcccctttgaaggtttcttgtgtgaagcaagaaggttacgtgacaaatactgtaacactcgcctcaggtctatgcctggggaagatggtttgaggtgcttagtggggtgtcctaaagcaaacaaaaggaaccaaggagagagaaaggggccctgagatagcaggcaagtgtctacctgcaactcatgccagctcact

SEQ ID NO: 76187 - DNA, 1240 bp, Homo sapiens
ttcccctagtctaagggaaaggagtttcccaccaacccagccctcacaggaatttgtgcccccagcgacaccccctgccaggcaccagtgggtaccggatgagactgagagtatctgcatggtctgctgcagggagcacttcaccatggtaagcagcatcggtctccactgtcaccctcaggagaaggtaaaggagaattctagttcatgagcctgagtttacaatcaccgcctgtccccaggagaatatcggtattttcagaactgccaaatctaagactttgggttcatttttgacctgaccagaatgtattttctggattcagacaggtagtagacaccctcaaacagccataaattctaaaatctttgccattgtcatgagataataaaaaagaggcaggaggagtcaacaggtgtcagtggatcttgtttctggctcccatgtctttgacagtaagactggtgacccagcagtggttatatgcactgactcaggagacagagggcctgggttctaatcctggctctgcctcttaatgacagtgtgactatacactattttggtctcatgtgcctacttgtaaactaaggatgatatattcttaggctcatggagctgttaggattaaatatgataatatgtgtcaccatacttaacgcagtacctgcccagtatgccacatcagctcaacgctgatgaaaacgatggtgatgtaattgctctgtgtctgtttcctcctcatctataaaagaggtgtaatatttctattagaatgaaatgaagcagtactttaaagtcactttgatgcccatccactgtagactggataaagaaaagtggtacatatacaccatggaataccatgcagccataaaaaagaacaagatcatatcttttgcaggaacatggatggaaccagaggtcattatccaaagcaaactaacacaggaatggaaaaccaaataccacatgttctcaattttaagtgagagctaaatactgagaacacatggacagaaaaaggggaacaacagacacggagtgtacttgagacagaggagggtggaaggagggagaagttcagggaagaaaaactgctaggtaccatgcttactacccaggtgacaaaataatctgtacactaaacccctgagtcacgagtttacctatgtaacaaacctgcacatgtgcccctgaacctaaaataaaagttgatttaaaaaaaaaaaaagatat

SEQ ID NO: 76188 - DNA, 1002 bp, Homo sapiens
agcaagtgttattggaacacacgtgcaactatcattttacctatggctgctttcaaggtacatgtgcagagctgaatgtttgagacagacattatggaccatgaagcctgaaatagttactctctgatcctttataggaaaagtttactaacccctcatctggtgaaggtacttggagtacttctcaattaccatctgcagaatttagtggggagctcagccttcctaaaagactgcgagtctgtttcagtagctggctatgcaccttttgttctcatgcacccttccccttcccagtgagaatcttgagttttttctgaaatttgtgtactattttctttactctatggatctaccccacaaacagattctgctgaccctgcctgagcagcaccgggccagctattcccacttgtcctctaaccccctgttcatgctggagcagctgcttatgaacatgaaggtggattgggccactgtggctgtgcagactctccagcagctgctggttggacaggagattggcttcactatggacgaggtggactcactgctttccagatacgcagagaaagccctggactttccataccctcagagggagaaacgatcaggtaactgctagcatcctagaaggggattctacatggaggaagaaatgccatgctgcattcttagttttaatttgctccccttttaatattttgggttgatctagagtgaatgaatacacttcagaagagctatctctttattatataggagagatcttggtcttggaggaagtagaataatgaccagaattaaaaggtggtagataaccactgcatgcacataataacataaaggtttggaaagcaaaatatgctggaaatggtctctgtctggccttgatatagcgggctcttcagtgccatcatttggtattgagagtatgccttattcccaggatcacatcggatatcacttgtatgtgagctgactcagcctcttctacattga

SEQ ID NO: 76189 - DNA, 1021 bp, Homo sapiens
aggtaaggatacaccgtgaaatccaggcgctgtatgtgggatccaaggtaaggaggaaaaggaggtgttgggaaggcatacctgagggagagactgcgagcctagctcttcttcagaacttgccttttcaatggctcttttgccaggcacctgccatccctggcctgtgctatatgaaatctttaccctagaagccctctgtatcctagttgagtctcctaggacttgtcattctcttcctgtcctgcctccatagggaattctacctggtcctcttaagttgcctttatggtttccatggtatctgctgtatcaatgcttctcaatgctgacaatatattagaatcacctggacttaagaaaaaaataccaggttattcacctctaccccagatcaagtaaaactggtcttgggatagggactggacatcttccaaagggcttctgatgtaaggatttaaaacgactgcttgataaacttgtctgtgctagtggaagagggttagttgtctatgtaattaggtgagataagttcttacctttgatgtataactttggagacattaatagaagaaacctccagctagaaaaagtaatccagtgaagcagagtttgaagagagctagggccctctggcattcttctaattattctgcctgacagtcctatatactaccccacaaatagaacgagtgctaagagagccataaatataaccactggcccacttactaagagttgaactacataacatgttccttaagaagatacacccaatgtgctgtagctgagtaggggaacccttgaaaactggcagtgaacagggtcagtgaacatatttcaagcctagtgatcgtgacttctaaggagaacttagattcatcgtttacctgtaggacataggaggtgccaggtttcattagactactgacactaccttgtatttctcattctgagtaaagcctcaaataaacagaatggtggcattaagggtcagggagacctcaatcatacctggagg

SEQ ID NO: 76190 - DNA, 1027 bp, Homo sapiens
aaaaaaggtttctttttattcttccttggcagttttcatgcagagctaaaatgttgtatgaaaggtgatcccacagagcattcaagccagaagaatatcttgggtggagtttggggtagaggagcatgggacaggtgaccccagaacaatctgggaagcatgagagcactgtcttcactagtgaaaggccccagtcctggcctccatattcagccttcactccctgcttgttcttcctggataggttcactctgctctctaaataatctttgcccaatttgctctcttttctggcaagttctgacagcctgactttggggcagagatctagggatggcccatctgtggacatgcccagtgacttgttcatggagggagaagctgcagtgtggtttgacggattttcttgtctttccttagattctgggtttgcagtctcccccagtgtggtgtgactggcagaccttgaggagctgttgtgttgaggacccatcaactgtcatgaacatgattctagaagcacaggtaccgttttcctgggtggtgttccccttcatcctcctttcagagttacaaccccttagctggctgtataagcccctttctgcatatcaatgttcactttttaaaaaaataactataccacattctggccgaggcgggcggctcacaaggtcaggagatcgagaccacggtgaaaccccgtctctactaaaaatacaaaaaattagctaggcgtggtggcgggtacctgtagtcccagctactccagaggctgaggtaggagaatggcgtgaacccaggaggcggagcttgcagtgagccgagatcgcaccactgcactctagcctggacgacagagcgagactctgtctcaaaaaataaaataaaataactataccacattcttttttattgtgaaatttgccaaaatccagataagtatagagactaatacaattgactcttttgtattatcatcctgtgttcatacctgagattttctacattgtgtacgttaggtaca

SEQ ID NO: 76191 - DNA, 1012 bp, Homo sapiens
cccgaggttaaaggtcagcaaacccagcttgtcatggaaggaacttcgtggccgcagggaggtgcctctggctgcagagcaggtagcccgggagtgtgagcgccttctggaacaattccctctgtttgaggccttcctcctggctgcctgggagcccctgcgagggtctttgcagcaggggcagagtctggcagtgaatctctgtggttgggccagtctttctaccgttctcctgggcctacattctcccattgccctagatgtactgagtgaggcttttgaggaatccttggtggccagagattggtcccgggcccttcagctcactgaagtgtacgggcgagatgtggacgatttgagcagcataaaggatgcagtcctgagctgtgctgtggcatgtggtgagcagaatgctatgcctccctttttcactagtggtaatatttggtattcactgggtatattatcacatttaatcctcacggtaactctagagagaagccccactataatctcatgttattaagaggagaccaggtctcagaggggttaggaaacttgcccagggtggtaagtggtagagtagagcttagaacccaagtccatctgactttaaacagccacgcataaccagtattctcaatactgtatatcacaattcttgtgaaattctacagactacaaatgtttgggtcccttccccagaggcccaggatagagctcaggcaagtgtttactttaaaatagggatcagcacattttttctataaaggactttgtaagccacagtctcgctcgtaactacccagcccctccagtacagcatgaaagcagccagagtcaatatataaagaaatgagcatggctacagtctaataaaactgtattataaaagcagattgtgggtctgtttgatgaccactgctttgaaagctccccaggaaattctgacgtgtaaccagagtggaaagccaatgagctgtaacactactaggatttcctagcagtgttg

SEQ ID NO: 76192 - DNA, 1032 bp, Homo sapiens
aagtgttcagggcaaggaagagaaaagatgcacaattgaaaggctctggatacagcagtagccaagaacactagatttataaggttgtcctctcttattcatctctggctattttactcatctttgtgctagtatagctgtatagcacatgggagtactcaattaattttcttggaattagcgactcaaaaatatctctgtcagacctgtggtccattgtgaatttgagcacccagcagaggaatcaagtctctgatatgagtaccagattcttaagtccacagagtgagtactacatgcacttcagtcgggttgaagagagcaggagttggctgtccgtggctagatctgcccactgaagttcgtctggggttggaagtctttagagcagtggtaagatatagataaaacttgtggtcaggttcatgttgagaataccctttacctagaatgaattaacagaaggctctccatattgtcttcatcttgacactgtacttttttctcaattctgggaaacagggctctgaactcttgcagtcagtggtgcaaacaaagatcatgttctttacctttgcagatcatgtggaggtcaaggtaggaaatccctttgttctgctgcaacagagctcttcccaactggtgtcacatctcctgtttgagagacaagttcccccagagaggtaggagccacctccatgcaagtcagccatgggccttcggatgatttcatcaatatagccaagggctcagtgcggtggtgcttggggttagcacagagagtggggatttcttcctgactgaattttttattcttatataactgaaaatttaatgtgccttgtttcctgctttctctctcgatacctttagcatgtatattgttaagtatgaaatcagtgggtgactctgcactttataaataggcaaaaatctaaaaattcaataacatgatagttgattagactgtaggaaaacagcattctcagagaatgcaagtgggacataaatttgtacagcctctgtcggaag

SEQ ID NO: 76193 - DNA, 1007 bp, Homo sapiens
tccataaagttgttcatagtctagttggagtgtcaagataccacttaaagcaattaaagaagacatatgatctccgctcaagttgagtacaactgaaggcagtaccaaggcaaatctatttggcttgggacaacaattccataggagtgccagagattctgaatctgctgatgttgttgacagctgaggcatcttgccagagtcagtcctagaatctcaggcatgaaataagccaagtatactggttgtcacccaaaatggcacagcatgtatttcctccttaatattggagaggataaaatttcacaggtaaatacaggactgagtgtcaatctctgaaaacacttcaattttttttttttgcattccctcttccttcatctatttccaggtcgacggatagaccacgtactcctaaatgctgatggcattcgaggttttccagttgttcttcagcaaatcagtaagagtctcaattatctgcttatgtcagccagtcaaaccaaatcaggtgagttgcttttttctcttttcttctcctggacttggaacattaggtcagcaacagactttactttttctttctcatttgctttccatagagagtgtggaagaaaagggaggaggccctccacggtgcagcatcactgaactgcttcagatgtgctggcccagcctaagcgaggactgtgttgccagccacaccaccctctcccagcagctagatcaggtccttcagtcactgagagaggcactagagctgccaggtataaggctgtctgcttgggaacaaataaaagctgaactggggagaggaaacagctgagagtaacgaagcactttggagcagaggcttgggactccagaactgggatctatcagccctttagttagccagggcatgtctcaatgtctcgtaacttaacttcacctgttttcccacctctcaattgaaagaatggtgaacactccatcagctgatacattttctcatgatgaataagaaa

SEQ ID NO: 76194 - DNA, 1059 bp, Homo sapiens
gtactcctgggctggacacactgccagagcctagagtcagccaagaggctgctccagaccctgcacaggacccaggtaactctcactcagcatcccaggctgctctggaagtgagagacgtggggcttcgggcttaggctgaatgcagagccctaaaatcagtcataatctgtaaccccaggtgcctgagtcagcatctctttcttctcccatatcaacatagggcccaggctgtgatgagctcctcagggatgcctgtgatgggttgtgggctcacctggaggtcctggagtggtgcatacagcagagcaggtatggccctgtgcagtcagcgcctgcccaccacagggcacagctgaccctgtgctccgcatgtgtggccatttcaaggcgttttccacataaatgttttgagttggcaatgttgaccagctactaaaaattgttccaacaattaaaccaagaaagaaacacaagtaattattaccttcaccatgacaatcaggtcataactggaggataattttaggatgacagtaacaaaaagaacaatagctcgcatttccagtgcacttaccataagctaggcattgttctaagccctttacatggatgatttcaattaagcctcacaataatcctatgggtagataccaatattatcttcattataaaagtcaggcaactgaagcccacaggtataaaataacttgtccaaagtcacacagctcacaatgtcatccacattcttagtcttacgttatcctggatcacacttttattcaacaaatgcttactgaactgtgcatgaggccctgtgtttctctggtaacttagcctggacttaggtttctatcttgttcttcactcacttcaccagcactttctgaagtagagtaggcagagggggaagtagcaaggggctcttactcaaagtacagccagagaaacttgtgttcatttgaagctggagagggtgtagaaattagaaaattcagtctgtaggacctttctagaccctactgatctgaaaggccctttctaggacctttctagaca

SEQ ID NO: 76195 - DNA, 1104 bp, Homo sapiens
tatgctctgaggcccaatacttatttttttaatgaccctgacaccagttaattaaagacatatttacagtaggatttaagagagggactttcacttgtattaggtaaaggactcatggtcttgcagtccatctctgaggcagttaatgaagtggcatcatcgagtaccatctataggcatgatgcttaagtatgggaaataacctacttctcacccccttctctccctgtaccctcaccctgcaaacagaggataggctctagaggttcttgcttttaggtgactgaggaagaaggactaaaacacacactattatgtattaaatcatatggtactaattttaagtacattgaagttgtatgggttggaggtattggagaaggtttttgtagtaggataaagaatggactgaaagcatggctgggatttagatcaagggttaaaaactgacattcttttaaaaattgaatgtaaatgcctttagatgggcataatgtcttacctggtctgtgagttggcagaccttgattcacatcaccagtacacattttggaggcagtgaggtgggactagctggagcatggaggccctgggcaattgagttcatctcttccagcctccaactcctcatttataaaataggagtaatagtagtgtcttcctctgaagactattgtaaggattaatttgatttttctgtgtaaagggccttagaacaatgtctaacacatagtaactacgacataagtatttgttaccgccactattatataagtaaactgaaaaagaggaaagcatgaaggcacacaagtgataccattccaggcatgcccaccacccatccttttcttcatcctctatttaggagctgtatgagaccttaacacagggtgcagtaggccacgtgcctgacggaaatccaaggagggagagctggactcctcgtctcagctccgaagctgtctctgtgctctgggatctcctgaggcagtctccccagccagcacaggccctgctggagctcctgcttgaggaggatgacggtactggcctctgtcactggcctctgcagaatgcactggtggacctcattcgaaaggcatt

SEQ ID NO: 76196 - DNA, 1489 bp, Homo sapiens
tccttttagaagtatgttaattatcagaaatttatatcttataaaagaattactctgagacattttcatattgaacttcagactttgagatttaagtgaagaacctctaacttagaaatgactggcccaaggacacaccgtaaagttatttgacagagctggtgctgaaaccaagatcttctgacctcaatcctctgctttttccaccttaacactacttttttagcccagatggactttaagaaaccacaaattctacttttaaaatgtctgtaatttcgccagttttttaaatttttgctcctctcggtcaccagaattaattttgtctttggttccacttttgcatgatatttatcgttcctcacagagctgtcaaaaagtaacagaaattgctaatctgaatgtatctcttatccaggatttagccagttgtttaggaaagaaaaatgacagaaagactagtaggagcgagaagaaagaaaaacaagattgaaacataatgaaacccagcatcattaagagttggctatggtttcagatttaaaagagaaaacttgaactaaaatagtaacctatagttactatagtatcttcaaagagaaaaagaactattgttactgattaagggatctctctagtacaaacatggaatttgtcaaatcaaattaactttcccctcagtagagactatttgcttactttatatctgaatggttgcttattttctagacagttgctcaactatgtcaggagatggattccacttcccgttcttgtttttcccaggttcacaaatagattatttggtctttaaagcttcaatgacttgcttatttaaacagttgtgggactattttagttcctcatagaattttaaaactatataagcaccatggcgtccagtgaattcttggggtagttttccaagtccagtcattatcctgaaggtgccttcatcatctaggaatttactggctgcctgtccttttccaggttcccaccttttgccaaaagcttcccttttaattattagatgaaatagtgattctattttccctttcctccattcatttttgccttctgccttttaatcttgcagagatgtatctctccatgtgtaagcaattatacaaagatttagctgcagaaatgttcacgtctatgctacttctattagaagaaaactgaaacaactcccatgtccatagtataggacaggttaataaatggaaatatatctatatgtaaaatactataccactattcaaaagtatttggcaaatgagttttcactaacatagagtgttcatggtctgctgtatgggaaaaaaggcagtttagaaaaaagtacatttggtatacatgcatagagatgtgcatagcaaatggtctgaatgaatggccttagaccacagttttcataattgttctccttcagtgagaatatatataaaatatatatttcatatataatatgttatatgta

SEQ ID NO: 76197 - DNA, 1032 bp, Homo sapiens
cttttttaagactgtctgattcactttctgtattaaaaatatgcttcagatagtattagctattatggttttctcgaatattattttattttaaactaagataaggaggtggaggtgagattaaggctttttatgaaagctgctagctctgttctggttctgatttgtttgtttgtttgtttgtttgtttgtttgttttggagacagagtcttgctctgtcacccaggctggagtgcagtggcatgatctaggctcactgcaacctccgcctcccaggttcaagcgattctcctgcctcagcctcccgagtagctgggactacaggcgcctgccaccgcacttggctaatttttgtatttttagtagagatggggtttcattatgttggccaggttggtctcgaactcgtgaccacaggtgatccacccacctcagcctcccaaagtgctgagattaccggtgtgagccaccttgcctggcctggttccaatgttttactgaactgtcatatacatttaaaaatatctcattagggcagtgtcttgcctgttcaggtttaaaacagaataagcaatgaaatctgtcttggatgacaaaagatgaaagatcagtagaaactcttttttacaagtctttctttttacctttttcagatgtgggcaggacatcaaccctcaaagagtagcctgggtctggcttcttgtactggagaaatggttggcccgggaaaaggtaagtaggtttatattaaattttcctccgaggccaggactgagaagaacttgaaagtagttgtgggatttcccttctgtctgttacttcctttatcattaaattcatcatactcattctcaaagaatggcttaaatttttattgctgtctccttacctaaattcattcattaatgcactaatatacattggcatatattactgtttgttaaataccaccatgagtcttgtgcctaaagagaacttttggaaactcagtgaaggtaacaaaatagcaaataaaatatgaatctgtaaca

SEQ ID NO: 76198 - DNA, 1231 bp, Homo sapiens
aggtgagtgtaagacacccctgagagggaggggcccctctccacgacccccgcagagagcgtccctgcggcccacccccacactgctttccacttatgacacagattcgtctcctggtcgtcaatcctctgccttaacagagggctcaaactagggaggttcctgctgaatttctcattcttgaggaggcgaccacctggggatttggagtcaagactgggcataacgttcagtagggaatacggacgtagagttatgggtctgcgcccggagcaaatatgactattaatattattaaatataggaatccgcgtgaagagatgggatccaccccttgaagaaagtgttttcaaaaagtaacgtgggaaattaaactgaaaacgatacttaggcaagcaagtcccgcctttcccaggcggaccagtagttgctgctttgtcttaatacagtgccttctgtttcttctcactggcgttgtgttgtttctaggaggtactccgcgaatgagaacattgagaatgtgttcggcataactcatttctttgtatctccctgcactctgtgctgggaaaatgaatcatccatttggaaaagaggaagctgcttcgcagaagcagctttttggatttttctgcgaatgcctgcggaggggagaatgggagctggcacaggcatgtgtacctcagctacaggagggacaaggggatatcccaaagagggtagaagacatacttcaggcattggtggtgtgtccaaatctgctgaggtaagggatctcttttcctaccagacggtcccagggtgagagacatgtggttcaatatttgggcattggtcaatgtgcccccactcaactaccctctgaagaataagcagaggcacagtgtatttcacgtgctctgaaattttacctctatagtatacatccattacttagtcaatattggcttttgattatcatctgcaactgaatgtaagcctggctgccaaagtgtgcctgaaactgccatttcttgtttatcctcgttaatatagatggtggaactgcattgaaaactattttctttgcctccaaaaaagcaaaccctgctctcttcttgcttatgagattgaaaatattgttgtcgctttacttaaaactttttatttcgaaataattgcagtctcacaagaagctgcaaaaataatggagtccagcgtatccttttcccagtctgccccaattgcgacg

SEQ ID NO: 76199 - DNA, 1006 bp, Homo sapiens
agaatggcgtgaacccaggaggcggagcttgcagtgagccgagatcgcgccactgcactccagcctgggcgacagagcgagaccccgtctcaaaaaaaaaaaaaaagaaagaaaaaagaaaaatttccaaacagggtgttcccttgtttcacattctctttggtgatggtcctgcaacagattttgataatcactatattgagaaactgcttcagattcgatctgttaggctgatcatagtattaactacaattcccagcaagccgcggagccaacctgggcctctgccggcctctgattggatacagtagccagaatgacgactcaatcagtgcttcggttgttgctttgcggcgttttccgcggggaaactgtgtaaagggtggggaaacttgaaagttggatgctgcagacccggtactggaaagtttcatgtggggtgccgttgtggggaagtggggttcgctcattatttcctgctccttccctaggctcgtgggtttcgatattgggggagcggagattttctcttgggtgctggtcacgcccccttaagactcgggatcgtcactaagaaccccgctgtgaattgggggagcttcgggccttcttttggtggggaatgcttggaagctgctcattgttggaaaaagctctttttaggggattctgggtgatgtttccgcctgttgctgcccatcttcctccccagccccttcccgcttcgggcagcctgtcattaggggaagttgagggactctcccacttcaggtggtgttggagagcgtggaatctggagtccggtccctggattcgaatgcgagcttcacaccaattgtcagctgtttaactttgcccaagtttctcaactagttacctcagtatccttatctgtaaagtgaggtaaaatatccgaagcctttggaacagtgtggcacgtaataagggctcaataaatattagctaatattgttcctaaacagttgttgaacatctaacatgaaga

SEQ ID NO: 76200 - DNA, 1048 bp, Homo sapiens
cttacttctctagcctcattgcttgctgtgctacacccacactccatctttcaaccattctaaatgaactgtatatttacagtttgtgttagtccctgtttcctctcttgcttcttgacctttctttgtacattctgtcctctttggcaggaatagtcaaatttcctttgcttacctaacagctctttcagattttagcacgggcatccagcaattccattaagtttccaaaatctgtatcagttatactttccctattacaatatctcttattaattgtgttgtaattgcctggtttctagtcctaatttcatagtccctggttgacttcataagactgtgagggcaacgtctctctctttctgttatgtcatatccccataatctagcacagtccctggcacagagtaaatatttgttgaacaaataaataatagaagggaaaaggatggattagggttaaaattgctaaaatttagagaattaaagttggtttatgtttttgaatatatatagaggttgaaaaaaaacttaatcattttcttgtttaggcttatgggataaaagcacaaaggtctgctgatttctcaccagcattcttatctactaccctttctgctttggacgaagccctgcatggtggtgtggcttgtggatccctcacagaggtaaaggaaaaatttttcgtaccttcttccattgacctataaccttcagagctagggaaaaagtttagttaaaaaacataaattatttctggaacggtaatctgaattaaattataagtacttcaaggatatggttctccactcagtacttagtgtggttgttctgcaaacagaggtgttaaaaacaaaatccttgctgactgattaaaatctacttaggttgctgtttcattgagttaacttagaaagtgataaatattgctgggtgtgtttatatatgtgttatatatataatgcatacatatatgttatatatacatacatgcatacatacatttatatgtacacacgtcacatatatgtaatatatacacatatgt

SEQ ID NO: 76201 - DNA, 1088 bp, Homo sapiens
ctggctaattttttgtatttttactagagatggggtttcaccatgttgtccaggctggtctcaaactcctggcctcaggtgatccacccacctgggcctcccaaagtgctgggattacaggtgtgagccactacacctggccaaccttttggaggaagaagtgtcaggaatttgaggacattttaaaaccactgcagttattttccttgaaaactgcttacaatgtggtgacttcatagacaatgtttatcaatacactcctgaggacttcttgcttgaaagttctaggggcataaatactttcaggaaacttctaaacaagaacagattattttcttacattctgatagtcataatttaactgtggattttttttccttggagatagggaccctgttttagatactatattttatttcctgtcttccaagagagatttaaagatttatatgagcaacacctagcagatgcctattaaatagttggtaaataaatgcgtgaattagttattaataaaaatgcacacacacacatacacacacacacacgcacacacacacacatcctcttcttttggaatatactgccaccaggtggtgccagaatcacatgattttacataaactttttgggctgaagttccacttgcttaaacaaggtttattacagtgtgatccacagtcataaacttacttatttaaatagcaaaaacattgaacttaaggaagattaactgggaaattctttttactttttaagttttagaataatttttaatactttttcacttagcttttattaattattttttaaaatccaaacagaagttacaagccttttaggtgttttgttgttatctaattggctgacttggaataggaatataaatactttgactccttagtaggggcaaattctctcctttctgttctagctacaggtagcttcttcaatcttttttgttttttgtttttcaactgagtacagggagtatatcaaattatcctcaaacagagttttttttgcttttattacaatttttaattgatacaataattgtatatatttatggggtacagtgtgatatt

SEQ ID NO: 76202 - DNA, 1018 bp, Homo sapiens
agaaagtgtatttttctggaatgagacatgaagacttactgatatctattataatacaatataccatatttgttcaaatatacttatttcattcaagaaaatgaaagcattcttatttagtaaacatatcttatagctgctactctaaatatcacttacaaaaaacatatttaatcccagaaagataaatctcaagagacattgttgtttgctcaagattagatgagatccaacagcccttgctggttgcatgctctgactgctaacctctgttagtgcttacaaaagagagcttaattctaaatctgtatattaagccattttgcttatacctgctctattgataaggcttaggagtttctcaagtaaaattaattagagattcagcaatgtggctttaagtagaattgactgttttcgtttgtgctatttttttcacccacagactggttgaaatagcagaatcccgttttcccagatattttaacactgaagaaaagttacttttgacaagtagtaaagttcatctttatcgggaactcacctgtgatgaagttctacaaaggtatgctgctttagattttgattttttagtaatgcgttgaaggtttatgttttatcttttatgtttcagcttctaagtgaaaaaagtctttataggttagaattatgtggagtaactttttcagtgttcttctttgttatagccttttggttgaagtctttcttgaaaaacaaaaaaaattaaatgaataaaatgttctgtatttaattaattaagtggtgtattatttatctattgtttcattaacaaattgtctcacagtttagtagcttaaaacagcaaatacatattatttcacatagtttctgagggttaagtgtctgggagtagcttagctgggtgtttctggctcaatgtcgctcaagaggttatagtcaagctggtggccagggctgcagttatcttaaggcttgactggagctggagtacctgcttccaagctccctaatatag

SEQ ID NO: 76203 - DNA, 1723 bp, Homo sapiens
ggcaagtgaaagagtacccaagatggaagctgtagtcttttataacccacactcagaaataaggtaccatgatcttgtcatatgcttgtggtcatacagatcaagtctggcacactgtgggagggacctatacaaggatgcaaaataccaagaggagggagtaagtgtgggccattttgcagactggctaccacaagtagttttaccccagaattggagcgttaacattatcttaggagaatcaaggaattctgaaactacacagaaacagtttgctctgtttccagaaaagtatgatatgtctacaagttaggtttactgaattcttgcaaatcattactgtaacttaggaaagaatagtttattgtttttaagttgcttagcctttgcaatacctttatttatttattttatcttaaatttattgactattttataaattcttcttttataggattgaatctttggaagaagaaattatctcaaaaggaattaaacttgtgattcttgactctgttgcttctgtggtcagaaaggagtttgatgcacaacttcaaggcaatctcaaagaaagaaacaagttcttggcaagagaggcatcctccttgaagtatttggctgaggagttttcaatcccagtaagtttttctttttttctcttttttcttttcctttcttttgtttcttttatattacattcactgacttatggtatcaaataataaaattagaggaaaatgtaaaacagatgactttttaaaggtagtacagtctaattgctatagcaaacatcgccatcatcttaaattagctcatctgctgagattattttattattttaataatttgagtctggagtagatttaaacgatgtttttaaaagttcctatagtccctccttttcttccttctcattgtttactctttgtgtgtgctttgtatcacatttctcacactgcagtaaatataaagtagtaaaacttcatgaaattgcctagatctatttctatataattaaaaaaaatactgcagttgttgttagttttgttttaagtattttaggtttagatactgtgttattgtgttcagcgctgttttgtgtacaataggatttggtttgcttcaaatggtcagaggtcaaccattaagagatgttggaatgatagtaatgaaagtgtcagtaagaaaaccttgaaagattatttgtggcatggctttttgtagcgggcattgtgatcagaaatctgaagatgacaggctattacaagggcttgtgatgtgtaacctgcaagacgtaagtgtgtactaagttacactcccatctgcagtgtgtcagggagttttagtcgttgttccacagcctcatcaacattcaggcttctcaattttagtcatgcttcatctcaagaaaagatagttccttaaactgagataaaatttggttatgattttataatttttagatttgtttttggaaaattaaaatcttggatctttgcaacataaagaatatgtataaataatataaactatcacacagcctttgaggtttataaaaccaaggaagaagtcaagggagaaaatatgacattcaaaaagttctgcatactttaatggctttttagtttatattttgaattaaagtcaagtgctgttaagtttgtcttgggtgatgttcatcttttacattttattgtagttggttaaaatgataaattcaaat

SEQ ID NO: 76204 - DNA, 7474 bp, Homo sapiens
ttgtttttaatagaaccctctgaaaaaataggtactgaatatcccatttctatgcctttggctttgtttctctatttagaaataaatgcagattatactatgtacttatataactgtgatatctgttttttgtgacaattaagattgtaagattggttttaaaaggattttgaaaaatatttcctttagaaaatgttggaattttcctagctaaattgatacatttaaatggaaaatctctcacacaggtccgagatttaattaaaaaaaaaaaaaggaaatcatgaacttttacacatttatactgtactttgaacaggcaccatagtactgttcaaattaattatgtcaatttaatatgttatatatgataatttgctaaattaaattattgcttgctatatatataagcttacctcacagattgtcttgaaatatgtatataaatataaatatataaaaataaaaaatatatataataaaaatatataaatatataaaatgtgattattcagcttttccccccctttctctatttgaactagtactagaaaacctcgtcttttgggaagggtgacatcatttggcccttatgtgcgcatgaatgcatttaagttttaagtatgctgttgcttttttctacgttagtccctgagaattaaagaggaattaatcgatatcacttgattgaaaacagatgtattaatatctttcagaagttttcaattataagatggctttactaatattttgaggctatcactgaaatgaaaacataaaattaaaaaattttcacagagaattttatagacctttgagtatgttcagactgcagttttgagaaacagttgtagaagtctggtagaatcttttctcctgaagtttatggaggaggtgtaagtgatactctgccattgggatggaagatgcggaacctttgtctttttaaagtgttcacactagtattgaaaaaacagtaggctctgaagctgtttagagatactggataaaagtaaccgaaaaaaatttaaatactgctttataaaataaattgtggttatggctatttatgttgactttatcattgacttctaattaccacgtacagaatagttattatacgtattgtaaattatgtatcagattaaaataataggatgtttttgccagaaaggaccttaaagaaaatttagtttggccccttcattttacagatgacaatgaatccgaaaagtgacctgatttgctccaggacactcaacataggaaaggacaaacagtgggtagaatgagagatcttttagctgccagtttggggatttttttttttccacagcagaattttctttttttctgagacatacagaattacggtggactgtaaacttctttttatttatttattattattattatactttaagttttagggtacatgtgcacaatgtgcaggttagttacatatgtatacatgtgccatgctggtgcgctgcacccactaactcgtcatctagcattaggtatatctcccagtgctatccctcccccctccccccaccccacaacagtccccagagtgtaaacttcttaatgacaggattatattttctgtttctctgatttccaggacctagcactgtggataactaatatttaggaggtaacagctaatgaaagtacaattaaggtttatgaaaatagtcttaccatatgtatgtcatatttacattcattggaatatttttctttatcttttaaaacataatttgaatttttttatgcttgctgctgaaattcttatgtttttgtttttaaattgacctttgtagtatgccatcttagttgtattctttttatttattttccattccagagttttataagttgttggaataaaagaaaatgaaaatgcattgcttagataacaggactttcaccttttgaaaattctttggaaatgctttttactggtatttccaaggtctacatttttactttttcagagaattcaacaaatcaatttcagttgttatatgaataatattgaacttttttgtctccccttaatcttcttctacttccttcatttcttgatattgtacaaatgttttctggtgtaaggggaggagtaccagttaacactatttacaaaagaggtttatggagataaatttggatatattattaaatattctaagagggaaatgccttattttcattgaaagttgttgttaaaatccaaattattttactaagatgtgcttataatccgtttttctgtggccatctgtgttcttgattacatgccttttgagaatatccattgctctaatttattgcttatcaaggtttttggaatattagtgattatttttatgtttaaagctgcttagacaaatgaatcaaaatatgtgcattttaaattttgctattttaaagacagttttaaatcattaacaaatggaaagaatttgttctggttttaaagtggacatataacaaggttaaattttttattattatttgagacaagcacaaatttttttttcctctttttaatggtgaacttcatgtgggcctggatttatttatttatttatttattttacaccatgagctgttccattatgccaagtgggtttaatttatgcaggattataccttgtcttagatactaataaatattcaaaatagaaaaataagaaactaggccacttcatttaaaataattaaggttttattaattataaattgggaatattgtgtttataactggtgagataagaggaaaaagaatgtatgtacccaaattcgacatttatttttatcttaaacataaatattcagaactgtcacttttgtgaaagcctgatgaagtcactctgattgtaaagtaggaatcctagacccttgatgtagacatagatatgccattaaaactgcagtcctgttttgctgtgtgtaacattgttgtatcacttttctagaaatgtaatttttggtttactcttattactttcatatttttactgaaaacaagcaccacaggacttctgaggtaagaaaagtcctttacaggatttttcttttccataaatgcttactgttggctcactcacatttgaaatcagattgttcttaaacctatcctatgttcattcaggtccctgaaactcacagtctagactaaacctttatcagttagtgaaaataattctagaaaaagtgtatctttcttttatgtagctctttatgacttctgaaactttgtttttattgtttctagcaaaaacctagaaacaacttaaaagttagtaagtaggtgattggctaaattaatgttgacatatccatacaatattatattgtgccactgttacaatgaatggtttagcccagaaatggattcataggttatgcaggcaagggttaattcagctagcatgggttactcatatccagccattcccaaaaaaggcctcttttcaggactgcccttgcctggctcctgggagatgagtgctgggccctgggaatactctgcctagtaagggtgttatatgcctgaggacttgagccacaggtactggtttgatcagattgtttatgcaaacagtgtgatttatggtgaagcctatttttctctggggatctggggactacaatctaaatagctgaggtcatctgcatgcaggcattgcatgcctagtgactgaccctcaatagaaatgctggacattaaggcttgagtgaactttcctggttgacattactttgcatgtgttgtcacacattgttgctaggacaattaagcacatgcatgcgactccactgggagaggacacctggaatcttgcacctggtttctcctggactttgcttatgctccttttctgtttgctcattttgatctgtatcctttttctgtaataagccataactgtgaatataacagcttttgagtcctgtgagtccttctagtaaatcattgagccagaaggtaatcatggggaaccttgacatgcaggggtgctaatagatatgtacaagagtatctatggcagcttaatttgtaattgctcaaaactggcaagatgtattgtagttaatagtattggcatcagtcttaatacattggctttgataattatggtttgtaagatggtgatattaggagaagctgggtgaagggcatttgggaactctaccctttctgcaactttttggtaaatctaaaattgtttcaaaataaaaagttaaaaaaagaaaaggaggtcaggtgtgctggatcacacctgaaatcccagcatttgggaagctaaggcaggaggatcacttggccaggagctagagaccagactgtgcaacatagcaagacctcatcttctcacacacacagacacagacacacacacacacacacacacacacacacacacacacacacaaaaaaaaacaattagctgggtgtggtgctacacacctgtagtcacagctacttgggaggctggggcgggaggatggcttgaacccaggagttcaaggctgcaatgagctatgaacatgccactgcattccagcctgggcgacagagcaagaccctgtctcaaaataaataaataaatagaaataaataaataaatgaaaaggagagtagggcgggttttatgagtagaagttggctctgggtagtcataaagaaatggcactggctgtatttggagaaggggacttgattttgatgcactggttctcttctatttagtcatctggtcccatacatattatctaatacctcttcaatttaaaccctgctcttcatctttcagcacatcctcttggctccgctttcgaaatacattcagtatctgattactttctaccaccttcattgccatcatcttggttcctggaggctaaaagtactggctttggagttagacgttggtttgaatcttagctccactatttgctaattttatgaccttgaataagtatttatcccagctctaacctttcgtttccatgtttgaaaaatgaggataacaatatctgactcatagggctgtgagtattaaatgagataatgtctgtaatgttcttcacaatgtttggcatattcagtaaaaagtagcctttaattattaattttactagttacctcgttccagatgcctggtgtattttatctctttcctcctaaaatattttttaacaaggctgcaagtgcctcagaaggaagaatcatgtcttattcactattgtatccccctctgtctgtcttactggtggatgctgttactgcctgaaccctcctttatctggttaacttacacttattttttggatctcagactctttttgtctttccttttcgattccacctacagcacttgtgtccaaaactccatgctaggaacaatgggataataaagatgaataaaacatagtatttgcccttaaggcttctacaaataaggtaattgtagaggcaaatcgctctctgtgatataatggagaataaaataagtatcttgtctactgttcctttcctgtttcttaaaatatgtaagtagcttgtaagtaacttctctgtctgtcctttgtttgggactatagattacacagagggaattaaagggaggtagtagagaccttcatagtctctcgggtaaaccctttatcatgtctagctttggtccttaaatgtcccattctttttttctttttattttttgagacaaggtctctctctttcccaggcaggagtgcaatggcgtggtcatagcttactgcagctatgccgagttctagtgatcctcctgcctcaacctcccaaatatctgggactagaggcatgtaccaccatgcctagctaatttttttgatttttagtagagacaggtcttgctatgttgcccaggctggtcttgaactcctgggctgaagcagtctgcccactgtggcctcctaaagttctaggattataggcatgagccactgtgcctggccagggttccattcttatttagaaagtcagtgctcttttggagactgataggtagtggttaaattcataaagcacatgcataattctaaagttgtatgctaagaaaacattggaaatgaaggccagttgtagctcttagtctttagcgttactttacgtatgttacacagtaccttgatttgttgtagaattttctaactgaagatcttaaggttgtagctgagtggcaatcttgttttccagtgagtacagggatgcagagaatgaggtgatttatgtaagattgcttaaggagtcatttggataattgaataatatcacttgccgcttccatcctgggttgttattgtagtatcttaatgggtctgcttctctcttttctgtatcggtaatagtacatatgggtacataccattgctacatcattttcccaaagtgtatttctgatcacatccctcctatgctcagaagcattgtatggtaccatgatgcttatagaattaagccactagactataagcagtatgggggcagagaaactatttgttttgtccacagttgtatcctttgaagctaggacaatgtatggcacataatatatgctctaattaatatttattgaatgattaagtcttagtttaggatatgatataatatttaaagttctcttccttctggctccaacctactcctcccatgttgtcatttctcttctgtgcaggctgctggtatactaccccgagacctctctatggctttttagctgtggatgtcctcttctttcatctcttcctttctaaatttttttctttcctatctgagctctcaagttctgtctctcctctgagatttttgtatcactgttttagccccagttaattctaccttcttttgtagtacacatggtcttaacttctaattggaactttaattatgtatttgccttgcagtgtcacttaaatatttgcatgtatatatctgagctcctcagttatattataaagccccctgaaaacagaattatgttcttatgcatcctccatagctgcctatattgaatagtgtcatatattgagtaggtgtccaatatatatttgtagaatgatgtatcacactttttctagttaggcaatttttgaaatgcatgtctaattagatgcctacttcaattcttacactacttaaagggaaaacattctaacattcattctaaaaattgaaaagatactgggaaactaaaacttaagtgtctcccctgcacccctttaaaactgaatgtagaagatttgttgataatttgacagctctgtacctttaatttagtatgatgcatgaacttctgtgagacatcaaccaagattttatacgaagagctgtgatcatcaaggtgggaatttaacatcagtgctctgtacacatagtattactgtaatgccttctttagaagtttaacaacgtcaggtg

SEQ ID NO: 76205 - DNA, 1077 bp, Homo sapiens
ttcaaaatacttgcactttagacctctcttggggaacacatgaagtaaggctgcttcctaagattctgctttgaggttttatgaagacacaatacatgctgttactggacagaagacattttagtttcatgacattgccaaatgtatctcgtaaaattcactgttcatgaatttaattaaaagttcttaggagcttaaaacttaaagtaggtattttagactcatgactcaaaggatcttctttcagtttgtgtgtgtgtgtgtgtgtgtgtgtgtcatacacacacacacacacacataaatatatatatttgaaggagttacagttctaaactaaactggaataaagtaatgcccatagttattaagtactaaagtacagtattttaaagaaatgttgaaattgttataatatgaagtttcttagtgcccctagcttacagccactaaagttagttttatatctgataccatattgtaatgaatttacttttttgttctgtatgatctttagcttagtttactgggttgcccaataacatgggattgacctgcctgctaaccttgtgttggagtctgcttagtccctagttcagctaggtccaagtttttgtctcatgaccaagaagaataaggcttgcagccactggagagtaaatagagtagaatttattaagcgaaaggaaagctcttagcaaagagaggggacctgaaagcaggttgccagaaataggactgagttctgggtcttttatgtggcaagagcaaggaagccttctgtgggttctgcccaaaatgggagggctaaagttccctcctaaggatgttgcatctgtgcatgcctggggttgactccatcttagttattacccgtgagtgcctaagcgaaagccacaggggtactaaaaccacaatgcgaatgtcatgttaatggcattataatgagttgggccaagttaaggacatttaggttgacttattgcgcctgtgcctaagttgggatggtcccttctgagcaacatcctggcatgagggtaagttcttaatcatatttcttctcattagctacagggacag

SEQ ID NO: 76206 - DNA, 1018 bp, Homo sapiens
attacttaattggtacaatgtatgttattccagtgatggatacctggaaagtcctgacttcatcactatgcaatatatccatgtaacaaaattacactgtatcccatacatttatataaatgaaatgaaaaatgaaagaaaataggagtttaagtaccatatgtgttacaactagctgtgcaatcctggacgagtcagttctcatttctgagcctcagtatccctatctgtagaaagtggctaaaagttgctacctcataaggcttaatattattactaataatattaatagatgaatagtaatatatttccgattactaaactttatagaggtttttataatttataagcactttcatatataataattttatagggatgtatatttatctatatttctgaaaggactttgtaaattctgaagcactacgtaacttgttagttgatagttccataaccagctaaatctgatttagtgactgtttttatccttagttatttgaacaatgaatcagaattttctaagctcagataatgcacttaactcaatttgttcagctaaaataaaagttttggaatgttttttaactagtgttaagatttgttttaaaattagattgtaacgacatctggcttttatattattatttaaagatgtagaaatggtgatgtagtaaaaatcatgagtggttagtagttgggggctagtgtcatttttaggagttgcagtgatgaactctatccactaaatttagtgatggatcagtgtagttcttttaaaataaatatttagtactttatgtttacagaggaccctgcaattattagttagcttataccaatatttattgctatataaagggctgggcaagtgcctataatggccacctttggagaggatttacaggcacctttgagaaaacttcttttttttttgaagatggagtcttgctctgtcacccaggctggagtgcagtggtgtgatctcggctcactgtgacctccacctcctggattc

SEQ ID NO: 76207 - DNA, 1843 bp, Homo sapiens
ctttacaacgttagggctgaataaaagatagaatccttatgaaatagtgagcccaatgtcattttttttttttttgagtcagagtcttgctctgttgcccagactgtagtgcagtggcacaatcttggctcactgcaacctccgcctcccaggttcaagcatttctcttgcctcagcctcctgagtagctgggaccacaggcatgctccaccacacccggctaatttttgtatatgtatttttagtaaagacgaggtgtcactgtgttggccaggctggtctcaaactcctggcctcaagtgatccacccatctgtgcctcccaaagttctaggattacagatgtgagccaccgtgcccagccccagtctcattttggaaatagagcagagacagatggaaaactgttagcccttggtgatgttattgagcagtgttatctgtgggtttccagatgtgttaatatatgtattttcttattaagtcctttgcattgaaatggtggtgcatggactggcagcattagcattacctatgagtttgttggaaatgaggaattttagactgtaccctagttcaattgaatcaaaatccattttaataggatccccagataagtcatatgcacacaaaagctggagaagtattattttacaccactttgagttggatttttatttactcgcaactggatgcatcctgatatgacattctggagttgttgtttgttttcttgtttgtttttcctgaagaggtacaaccttctccaggcatgctattgtgaatattggaggggtgccatttctgattataatagaaacagcatttgttgagtcatgatacagtttaaatagttctcattatactttgatatgatttttttcatttttttaaatggttatttttagatgaaacctaaaactgtactctttactacttgtggtaaaaaagaccctaccgttatttttggcaagtcaggagatgtaaccttagctgtgctggttaaaagccagctttgagagttgcattttacctcccttagaattactccttcccattctttcctcagctccattcctatttcaactagatagttttgtactggacctgtgttccagaaccattactgtctggggagcgactcttataaactactgccttttagaccagatgtgtgtttcagttacatgaatagagaaaagaatgtcatccccctgctatagctgtgtatatgatagcatgaagaaattaaatccaccagcaatctaggaattttcagaaaatttattttcttctactctttatacaaagccaggtgccacattccataaaaagcaaagcatattttaaaattgtacttcttgtttgtccatttatttagagggcttaattagtctgtagccagatattttggatgattcaattcacaaattagattatcgttctgtaattaactgagaatgatctctctgtggtgtgctttatagtgagaattaccaaaggtctgtattcactcggaaaggtcttagttttaaaagcagtctttttaaaggaaatgtagctatgctcattgattttgttattgttgtcctttgagtttttatggtacactaggcattatgctaggtatatgaaaatatgtctctaatccctgttttagacatgataacattgaggctagagagattatgtaacatgcagaaaattgtatagttatatgaacccacggctggtgctcccaaaactcattcatccccttgaggagttcagattctactgattgggagagaaagagctcactgtaatagaatgcaaaatgtagtaaaaattttaaatgaagtaaa

SEQ ID NO: 76208 - DNA, 1497 bp, Homo sapiens
agtaaaatatggagtcaccaatgtgcatgttcccatctgaagctgaataaggtgatatctaccttcttgtttcagctgtcatattgtaaacaagtgttctttttgtcggggatgccacctcttccaaaacacatggtctgagagtgtggaggaatagttttccaaaagaaatagggtatatcaaatactacatgttctcacttctaagtgagagctaaacatcgggtattcatggacataaagatgggagcagtagacactggggaccattacagggggaagttagagggtgggcaagggttgaaaaactaactactgggtgccatgctcactatctgcatgatgggattatttgtattctaaacctcagcatcacgcaatatacccttgtaacaaacctgtgcatttatacccccaaatctaaaacaaaagttgaaattatgttttataaaagaaatggggtatgtttatcagaagaagggggggattaggtgtcagtcagaaacaactgtctactgtaatacctgagtaagcttttattggatagatttgaattggtgaatgaataaattgggtcttggagaaaggaaagggcttgaatgagttctttcagaataggccttttcttttctcaaaagtaccagcaatagcttcccattttttcagaactgatacctctagctttattggcttttatcatctttgctggagggaaatgacgttgggttaagtattgagtgtgaaggaagatagcatgaggatcttgtttgcctgcagctttattcctgcctgctagacctactgccctttaaagacacttgaaagggcttgccccagctttcctcttgactttagggggcaaaagtatgtcattcttatataagagttggatttataagattgtatatcaaattacatactcaagagttggattttgtttgttagtattgtctaaagttacaacatgtaaatagtctgtgtccttactttctaagcctgccattacaaaaagaaaataatatttcctattagagcctgaagcttttttcctccctagctcttatttagggagaatatataatttaagtgtttgaataggaatagaggaagtagccaaacacttttcaatagtccagctaaaatacacaatagcacatgtttaaagtacatctttggaagaaagatttgaagatccttgataagataatatatcatgtaccacaaaggcatgccctgctaagtaaaagtgggaagaagcagtacatattctattagggggtcagaaatctttaaatagaagtttctctggcaatctggttcccagatagatagttgaaggctcaaagaaatttccaagcttgctagaaatttccatctgctggcttttgtgttgagttaaatgccatcatattttattgcctcatacatttgcattaacactttccctttaaatttacttaaagtattttttgttttgtttcatttttgttttttttt

SEQ ID NO: 76209 - DNA, 1147 bp, Homo sapiens
cccaactggtgccactctctctgtggaatttgcacattctccccatgtttgcatgggttttctcctggtacttcagtttcctcccctgtcccaaagatgtgtgcattgggtgaattagcgtggcccctgtttgagtgtttatgggtgtgtgtgtgttagtgtgctctgcgatgggatggcatcccctccgtggtcagttcctgccgtgtgctctgactaccaggataggctttgctttcagaaatctccagataattagcttcatatatttctgtgttcaggtgctttcagtttctgcagctcagcaagcgtccagctttggatcaagttgccagtgtgtccttcttgcagatatcttcaccttgcaatctgtatgaccaattattttgaagtgccaacttaatgaatgacccttcgtggtgccagactcctaagctctcccttgccttctcttagttctctctttggtagagttggttgaatgcaccagtgagtttgttacttctcagcaaaccttgggggagatatctgaacctaattgttggtgttctcccttagatttgggctttattgcctcttgctgtcagctttgggccctagttactgattctggaaaaagtggaaaaataccccttaacatcttgttagattatgaataggtaagtttaggaaatattattgcaggtagaagaaaacctaacaggtttttattttctaatgtttaaagagacatttaagtaaaagatctcaatggaattatacctttctttttgttgttgttgttgcagatagtatgtacttaatttttttttttttttaaatttcaataggtttttcaggaagaggtggtgtttggttacatggataagttccttagtggttatttctgagattttggtgcacccatcacccaagcagtgtacactgtacccaatatgtagtcttttttttttttttttctttttgagatagagtcttgctctgtcgcgcggcctggagtgcagtggcatgatctgggctcactacaacctccacctcccgggttcaagcgattctcctgcctcagcctcccaagtagctgggattataggcgcctgccaccacgcctggctaatttttgtatttttagtagagacgaggtttcgcc

SEQ ID NO: 76210 - DNA, 1529 bp, Homo sapiens
ctacttagcaaagcaattgcctgtgagagcagctggtggcagtctttaagatgcagatttcaaataggagagaaaggaagagataaagataaaaagagaggaaagaagtgggagggcaagagaagagaaaaggagaaagtaaacaggcgtactgtgaaggaagtagtaaaatgccatcagtaattagctcaggaaagtggtatttatggcatttgttgcttaccattgtttcatttctttatttatttgacacgtatttaatgggaattaggaattctggctgaggatacgagatgctgtttctaccctcagagagttgatagctaaagggagtttaaaatatctcaacttaaaatcttgacccccttcctgtagagtatgttaaataatacatgaaataataccttttatttttagttttatttgtttcgtattctctatttcattcccctatcagagaaaagagtttctggagtactctagttgacatactttgaaaattagccccttgagggcagggagtgtatattattgaggaatctggagcatgttgttccatccctgactcttattgatgggggggaatgtccatacgttgaacgaatggtaggatcagatgagaaacctcagcaaggtgtctcctggttatagtctacagccttcctggctctttgtagaatttaggcttctgactttgaatgctttcctgacagcaccatactctcctctgctatatagcacactatcatattgcctgtttacgaggcatttgtgtttctccacagtgatgaattcttttatggtagggtctgtttctaatttaatttatttatgtagtttcagtgtttagcaggtggtgagtgctcaataaattttggttaaatgaatgaataaatctgactaattatagtgtacttggtataagataaatttgtataggaatccttttggagagagttaatttttggatatgccagaaagaccatcctttaagattttttttacatatgtgaggatgattaggcaattactttgagtgtaagatatggtgcactttcaaagataaccagaagatataccagttgtatgctagagatggatttgtagtgccaattctacaaatacaactcttaaaaaagtttttttttcagagacagtcttgctctcttgcccaaatgggagttcaatggctcgattatagctcactgcagctttcacctcctggggttgggtgattttcctgcctcagcatcccatgtagctaggactacaggcacataccatcaggccatgctgattttaaaatttttttgtagagatggggatcttgctgtgttgcccaggctagttataaatccctggcctcaagggatcctcctgctttggcctcccaaagtgttgggattagaagtgtgagccactgcccctggccaactcttttaaattttaaagtggattctgttgcgttgtcttagataagtagcccagctgcagtcttcttgtttcttttttctaaaataataggcact

SEQ ID NO: 76211 - DNA, 4248 bp, Homo sapiens
agatataatttacataccatacaattcacccttttaaggtacacaatatagggttctttttttagcatattgacagattgtgcaacgatcaccacagtctaattccaaaacatttcaccaccccaagaagaaaccctgtacccagtagcagccactctctcactctgcatttccaccttccccaagcccttggaaatctctatttgctatctctatagatttgcctgttatggacatttcatgaaagtggagtcatataatgtgtgttcttttgtgactggcttctttcatatagcataaagttttcaaaattagtgttgcagcatgttatcagtattcttcattccttttcattgccaaataatatactgttgtatagatagaactcattttgtttatccatttatcagttgatggacatttggtttattttcacattttgggtattatgaataatgcagtaataagcatccatgtacaagcttttgtttggacatatgtttttatttctcttggttatatccccaggagtagaattgctggatcatatggcagctctgtgtttaataatttgaggaactgtgaagccacttttccaaagtcctaccagcagcgagctagggttccagtttctccacatcctcactaatacttgtcatctttttcttaaaaattacaataatccttgtagtgcttgtgaagtggttatgtcattgtggtttttgtttgcattttctaatggctgatgatgttgagaattttcaagtgtttattgaccatttgtatatctcttttggagaaagtctatttaaatctcttgcccagttgtaattgggttgtctttttattattgtattttaaagtgctcattttatatgttggatacaagacccttaatagatatttgattttcaaatattttctcccattctgtccttttactttcttgatggtcttacttgtagcagaaatatgttatatacacatatatgtaaatgtaatatttatagcataatgaaataaagtagtttagaaggatttgcagtagggtgccatgaaggggataacagttgtcttttattgaaattcaaagctgagccctaaatccatatgtaatacaattatgggaagccaaaaaagaacagaagctgctcagagtgaaacataatgtcctacagcacatgacacaccttcttcctgtctttgtgatatcccagttacaagctagttagagaaatgatagggattggggtagtgagaaaagaatagttgtttcctttggtgtctcaggtaagatatactgttagagatatagctagaaataaaaccaaccggttctagcagagatgacgataattctacttttgtcaaatcaccaccagagaaatctcctctcagttgattaacatcatgtgccgcaggctgtttctttcttttactctaggtatagtgggagtaacccattggcaagaaaaactcatatttaggtggtaaggggaaggcaggtagagaaaatgaagtgtgtctttgacacagtatgaatggaggtgctccccattaggaattgagcaggtagactgtgttgatgaacatagagtaacacgctgggatggttgtggccacttgtctgtctcattggtccatctctcccagtattccatttgaaatccttcttcagccccttaccacagcttcaggttgatattgaaatacaatggtaatagtgagggtattttaaaagtggactttaaagctgagttacattaagaaatgggcatatctggcaagttacaggcacaggtaagtaacttttttttttctttttttgcattaggggtttgaaatagtgcaccgatggccttctgagaaaggtgtctaccttctcaaggtttttctatagaatgacttatcaaaatccatatggattcttgaccgaggcttttcagctggattatgtgaaaagctgtggattttgtaaagaagcctggcatgtgctccagtgtgtttcagtttttaaattttcattttttacagtgtgagaactaattccagactaataacatttatgtgaatagttctctaagctttgcttcctaaagtgtaactgttaagccttctggaataacaatgcagttctcccttcagaaagattctttatgttgatgtcttgtgactggcttaaattcttcaggcactttctctcctggttcctctccacacccagagagagattttagataatcttgtgcattgagcagaatcaagagatgagtcaggaaagttttctaacaaataatacttttgacggagccatacaacttaatttcgattttgaagtgacagtaattgtcagtattgctccttcaagtggagggactaatttgtaatcatgagcatattgcataatggcgacataattgagggcgtaggcctatcctttagaacatagcccccaagagaattgtgttccatacataatataaagatatgttaaggtggttgtgaaactccttgctgtgaaatagtaggggcttctcagtcattttgtgtatagtttgctttgtagatgatgctgtatttcagtagaaaacagttgatgtctcaatgtcatattggcatctgtggttgagaatagctcaaatactattgaattaaacttgtgtgcgtgacagtgtgcttgcccagacggactccttagcactgtatgactcttgagaaaatggtctcacttgacaatttcattgctacctaagatttttatttagtggctgaggaagtgaagtagtgacttatactgatttgccatctagggagataattggtaaacttgggcctgagaaaggaagagatctgttatgtaagaaaaatactgatcaaaagaacaatatttgttgttgttgttgaccagctctgactgtgaaacatttaaagtgtctgggctctaatttgagagactagttgaaaaataatcatttgacatttagcactctgctaggtaccgggaaattagagcaagtaagaaataatttcatatcttgaggtacttatattagggggaagacagacatacaggcagatatttttttctgatatattagataaaggctttactcttccccgcccctgcccccctccatgtggaaacacatacaaacaggagcaaaaaagggaataccaaattcattttaaatacatgtagatacccaatatgtaatatgtgtcatcttactctaggatgtgagctttaaaaaggtggaagccaaattgtgcatgcttttgtatagatccttgcataaactagatagtatatagaaaattgacagtagtaagtgaaatgcttgattccttttaagaaagaaaattccaagagttatgttaagaacttctttaaaaaaaggcaagagtgaaaaaaatgcacaattcagaatagtgatgatcattgcagggaggcaggtagatggctttcggtaggggcccatgtatagcttcactgggattgtgtttttagttagcttgggctgctgtagcaaattaccatagattaggtagctcaaataacaaacatttatttctcacagttctgaaggctggaagtctgagatcagggtggaagcatggttgggtgccctcttcctaattatgtcttcacatggctgttcccatcacagggactccagcttcaagacttaatcgaaccctaattacctccctaaaggccctaggtctaaataccattacattggggattagggttttaatacattaattttgggaggacacaaacatttagtccatagcagattggaaatattttaattcataaattaggtgctgggttcattaggtatatattctgtaattatgcctcataacatacattatatatatataaaaaaataaaaagtatatatataaaactgtaacatttgatagatgcatatatatatatatatatatatatatatatatttttttttttttttttttttttttttttttttttttgagatggaatctcactctgttgcccagcctggagtgcaatggcgtgatctcagctcactgcaacctctgcctcccaggttcaagctattctcgtgtctcagcctcccaagtagctgggatcacaggtgcctgccactgcacctggctaatttttgtatttttagtagagatggggtttcgccatgttggtcaggttggtcttgaactcctgacctcaggtgatccaccacctgccttggcctc

SEQ ID NO: 76212 - DNA, 1021 bp, Homo sapiens
cagccttcccagtctgaatttcttaaaagcttttgcttaggttaagttgtgggagaaaaactgaactcacccagctagccaaactatctctctgttgtctttccactttatccatctattttttactttttttggaaacacaataacaatagtgtagaagtcttttcacattgcctgactctcctgtttgtgtcccataaggttccatgtactctgtccagaactcagcttattatgtcaaaggattctgtctggactggtcagtcagagatataagttctcattacctcagtgtgtgtgtttgtatctgtatttaatgatgtttgtgcttggcttaggctggggattttgaaatctttgcagagtttcccaatttgttgggcagttttagaaatgatagtatcagtaggaaaaaaaaaacacagaaaaatacaatttcttctttcatctatgtcccatattatacaaatgttcgctgaaagcaccaattttctgggaaaggttttgactcagacttttttcaccctttacctctactctccaattcatgtttccttcttacaacgtggtcatatgcttgcccaggcctggcttatgaaccgtgcagaatatttgtggggtttgttttttaagccctaaactgtgcacatgatgcagtatttaatttggaatgagctcttagtttagtcacatgtgcttcttgtggtgtttatcttggaatccacaagtaggagggaagtatttttgcattttatacatctggacattgttcatggtccttctgtaacttgggaattctgtgtgaggcaaaatccaaaaaaacagcattaaaaataacacggagttatgatgacatctgagtcaaaacccttgagaatacccttctgatcccagcagagtttgtttttgaggtggtgaactttttcaattgtgtgtggttcactgctggcctgaggagaatgctgggattataaggttacctgacacccttgcatgtagactaatgggtttccagacattc

SEQ ID NO: 76213 - DNA, 2487 bp, Homo sapiens
agtctattgcagatttggcatagggggaagattttgctttttggcttagggggaggattttgctctaattttgcatggggtaaaataggtaaagtgaattctgctcactgttgctatgcctctgccacaagcattctaagagacctgtgagactgtccctatttctctcttaaacttgcctaattacagccagcttagagctaaagttgactctgagaatgcctcgggctctgtgtcaggactgggggtttagtaaccttatccttcccctgatttcacatgagaagttgttttaaacaggattggacatagagatatagcacagtacctcctccttttggctaggggtctgctaaagtggaaaaagtgggaaaggatgtacagaaactcctgctctttgagtgagtttgcatatggacagtattgctttttggccccagcctagttttctttcattcccatgtctcatcttttatgcagctgcagagagcaggctgggaaagcagaatgaaagcttcaaacagatttgcacttgaataaaagaaagagtgatttctcttgttcagagtacagaccagtttgggtagaaaactgtttgcttttttactttctgggtaaggactgtttgcttttctctctttaaatgtagtaaagagaggaaaagctaataaagtagttggacctgctggttataattcatagagaattttcaagtgtgtttaataaagtctctcatataattataacagaaataagtaattggaggggaaaggttaaaatcctgtagaggtttaagaatcagttaaatatgaggcagtgtgcttggatgagacaactaactaggagctgcttctctttgctgatttctctgaactttccttttgagattttttcctctttactttcgtaatgcattttgcaactttcattaaaaaaatccatcaatgtttaaacttctaacaaataaacatatcctagtcctattatggaaatcacaatgtagcagagaatagcttgacttcagctagagagaggttaatgataggaaccctaaggattgataccaagatcatgcttgtttagtgttttaatgactccagaaggaaatggtgaaatctgctgatgacaccaaattgtttttgctgatccaaacaaggatttctgggaagcttcttcagagtatttggaatagtagaagaattgagaaatatggtggcagacacactgaacttaaagtgaaggtttacgtgaagtagcaggagtaacgtcaatacgttgaagttacaaagcctgccaaatcttccaaaaggaagattacggagtctatagtttcatgaaaggaagacttaagacaaagaacatttatacatatagcaaatgaaaactattatgggaatagttgcaattataaagttcagtgacttaaaaatatgatgtctgaatttctttttaaatgtcagcagtagtatatctaaataggtgttgtttctctcgaaatggtcatagaagattatatacccattttatgcatgctcctttcttggtacgttcttttgtcagttttctgtggtggcaggtctttattttgcaggctgttttgaattttgaaacagtcaactgtcacttaaagccaagtgtgataaataagatgggtggtcaaactaagtaatagatttaaatatattaaatatattaaatgaaatataaagtagtaaaacttattttcttttattgctttcaaaagtgattctaaaggacattaccaatgagaaattgcaaaaatgtttgtgtactaatagtgttagattaagttcttggttgatagatttcacaaacatcacttatttagatatgtaagttacagggcttgtactaatacacattttattatattggagacaaaccatgtttataagtgacctttttaaaatgttttctttatgctccctaaatatacacttagggaggaagaaggaggttttgaattaactggagatttccctaatgtgttgaatttttctgactaaagcctacatttttgtaaagaaaaagaccctgtgggataaaaaatacgataggcactatcacaggagctgtgggctggccatctatatccatccatctatctattattccacccatccctccatccatccatccatttatttaattaagttatttttaacggttggctctggagttgacattcatttattttaaaagaacagtgaatcatagctcttttcctcaagatgcttgcttttatttgcatggtggcatattgattaagtactcagaacactatttgacatatggtaagccctcaataaaagtttgttattattatgactgtacttctcccctctaatgtatagaggtaaacattttggttcctattgtgacacgtgggttataatgagttagggcctacttaagaagaaagtggaaagaaagcgggtaaaattgttgctcagatactagcatgtg

SEQ ID NO: 76214 - DNA, 1041 bp, Homo sapiens
agagtacgtgcctctaagaagtaaagatttttttttttttttttttttgacagagctggagaataattttaggaaaactaaatctccctgttgctatgtttgtgccagctttgtcacttggaaagtattagttgttttaagccacaaatatataaggaagttattttctttcaaaacattgccttatttatgagggttttgtttgtttgttttagctgtctttgtctctgtattttaatatttttgctcctagcttttttggccctttgttgtttcataaaaacgtggttgtaaagttaatttgaaccatatcaatatgactataatgtcatattttaaaattcagctatattttaataggccttaaaaatacaggtttacattaaagagtaacatagtgtttttgatactaccgtagtgtgtttatgtacttgatcttatttaatcttagtactaattgtatgaattttattattcacttttctaggtaaataaactatatcagagatacttagtaacttgccaagctcacatacctagtggttgaactagtagttgctgcaagagtttcgccagcatattaaagttgtattttttgagcacttactgtgtgccaggcaagctaaccactggaaatactatagtgtccaaagctgacctggaccctgcccttatggaccttacagttattagataccccacagacattttttgaaatctgctggattgagagtgggtcatgaagatgaatttgaatcattgtgattgttggataagccagagagccctttcaccaaaaagaaagtaagaatcatacctaccttgaatatattactgtattaaaatatttgttttagttgtactccctgtagccaagggaaaggcaagacctcctttggctacaatgagtaactaaactgtcttctagataagaatcaggaagagtaaggaaaatctggctatactataatgtcaaaattttccactgattaaatggtattaaaatatctaaagcaagaaggtgttagttagcagtggaag

SEQ ID NO: 76215 - DNA, 1410 bp, Homo sapiens
ttagtgataccccaaattgccaagtacccctttcatcttgggacattaattgtcaaaaatctttgaattgatttttcttcagaaagcttcactttattattttcacacaataccaagttctcatgatatttatgggtatgtgattggtgagaaaacagaccaagagttgttttttgtttgtttgttttttgtgacgaagtgttgctttgtcgcccagactggagtgcagtggcgcaatctctcctcccgggttcaagcgattctcgtgcctcagcctcccgagtagctgggattacaggcacacgccaccacgcccagctaatttttgtatttttagtagagatggggtttcgtcatgttggccaggctggtttcgaactcctgacctcagttgatccacccgcctcagcctcccaaagtgctgggattacaggcatgagctaccatgcccagcccagaccaagagttttaaattgaggtccatgattgggtttcagtaagtgtatggaatgtctaaaattatataaaattttatgtgtatgtacttagaattattctgggaagaaagtccatagtctgcacaaatttctcagtgagtttcataacccttaaaaggttaaaagtggttgtaactagactttatcaaaaggggtgttcaaaagtcactccagttcaggattgtggaaagataactgtcttctcaaataggcatcttagaggaagggctgtttgggttccttttaagaactgtaatcttgagatgtggagtgaatttgggatttgaaaatcccaaaatagagttttggaactctcagctcttagtgatatattctgttttgaaatgagggatacctttcggggaatttgaaaatacttttttctaattcaacttttaatcagataaatgattatttttgaaaaatgaaatagaaagtaataggaaagggggaaaagttgttatgtctcttcgtggaataaatagctaaagaaattaatttctaaattttaaatttcatccctggttaaaatagttcctcttttttgttgttgttgttgttgttgttttttgttttgagatggagtctcactgttacctaggctggagtgcagtggtgcaatctcggctcactgcaacctccgcctccccagttcaagcagttctctgcttcagcctctcaagtagctggggctacaggcactcgccaccatgcccagctgatttttgtatttttagtagagacatggtttcaccatcttggccaggctggtcttgaactcctgacctcgtgatccacccgcctcggcctcccaaagtgttgggattacaggtgtgagccactgcacttggccaaaagagttcttttagagaaaacaaaagtctttgatataagcaatatgatcatacaaatg

SEQ ID NO: 76216 - DNA, 2307 bp, Homo sapiens
gacatcgtacaggagtgtggttggtggtaccttaatagtaatatcaaagattgctgatcacagatcatcataacaggtatgacaataatgaaaaagtttgaaatattgtgagaataagcaaaatgtgacacggacatgaaatgagcacatgctattggaaaaatggcagttatagacttgctcagtgcatggttgccacaaaccctgaatgtgtaaaagaccacaatatatgtgaagtacaggtgaggtatgcctgtacgtagttggtgcctgtagttttgtatccattgaaatatactgtcactcattgggtctgcaattgggtgtaataataatatcattttattgttaatgggctttgagtcttcctctttcttctgtgatagtttgccattgtcaagttaaatttttatgagctttttcagagcagaaattaaacattaaatggtttattaaccaaaataaggcaactgcctttagactttaatgtagtacccattttttcctacagcttatcgtcttcccagtttaaaaggcttaagcagaagagtaacagtatagttaaaagtttttaagttacaaagttggaacttgcctttttttgattatatgatcccaagagtcacaagagagtaggcagaaagattactgctttatcaataggtgaaagttcaggtttatctgaatttagaatattaaattgtactttaaccataccacatgtttttataacatataaatcataactgacttcatactattctgttattttatgaggtgatctgatgtggctgcaaagttgttaaagttaaccttgaagaaacctcctatggcttagtgtttatttgcaaaatcaatcacattttttcttctgccttattagactgatgaaatcattttctagcatatggaaacattcctggacctcctgttattttgcgtaaataaccccatgtgactcacaaatgttgaaaaagcagtagatatttccaaatgctattagaaccatcaaactaatacaaaaaattcttcggtgggacaaatgaagaccagaatgaagtctaagtcactgtttccagtgaagattagtcactttttccactctaattccagaatttctttaatttttcttgcttatgttagcaacagtattgtcacaaaagattcaacagtcatctcctcaggtaaccaattgttacacaaaccatatgtagaaaatgctcactggcttcatttatagaaaaaaaaaaagataactggaagttagaaacagttgtccaaacttttgaactataataagctattttgaagtgtcattgtcaatacaaagtacataccagtgtgagattttaagcagtaataaaatctatgtgtggaagagtaaatgaagcgtttctgcaatattaatgaacggacagatatatgggaagaagtgatattaaaccttgccatacactctgacaatgtacatgaacagagccagtttgcttgtaaagattagtaacatatcattgcaatagatgtgcatcctgtggtctaaacttattcctaaatgacatcttgaagtttggcctgtccaaaaacatcttttgaggaaggacagatgctatagctgctttcttcaaggaaaaaaaaaaaagtaagtgacatcacaccttgttttaaacttaatgaagtgaagtaaggatgtcctctgaaaaactggccggaagtaggagtagtaggagggggaggaaaaggagaaggaagagggaaagaagctctttaagaaatagaactagttgaaaatattagtatctaatattgtcaggaacatgacatataagagattattggcagagtgcaacttcagaactcttagaggattctaaaagcaaaggaaaaaagttttttagtttagtttagtttagtttttttgttttttttttaataaatgcttactacttctgaatcagacattctttggcatcttaaactgaatgcctgtaattacattagctgttttgtgagacttacatatattctagtcctgtctagtacagaacactatgctaagcattgcagaaagagcaaaatggatattacttctgtcctcagagaacttatctaggaagaggtagaatataaatattcaaacatctatagaaaaagcagaatcaaccatctaagaggactgtgtagacaagacagatctaatccttttattaacataagtgcttcatgaaggaagtagatgtgaactggacattatggtgtgtgttgaatttggacagattaagatgggattggggtaggagttaggctttt

SEQ ID NO: 76217 - DNA, 1122 bp, Homo sapiens
taagagtcagtattccctttcagtttaactgaatgttaaatgttttaaaatgttaagtatctggccgggtgtggtggctcacgcctgtaatcccagtagtttgggaggctgaggtgggtgaatcacttgaggtcaggagtttgaggccagcctggccaacatccctactaaaaatacaaaaattagccaagtatggtggcggccacctgtaatcccagcttcttgagtggctcaggcaggagaatcgcttgaacctgggaggtagagattgcagtgagccagatcatgccaatgtaccccagcctgggcgacagagcgactccgtctaaaatgaaatgaaatgaaataaaataaaataaaataaaatgttatgtgtctactatctataagatgatgatgagcaagataaaattccttttctcgaaaagtatgtaatctgttaagagacatttcacgtaggaaatttgaattatttcagtaaactatactttaaagggcaatcaatatattaaacaatataatcaaaccaagtcatgcataatatcttatattcctattgtaactaagagttgcactgtccaatatgttaaccactaactgtatgtggctattaaaatgaatgaaaaataaaattgaaaatttagtttcactagttacatttcaagcattcagtagctacatgtgattagtggctagtgtagtggacagcatagatagtgagcatttccattattgtagaaacttctgttgggtagtgcagctctagagctatagaacatattttaattgttttggacaggcttgtccttcatctcttcaacaaaccttcattaaatgcctaccatatgccaggtgttgtgatagagtgagatgataaagtcctagttcctccttacacaaacctttcaatcttgtgggacatcaagtcagtgaatgggtgaataagatagaatgtgataagcatcactataagaggagagatacaagaggatgtgaaaatacacaaggaaaagtacagaagcaacacttaaggtttccttttgtagaaaggtgagtaggtgttggcatggttaagttggagataaagcagaatccaactgcaggaaatgcttggatgtgaaa

SEQ ID NO: 76218 - DNA, 1143 bp, Homo sapiens
atagcaacaattcaatcagaactgtctcaaatgtaaagtagtttaaaagtaatgttaatctattctttgtggttttgatcatttttcttaaagttagagggactttttcacaattaatgtttcttgagtgaagaaacatttgtctaagatttaaaatttcttcagtttcatttcggcttctgttaattgcaggtaaaattagaattgatattttttatttttaactgtgaatataatctcatcccagaaagaatacatttatttctgtccatccattatctatgtgtatatgtgtatccatgtgtatagaattgatattttttatttttaactgtgactataatctcatcccagaaagaatacatttatttctgtgcattcattatctatgtgtatattccagttgtctggaataatgtcactaattgctaatctaatacctaatatttctcaatggtgagattttggatgatttaatgcatcttttctgtgtattttttgtagtatttgaatttatataatgagaatattttaaagaaagtgatacaatgaatttattgctctgaaaaatgaataaatacttacgcagttttatagcctcatttcttttttaacttatcttgaccccttttctcttaccatcattttaaatagttgcacagtattttatggatgtgttaatatatttcttctttcattcctgatctcagtttcttcatctgtaatgacagagctgaactagattagccggttgcaatctttctctttaaactatgaaatccttccaagaaataaacagtttataactcttggcttaggcatttcccatagaatgtagtttcaaagctgtacagattagataatttctgaggcttatttcattttaccaccaaaaattagggtttttcttttttttaggatttttttgagtgactttttcatgtgtttaaaaaaaatcggtaacagacataatcttatgaatcagaattttaaagtgaaagggactttgaaaaccatctagtatatttgcctaacttttatacatagggaaaccaaatttaagtttttaaactaacgtcatacagccaactgaaatgaatgagacttgagtgcacatctcctgactttctatgctgttctttt

SEQ ID NO: 76219 - DNA, 2471 bp, Homo sapiens
cacataaatatatatacatatatatttatacaatgatgggcaaacaagatgacaattttattgtactcatgtcacatttaaaccatcatgtaaatgtcaggaaatatgcttaatttatagtgtatttattttcttgttcatgaaaagagatcagtactgcagccattattgaactcctagagttagaaaggaaagtgagtgggattctggcgagaaagaaagcatttacttgtcaaagatttggaatttactgtggttaccaaaattaaaataaaactaaaacttgacttggcagaagattaaaaacaaagcagctccaaagtgtgtgcacatcatggagaagatgccattattccttcaggcagccaaaggggaagggaatattgtttctttgcgttgctggagctgatttatttagttatgatttcaacatgcctacagggcacaccccagaaaacattacacaacaacattaaccagaacaaatggtgctttctttttctgtatctcctcctaaggttttttaacagcagtgaggttttttctttttctttttttttcccccatattgttaaaatggctctgattatgtttgactattgggtgtggcaggttttagaatgttaagtggtagtacaggttcctgaacaagaaagagaattagagttgatgtgacttgattattggaatgtgtagaatgtaaagttgtgagacatacgacggtctaccgcaggttgctcttagtaatggaccttcttgttaaaagccctgttattattgggaatttattttggaaactactaaagaagaaatttgacagaaaagtaaaacaaaccaccttgtctcatatttcctttctacacaggcactttgaagagatatcttaaatattgtcaagtctcaattatcctggcacacgttagcattatcaccattctcacaaacttgaattaaatgcacatggtattgcagcaggtgcagcacagagaaaattggcaaacaagatccttatccttttggagctcagtaagggttgctatcctagtaagtagttcaaccaatcccaaactaatttttccggatactctccaaacaccctccctcccttcctatatcctctgtcttcattagtggcctctccatcctctcagctggaaacctcacattcatcttgagtctttatgttcccttggtcttcacaaccaatctgtcaacaagtcctgtttcttctatcactaaaattgctttttgactttgtttgtactcttccctccattctcctagccattgccctgtttaggcccttttcatcttccatttcagttcttggagagctgcttatctacttttaacctttccattttctaatccatcctccatactcttgtcaaatctctttctttaaagacagttctaatcatatcactctctggtttaaaaacctttgatgggtccccattaacacataagggataaagtctaaactccttagcttgtcatgccagggtttcagagtctggctctgatctacttattctcatctcattacctgccataatttcccccttaccgtatttcccattgccagacgcacacacacatgtacatttactccattcccacaagcttcctcataattccctgagcttgctatgtaattgtgcttttgatcatgcctttccttgccccatatacacagaacactcttccctgacaaactcttgcttgtatagaggaactgaggaagccaagattttacaaagagtactcttgacaaaagaaataaaccacgtgcatagaccaagcagtagggccaccgttagagcagagttcagactagtggctgccgactagtttctcttgggcaaaccaggaagaaggactcaatcccagaaggtactggcattatagcagtgattaaattggtttgcaatagtattaaatgaatgcctccttcctatttatacagccaagagttagcatttacttttatagctaaaggatagagggaaatagctacagtaggtttctggcatagtagttaatttcaagaattaaaagaaaactcattacccttatctacctactactcctaccttatctcatgttccaaaggtgtaaagaatgattaggaactcacaggaccacgagccttcacactcacattggtgctttttaaaaatcaccaggatagagccagagatgatgggtttaaggggtaaattgaaagagggaaatagcagctctttacctcaagttactgaggaagcagaggcctttttcatgctctgcctagtcatgcttctccctaaccattgcatctttctgctcaacctttgtcctttttatccacatatgattcttttaaaaaattagttcttactatataagtattgtattaacatagtatcttcaaaacatgtggaatgtttgtaaaggcttctctgacattctctcaccaccatcatccc

SEQ ID NO: 76220 - DNA, 3069 bp, Homo sapiens
gcttccacattttcaggtatctttaaagcaacgccctactccaatggtaccaatttactgtattagtctgttttcatgcagctgataaagacatacctgagactgggaagaaaaagaggtttaattggacttacagttccacttgactggggaggcctgagaatcatggtgggaggtgaaaggcacttcttacaaggtggtggcaagagaaaaaaatgagaggatgcaaaagtggaagcccctgataaaaccatcagatctcatgagacttattcactatcacgagaacagtatgggggaaactgcccccatgattcaaaccatctcccactgggtctctcccacaacgtgtaggaattatgggagtacaattcaagatgagatttgggtggggacacagaaccaaaccatatcagtaagcaagtactggttctgattaaatgcaaaaaatgttgcaattgttggtttcaggaggagtgttatccttaaaaattagactgtcttagaaacacttgttggacccagttcaaaggacttcactagcattaacactctctctcctttctttctccttaacccacttctacccaattactgacattgatgggagttaaatgtaaccaggactctttgtttatatatacatctggttttccctgttccgtatgcctaaatcctccctccattgcttctgtttagcatttaatgtaaatttccaaattaattcaagaagaaaatttgaaatatataagatgagggcattaggtgatctctgagggcttttacagctctaggattctattaggttattaataatttatttccagaggatacattctgataaactaagaagttttctgtgcttgatttagcttttacttaattaggaatataaataactaaatatttaaatagataaaacttatgctatttgtcactttttcttgaagcatatttataatgatcatttaatgttcaaagtaaacctccaaaaggacttggtaactgccaaatattaccaccaaactgtagactaatcaattagaccactagtatttgaatttttttcttttactatataaaactaagaaacgtggactgaatcaaagtgaatgggagctttggataaaatattggtaagatgtttgcacttactgtctgcttttgaatgttcagatatttaagaggtaccatcatataccacgaacaaaaggttgggagtcaggaatcagggaattagtcctagctcatcactgtctcattttgtgattgcaggtcatgctttgctcttaaattttcccatctttagcatgtagtagattatttctgacccttaacttacccagggatgttttgtgaaataataaagataaccactgccagttattttttgctgctcagtaaagattctacacaaattaatggtagcagtagggtggttatttcattatttaagaaagttcttcaaagtgagagaactacccagcataggtcatttggaattgctgtttatttgttcttttaggccagcaaaagtgttctatgttaggtagaacagtgctaaaaacttacataaaagcaaaggttttgtaagttgtaggagccagtccttggtggatctagttctttccaactcttgtttttagtcatctgcttttataaaagtgagtggtcttaccttttagttgttttttttttcctaaggtagatttttatttttatgtttattcatatattctgtatgagttctgtcatcttgataaaccttggaatagaaagtcatatgtaaaatttgccactttacttgaattctaacactttttgtgatgttaacctgttagattctcattctaaattccacttctcaccttcttgtgattggttgctgtttgttaggaaaacatgtaacagattcttaccctctttgaaaaatcactgttgttctttttgttgatgcagaacagcagtaattttttctctttaaaggaaaaataatttagacaaaggagatacttgagaaaagagtttaaagaaatttactgttttctcagtgtacttcttttcaaaatgatgtcaccccaagtgttataattctttcaaagcttagtgtccaactggtgaacaaaactaacagttgattgcctcaagttcagcagtgtttgctgtatattttctacatctgtggactattctgttatgacataaaagctattaaagattataatttttaaactatatatttcactaagtatttataaacacgtatgaaactcgttctaagtataacctgtactgaaatgaactgttcatgtttatgactcagtaggtaaattgctctggagtgcttcagaccaggctcagctgaagcaaagcattttgaattgatattgttaggaaaggttttttttccttattcaacggttacatgcgaattttaaaagatttcttgtgtttggttagttctaaatttaaatttgttatacttcttatactagtagaatgtttcctttctatctgcagatttgagagttggtcttggaatatggctttgcagattaaaaaaaggttacttttaaaattcctcttaaactttataattcaaatcagtcaagtaaccaagaagagaaattagagaggataccattgacttgctttgtatctgttgttcttcctttccttctctgcaaaggtaaactgaattgcagctttgtacttagaagtaaattactattaaaataaagacagtttaatagtattttagaaaatgtggaaaatggaaagatgggaatgaactataaaagatagaatttgagctgagtcttgaagaatacattgttcttgatgtattccagacttccccttagacgttttttattctttgtgactgttgtgtgttatgtgactacttaggtcatcctccctcagggggaatagttggacgtttattctccaactactatgtaagcaccatcttaatatttgcccttggatgagtcacatcactctgctttgccttaatttctccatctgtaaaatgataatggctatataattttagatttattgagt

SEQ ID NO: 76221 - DNA, 1909 bp, Homo sapiens
atagcaggcagaagacagatgagtagctagttctctttatttagaaaaaaattctgtctccttgacaccaatattgttaaataagatatgatttctaaaaagccattttccctgtttatttgacatgattggcagctctactatctgaacacctaagaagtttaagtttcttaggtgtggttttagagtcttaggaaagctgggaagggcctagactttagaggcgacaggcttatggtgtgtcctggagtgttacacaaggaagaattattagggccaggtgcctttcatgtctatgtctgccaaagtaaaaaatgcagaggcaagagtttgtctcagcaatagtttcatacattatctacacagagaaaagtgactatttaatactggcaagaattcaaatactttctatgtaatcaatatcaaaagagggtaagtttgttttttgattggttatcaagttgatatacagtcctattgctgtggtctgcttaacctgtaattatcagagaaatcttgtcaaacaagattttctgaaatgaagcctgttaattatatcagatcctttggttttatgtggaactattatcatgtcatgaattgggaaccgtttgaacaaaatactgatttggaaaactctttatctcaaattttgcttgaaacccatgacatctaatggaaagggcatggtgagaggcaacactaaatttctaagctgaactcttttcctaaacatccctcagtgatcattctcttgtatgagtagatcccaacaagggtagggattggttagtttcagggcatcttatctaaacattcgtctaggggcaggtctatgctggttagacacatagaaatcaaaattatcaacacagtgatgacaatgtaattggccatatctatcagcaacttataatcaaccatatctaaggctgctgaaaggtacaccctggtaaaaattctggctctacctttgactttcattactgaccctaaggattttggactgaagtctgtaagtgagcttgaattcaacctggaatctgctttgaccttgtaggtaaatagtgtgcaaagttaggaaattagaacaaaataaaatttactttacagctaggataaattgtgataaaatgagaaattggcagcaagaagttttagtgaataggaccctcaaaggaaacttaaacaatgttgaagtgatgtttgctgccatcagacagcacacacacacaaaaaactatgtctaaactgttaaagtggattttatgtaaattgttcatgataaacatttgcattatatattcctattcctttgtacttcccatttgatgaagttttcaaactgtggtttgctggaggggaaaaagaaaacccaaatccaaaccacataggacaaattgaattacaaacctggtgtggtcccttaactcaattacatctaatttgtgttattttagtcatcctgggtggcagctgttctgagtaaatgcccacaaacattttcaatgtaagaatttgtcctgattacagctctttaagatcagtagtagcctatttatattttaagtggcaaagttttagattaatttggtgtatcaggaccattttaaaaattcaaaatttagttgtttcacaaatagacatttaaaaagcaagcatccaatgtttattttaaatgttaatttttgtaacttcacctcattttcttatttcttatgtttctacttatgtttcttctaaacatagccacttaattactttattcaggcatttatcaacttgcatatacaagggaatatggaattttagattcagataaatgctttgacattccaagtcaaaatttgagatgatctgggaagaaaaacatgaaataatatgggttcaggattgttcagttcaatat

SEQ ID NO: 76222 - DNA, 1062 bp, Homo sapiens
tactacagtacatgagacttatacttcactagatatttaatcagttaatggtcgacccatagacttaggaatataaattgtttaaatttgaggtgtttatcagttgtgtacactttttccctactcattctctttttatggaaaaaacaatttggtaatcaattatgatatgtattttcttgtatatctcttataatttttaattagttgtgaactgtatcaactttaataacattttaaaagatgttcatcatcctatattcctcttttatatgtgatactgactactaatctactatttatttttgaaattatttttggtcttcagtggtagtgtgctttttttggtttctctcccacttttggagagttgatatctgctttgctggcttcacatctgtattagttatcaattgccataacaaattaccctaaaacttagccgctttaaacaatgaacatttattacctaatggtttctgtgggctagtaatatcgtatctgtcttattcacatgtgaatgatgaacattcagacatccgataaatattattgaatggtgcacaaatgaatgctgttattcaagttgaggttcttatcacttagcacctaatgggctccaccatcttctttgctggcttccaatccttacccccatgctgtttgtaaaaccaccctttcaaaagaaatttatgctgctgcttcccttattaataaccagttgtgactctcattggcctaatcaaatttctgttggtctccttggcattcaaagccttccataaaccagccttatcatatttattcaaccataaaccttaacagatatacctattttacttaaactggttgtttatactttagacctgttaaaagacaatccttaaccaaattaaatataactcagtttaattgagcaaatctggcggcttcttgaacccgagtagtctgagagagactccattgcagccacgtgctggaagatttatggacagaaaaaggaaagtgacgtacagaaaacaaaatagaggtacagaaacagctggattggttacagctccg

SEQ ID NO: 76223 - DNA, 1907 bp, Homo sapiens
attgacaaatgggatctaattaaactaaagagcttctgcacagcaaaagaaactaccatcagagtgaacaggcatcgtacagaatgggagaaaatttttgcaacctactcatctgacagagggctaatatccagaatctacaatgaactcaaacaaatttacaagaaaaaaacaaacaacctcatcaacaagtgggcgaaggatatgaacagacacttctcaaaagaagacatttatggagccaaaaaacacatgaaaaaatgctcatcatcactggccatcagagaaatgcaaatcaaaaccacaatgagataccatctcacaccagttagaatggcaatcattaaaaagtcaggaatcaactctagtttttaatctttgaattctcgttgcattaacactcagtaccaaacagtgcctttctttatttttaattagtttaagtgggtgaatatgtctttccaactagaattccaattttctgacagcaaaatccttttacttctcgcatctttattgtagtgtgctgtgagtgtatcctggttgattgaaaaactagaaatgttgattcacctgtatgtaaaaaatcctttttgagtgaattttaactgctagagacattcatgaggatgagctgggactgcaggacagtttggaactacattttattattttcctgaagaaacattgctgtatgaagagattaactttaaaaagttccctccggccaactatcagaattggcttttagccttgaactatcaaagcaaaactttcagtgttgcctagagcagaacaggtattaagtagcaagcaattcaaggtctctgatccctagcctgcttcagctatgggcctggccaagccctttggcaaagataagttgaataaggaatttacttttatcttctccctcttggaagttttatggatttgattcacaaagaaagggcaataattgaaattttgtgttagcttcttcttgttattcaccaagaaaagttaaagtcaggtaatgatatcaatcaaaatgtaagtacacctactgcctaaaaataacattgtggttaattgtgttccataatattcttggcatactttgcacaagccctggagaacaaagcctgagagcccatgggaaataaagctccagttctttcggccactttaaatttagttctgtgatcttgataagatatcattgtatttacattgttagtttctaccagcattcccttgtatcttcttttatggctttttctatttctgtgcctttttgttcctcttccttattttccccctaaagccataggtagaatgtttggttttagagttttataagaggagtatttgacttttccttatagcgatctcagatttcattaagtttgtgttttaggatgatttataatatcagtctatgatttgggctattatttgcacatttttggctttcctgtggctaaactactggtgtttatataaaaaagatttttttttatttatttatgcatgtaggggtttcagccaagattcctgtctttagtactggaatatttgaattagagaaattaagaaagtgaaaaaggctaaagttcttgattcttaccttttatccttatagttaatgacttataaatatatttctttgggaaaataaagaatatcaattgactgtcacctcagttaatccctccagcctctgcgttttttcctctaggtgacctgtaagggcctgctcaataaagccagtgtgatgatgttagctttgttgcatcttttagttttcttctttactcatcccacacttcccatacatatcccgcttcccttccctggtgtgtttaaaggtaaaagaagtaaagaagtgggagaagagacagtgtgaaggaggtgcagaggcagac

SEQ ID NO: 76224 - DNA, 1181 bp, Homo sapiens
atgagcatttccttctgaaaaaaggaaaagacttattgactaacttttgccacatgaaactgtataatcaacctcatttgaaagtgcacatttcatttgatggcatttgcaaattgttccttccccccaccaccagaacttgcaatgtgaaaatgcttccatatgctaaaagctagtctactaattttactgaaggagaagaaaagaaagtatggctagccattttctaaacatgaagctacagtgtgggcagatttggcaatgggagcccctcagagttcactgtaaacaactctgcaacccccaggcctcactactgttcaagatgagtgtagaaagttgtttttgccccacaaaagtaaatttttaaaaatgcaattgtaatgtgtatatagttttaaaatatctaaatgcagttaaaatatagtattaaactctgatttctaatagatttgaacattttaagtgaagaaatacttttgctttcagattctttgtgtatctcaagacattttaatagttttcaagacatttaaactgagtcttcactctgggtggtgggcccccaacccctaatgcgtggcttatagcaatagttttctccctgattttcctaatattagtcattctcccttttaacactgcgctacttggtgctactaggataatctttcataaataacattatgccttttcctgttgactgatctcatttaccctaatctcaccaatatttctcccaaatctgatttataattttctttaaggagtcttcgtagtaatcccatctggccccatttttcaacagtacttttgaaccaagcttctactattattattttcatgttgatttattaaagttttttaaaaaattgtattatgtctgttctttttttcccaagtagatatcagtgtgatggaaacactatcttctatatcttttgactggagtcttttatacttctgagtacatgatagatgttaaatatatactctgttaatacatattagcaagtttaaaatggtggctgtttgtttaagtcacataaattatcaaacaaaagagctgagtgatggtacctgcacaatgcttaatatatagtagagatgataaaataaattctactgaagtctgtacttcatctttttaaaaggtttattgcttagcttttagaattaat

SEQ ID NO: 76225 - DNA, 1565 bp, Homo sapiens
tgttttactgatggggtatagaacaaaaagttaagaaaccaccgatctaattgtcaggtctgtttccgcatttgtaaagttaggtcaaggattggactagataatttccaaggtcttttttaagcttaaatgttcatggagttaaaaaaattattttgaaatctttaagtatacagaagagttgccagtgtagtacagtcagctcccataagccattcatgtggttttatccactgttaacattttgccatatctcctccttgtcttctaatacatatatatacatattactatacttttgttctggaccatttgctagtaaattgcagaggttgcaaccctttaagctatgtagtttagtatgtgtcccttaagaacaaagacattccattataagatgttatgtaagagactcagcacaaaagaggcatatgtaacatgtaggaagagaataacagtaattgatcaagttcaatataccataatctaacatagagtccacattcaaattttgcctattgtccctttatgacctttatagcagttttttcactaatctaaggattgagggaataggaattttcttgccatgtctatttagtttcctttaatacagcagctttttagcttttccttgacttttgtgacacggacagctttgaaaagtaaaggcccaaccagaaacagtggctcatgcttgtagtcctagcactttgggaaaccaaggcggggtagatcgcttgcgttccagaccagcctgtgcaacatgatgaaaccacatctctacaaaaaaaaaaaaaattcaaaaattagcttggtgtggtggtgcgtccctgtagtcccagctacttgggaggctgaggcggcaggatggctggagctcaggaggcggaggttgtggtgagctgaggtcgtgccactgcactccagcctgggcagtagagccagaacttgtcttaaataaataaataataagaaagaaataaagaaaagtaaaggcccttaattttgtataatggctcatttgggtttgcataagtgtttccactgtaccttgatttgtgtgtgtgtgtgtgtgtgtagtttaattctgtgtgtgtatgtgcatttgggtgcacacaatgtgcacgtacgtgctatggtgctgtgtgcgcaagttgagtcctcttttccaaaatagattgtaaattccttatagacagagatgatttatcttggtaatttttattccccacacttctatgcacgtatgatacttagcctatgattcaaattaaaaatattcataagtcaaaagttcttacatatcccatgggttaaggagatgatttaaaacatacagggaagaacatatcagattaattaactctcagtgattaaggatgccagagaataccatggtaacaatagaagcattatgttttattttattgaatcttgaaggaaattggatactccaaagtataatataatatggaacatgcactgtgaatactgtactagttgacatgtgtaatttcttttcatcatttctctgtggaaaccctttgcaataacgtttgacc

SEQ ID NO: 76226 - DNA, 2407 bp, Homo sapiens
caggcatacagtgtgtaataatcacgtcatggagaatggggtatctatcccctcaagcatttatcctttgtattacaaacaatacaattacaatcttagttattttgaaatgtacaattaagttattattgagtatcgttaccctattttgctatcaagtagtaggtcttattcatttctaattattattatttttgtacccattaaccatttccacctcccgctaagtccccactacccttcccagcctctggtaaccaccattctactctctatgtccatgagttcaattgttttgattttaatggttagtacaagtaagaagtttttcattttaaagtcagcatctgaaaagatacattgtagcctttagaggctctgatttccttgaagcctgttacttatttgtaaaggtccatagtaagattgaacttactatttggaattttaaattggtagcttcaagaactcttagaagatctttttttttcctattttaatgaagaacatttaatatacaggttttcttagtattgactttcataagtattttctggggcaattactatctcagttgattatctctgaaggcctattttaactctacatttatctgaacttaactgaataactcctcattactcagcacatattttagtgaagagattcttaggagtaacggctgacattcaccatattgtggtttgtctgtgtgtatgttcctgtggataacttggcaatcgcttcctcagcgaaataacagccagtgtggttcagccaaagtttagaggaataaagtaactgaagtgggaggtttttctgtaatgccgagtgattttattcttggttctttctttttgaattgctcaggtagtgtttgccgtggtaggtattaaaaccaaaccaagcaaacaaacaaacagtaaaaacccaataacaaccaacaaacaggaaataccaggtaattcagattatctagttatgtgccatagtatgaacccaagaactcttcctgtaactccaaaataaatgtatgcttaggtcagaatctgagttagaaatgaaaaacaaggctaggtgcggtcgttcacgcctgtaatcccagcactttcggaggtcaaggcgagcggatcatgaggtcaggagttcgagaccagcctggccaacatagtgaaagcctgtctctactaaaaatacaaaaattagccgggtgtggtggcaggcgcctgtcatcccagctacttgggaggctgaggcaggagaattgcttgaacatggtaagcggaagttgcaatgagccaagattgcaccactgcactgcagcctaggcaacagaacaacactccatctcaaaaaataaagaaataaagaaataaataaataataataaaaaagaaatgaaaaacaacatcttgtctattttttccaggatcaggtgtaataggaaactggtgatgcactaagtttttcacagacatggcttgagaatattttctattttatatgcttgttaattttttaaaaataggattgtttgggagcttatttccactgcagcaggaagaggcactgtgattcactgaattgtgtgaattaaaggcatgatcaaggaacaggccattgaaaatgatggccctgcagtattaaaagtgctttgatcttctgttttgacacattgaatttatctttaattatatgtgatgacatttgattactatacacttagactattataatgtggtttgtaaaatatagtttgtaatgtataataacttcaacaccgatttttctgtagatatgaatttacagagtcatgttttagttttgtttaagagaaaactattagacttctgaattaacagacatttaaaaggtaaatatttagtagtcaggcaaagtatgattcctatacaataagtattaggactgtaccctgtgggactcagtgccttattttaatagaggtaatagaattctatgtggtggtttcctgatctatccactactggctgctttactacaggtaaatcacttagttctctgagcctttgaaaaatgaaagccttagactacatgatattcaagattttaattctgaaattctttgaatctattattctgtgacgtctttgatggacataatatagaattccatagaaattactgacacattttctaaaagaaagatatttttaaaatattgtgtgaattaatgggttttgaccttgcatttaaatatgaaaatgaggccgggcgcagtggctcatgcctgtaatcccagcactttgggaggccaaggcaggtggatcacctgaggtcgggagttcaagaccagctgaccaacatggagaaaccccatctctactaaaaatacaaaaaaattagctgggcgtggtggcacatgcca

SEQ ID NO: 76227 - DNA, 1976 bp, Homo sapiens
agccttcaggcaggaagatggaggagagaaagcagatcacagaccctaaacatctgtaggttctctctctttcttgttccctacagctggtgaatctgaattgaatccttagtaaagtttcatattaggtgatttagtagatgctagttaaggaaaaatgatgatctctaagaattagcctgattttattaaaaaaactttgtggagattaacctaatttccttcttcttaggaaggctattagactgttgatcacagcagacaggggtctgaatttcatgaagttttttgacatggtccatcatgatatcactgtgggcagaatggatgagagggatatgatataaaaatacggttatgttgttatgcagctggctgaacagccatctgaaagagtgatatttaatggtctgtgttaacctggaaggagaactctgggataccataggaatctgtcttcaccttcattatatatatcaacaaagagttaaaagaaatatagctggcctactaattaaatttgtagataatatacagttgaggaaggatggcttaaattattgggtgatatagacaggagtcaaaattattgggtgatatagacagtctcaataaacataggagtgcagatatctctttgatatagacaggagtcaaaaaagctctaaaaatatcaggatgataggcttaaccagcaagataaaatttactgagaacaagtttataatataatatataatgctatgtattacagaatagaggagaaatggcttagatgtaggggtaggaaaaaaggcttaacgttcctaagttaacagaaaacttaatatgggcaactttgtcatgtttctttcaaaaaaatgcattgtgatcttaggaatgtctagaacattaatagaatgtctagaataagattagtagtagtcccgctttattctatgcatcggactattttgttctgattatcgcagtctgagagtgataagcttcaagcacatccagaagaaaatggctaaagtttttcacataacaaagctacaaaaagaagcctataaggagtcataatagctgtctcctgatatttgatgggcaaccctttggaaggaaggttagaatgagactgtgaagctccagaaggtaaagtgacaaccaattgttacatgaagatggattttgactccatataaagaatatttgtctggtccttaaagctgtctaaaaaatgaaatagactgtgctgggagttaagtagtgaattttccagggtgttgccaaactaccttaagggtatgtggtaatagaagaaatttattcatcagaaagggggtaaaactagttgatgtttagattcagtctactctttttggtggtgtgtttcctacttgtttataccaatttactctctgtcgtttggctaagaggcagagaatgtctttgaccataaattgataaacaggattcatctgtatatgttattatcaaaacatgcctgttacttttccaagaagctttattcttatctactcctaaaatatctttatgaagttaaaaggacttaacataagtatttagaaggaaaaatgttttttttttctaggaagcattatttatatttggcacttttttattagtgtcaaaaacaaggtgatcacactgcagctataagaagatagtgctatgaaatgaatatgtgcagatacatcagagtaaccaggttcattggtttgttcactcatttgttttttactcattcattaatttataaatattttttcggatacctggtaagtgctggtcgctctgctaggtactaggaagttgatatatactatagtttctctgaccatttacctaaaaatctgttaataggctccatttcttctaatcatccaagaaacatttttttaatttttaatttttgttggtacatagtagttctgtatatttatagagtacatgagatattttgatacaga

SEQ ID NO: 76228 - DNA, 3063 bp, Homo sapiens
ctaacatcagaatcacctgaatcatcagaatcgtctatttcggaaaaattagattcagccaataactgtttgagaactgtgttaacatcatgtgtaggaatgctatgttttctaggatttgacatttttggtgattgagaattactacattttgtaaatggatatatcactaccaaaaacagaatggtacaaatagaatgatgtattttgtttccaaagttgatatactagagcaatgtgaaagtaataattaaaatgagatattacatggcaaagttatctcagggtaaacgctgcagccgcaagtgccactggtgagtattctctgggcagatgggaaaaggatcaagaaccactactctggagctagttcagccttactactaggatgtaacccttctggagtctctgtgcagtgctctagatattcaatgaggtctctctcctttaccttgtcaaaatgtctcacagtcttatatgagtactgggaattatttagattaacattcatggtactttgtttgttcttatggaatttactctatgtatgtgcagcttaattttcagtcatagtctcaaggggaaccctgtgtagatttcctgagctcttctctgcatagctcttcctctttagcactctgccctgaagagtccatctctttcctcctctttaaactctgaactctgtcaccctaacttagtaagacctctgtactctgcttggggttatcattccttgtggtgcattccagaaagtgcttccagacagacatcagggcgaccttgttcattttccttttctcagggatcacagtcttaacactaacttttgtctgaggtgtgacagtaacttttttgtatatttttccagttttttcagtgtttacagtaggacagatctggtactagttattctgttatagctggaagtccaggtacttattttttatggtcatgaggctacatagaagctcattatatgaggaaaataaatgctgtactaatttcttcacatgatttcaggcagcactagagtgctatatgatacatattaggcactgtgctagcataggaggattaaaacccaaatgggatagtgcctttgtcttcaaagatctcatgacctacaagagtggactggtatataaacaacacattccaagtcagtttgtgataaaggcagcatgaaattatataaaggccatagactttgaaatcagataggctttggttaaatcccaactccatgacttactattgtattatgcaacctctcacatctttagttttccaactgcagaatggagataatagtacgttataggacttctgagaaggttaaattaaaattcttttataaagcacttgacttggcatatcatagaggttcattaagtattaggtttatttcccgttagaatacacataggatagaggagcagttaatttttattattactatagaaatcttcagggaggaaatgatatttaaattgtgccttgaaggtggagtagggttttgatatgtgttagatgggttccaaggacattctacttttaaggaactaaatgagcaagggctcaaaggtgtaaaacgtggggaaggctgtaaatacacttatgaatgtcagcatagtccagaaccttaggaaaagcaatttaggtcttaaaaacaaacaaacaaacaaaaagacaacaaaaaactagtagtaggaatgtaaaaatgaagaaaaaaagaacaaacagaaagtctaaccccatagtaaaagtatacttccttaggccattcctatttattgccatgactaataaatttgggaatgcctgtggaaaattcctgtgggctgatcttttcttaaccactattcaagactgctttacgttgatagtctaagccgatcatttcattaatattaaactccagagctcattcccgagtttccaagaatttgctgaattgcttttctctgttatctgcttctttgggtaacttccatatttttctttcttgccctgtaaaaattgatttcctaggttttccaagtgattgataatgtgacagtactataaagacttttcttagactctggtatgttcgcatttagtacaaatactgtcaagggttttataaagtgtataactaatatactttctacatatcttttactagggaattctaaacttaagtattttatttcattgaggttaaaatatgtcctgttaagattttttttctcttttaaattattagtgttttgcattgttaaaaatcagctggcttcttggattgagtttacttcacttttccagtgggtaacttttatctgacctttaggtctgtaattgtttggtttgttttctgaagctatggaatgttttggaaaaaataagcctcatggagaagggctattatccctgaaaatgatgagaccggaaatgagaaaagcaaaaatcagatatcacccttgaccatgtggatttcagtttttaaaaagtctttatcctctgtctctgagaaccattatttggaagtctgtttctctgcctctctgtgataagttctcaccaaagatcctcttgtgtttttattagaattacatcgaattcataaattggggagaatttatgtatttataatattgaatcttttcatttatgaaaatggtttatttctctatttaggtattctataatattatagacttttgtcctcaaagatcttacaaatcataatttggttagatttattcatgggtttttaatagtttttaaaaaatgggatctgtttttattatgtaatccaatcagttcttggatcagaaaattgatttttatatttaaagtccagcaaaactgctttgcatgcttattaaaatggcttgcaaactatcgtatattttctatggaatcatatatgcagtagcagtttttcttctattccaaacctcatacttctttattcttgaatagaagtgtcatagtgggattttttcttattcctgatttccggagactccaatatatcatttttcattttagaaagtttatttttcttgctatatt

SEQ ID NO: 76229 - DNA, 2011 bp, Homo sapiens
atgtggtagattatgttaatggcttttgtagtgttaaatcatccttgcattgccaaataaactatacttagttatttaaaaagaatatattgctgtaatcccagcactttgggaggccgaggtgggcggatcacaaggtctggagatcaagaccatcctggctgacacggtgaaaccctgtctctactaaaaatacaaaaagaaattagccaggtgtggtggcgggtgcctgtagtcccagctactcgggacgctgaggcaggagaacggcgtgaacccgggaggtggaggttgcagtgagctgagatcgcgccactgcactccagcctgggcaacacagcaagactccgtctcaaaaaaaaaaaaaaaaaaaaaaagaatatattggtggatttttttgttactattttgtttaagaattccttgtagtttttgtttgtagtaccgatttttctttctagattatagaagaagctcagcagctttcttcattttctattctctggaaaaatttttataacataggattttctcatcatgaagatatggtaaaacttatttccacatcctccatacttgatggagtttctaagtaggagggcttttaaaaataatttataaattgaaatataatgtatttatgggaaaattgcacaaatgataaatgtagctgtagctcaatgaattttcacaaactgaacaatctcatgtaaccagaatccagatgaagaaacaaaaaattaccaatgtcccagaagcccccactgtgtgccctttcagccactgccttttctgagggtgaccacctactccagtttctaaactgtgtattttaggggggtttggttcgtttttgaactgtatacagatgaaattatacagaatgctttttttttggtatatggcctttttcactctgtagtgtatttgtgagattcatcatgttgtattgtgtagttgtggttcattctgtttgctgtgcagtatactattttgtgattattcatacaatagaacatattacatatttatgtatccattctaccattctactgtgtgtgtgtgtgtttttttttttttttttttttttttttgagacagtgtctctctctgttgcccaggctggagtgcaatggcagatctcagctcactgcaacctccgcatcccacgttcaaacaattctcctgcctcaggctcctgggcagctgggattacaggtgcatgccaccacgcccagctaatttttgtatttttaattgaggtggggtttcaccatgttagtcaggctgatctcgaactcctgacttcatgatctgcctgcctcgacctcccaaagtgctgggattacaggcgtgagccaccatgcctggcccattctactgataatggagttttgcatgccttctagttttagcctagtgtaaatagggctgctatggacattttggtggacttatttgcacatttctttcaacctaggagttgaattattgggtcatcagttatgcatgtatttagcttagtgatgttgccaaacagttaagttgttgaactaatttatattcttaccagcagtgttggagtactggttgctgcacattcttgttgggcttcgtatttaactactatattttagctactctagtgggtatattgaataacatgtagtatgctgttaacttgcctttctttgatgattaagcacattaaacacttttttcatatacttattggttatttgtataattttggtgaagtgatgtattgcttctcgacatgctataaagaaatacctaatactgggtaatttataaagaaaagaagtttaactggcttatggttccataggctgtacaggaagcataacggcttctggggaggcctcaagaaactttgaatcatggcaaaagacaaaggggaagcaggtgcatcttacatggcaggtggaagagagagaggagggatgtgctctacacttttagcaggaggaagagagagaggaaggaggtg

SEQ ID NO: 76230 - DNA, 1146 bp, Homo sapiens
cccattggccctgggattttcttcctttggtttatgagtttaaagtgttgacagttgtgaactagtttgctaagtgataggaagcagtgttgaaatgaaatactttaaatcctgaagatttatgaggaagaaaatacttgggcaaatagtgtcaatgagtcctgatacgtattgctaacttgtcactagttcactttacatctgtgtagtgataactttgttttttcctccctcattgattatagtctctcatcccaccatttgccaaggccgtgtaaatagtttgctgtcgtagagatacgcagcaggcccatttgagtagttctctttcactctgatctccttagaaacctatcacttttacctttaaatgatacatttttaaaaaactattgttgttgttgaatgggatttccctaaataagaagagccatctccctagtttcaggattgtggcttctttaattgtaatggagttttaatattatatctacggtggaaatcagagtcaattcaatcttattttgcatcccctgtatgctatcatactgattaggggtgtaacaaagaatggactgtgatttttgccattttgtggttttcactggagattttatagtacagagggagagaatggcatagtaaataaaagaatgagcttagaagtgagactttgtgggtttaaatacctgctctctaatttatcagtttgtatttaacttctcaatatccttatctgtaaagtagaaataacagcactatcattcatcactttctatttccttatctttttgccttttcttcatggaagttttcacttccaagacattatgtttttcttcatttatttacagtaatgtaaaatcctggaatacatgtacctttttggttcactcatgtatttttagtgtctagtgtagggtttgctacataatagctcctaatattcgttccttctactgggaacttcttccaacatgaatatccatatagcttatccccatgctttatttagttccctgctcaagcatcacctcactagagagaacttgctagacgacctcttctataaaatagcaccctttagttttctctattttttcctgctttatttttcttcataatactttactgactgctaagtag

SEQ ID NO: 76231 - DNA, 1046 bp, Homo sapiens
atgatattcaaatctctttatatctaattggaacctacctttccatagcactaaggagagttgtaaggaggtgagtacttggtgtaaaaattgcttatagatgtagttagcttgctatgagattaaaatgatttttaaagtacagagaaaaataagaaataactttaatgcaagtcaatatataatcaactgattatacgtgatttagtccacagatttatagaaattcagataaaaagatcattgaaaccttggctcatcagagagagcttcattagaaaaactgatagttgtttggggtcctgtatcatttattcattttatttattcagacccaatttctccctgtttttctaatacaaatatataagattttagagtaatggattctgttttgttaatataaaaatatttcttgtgtcagaagaattcagatgcttatagatattcttgtaaaatgttattatttttaatgagattgggtcttattccattactttgaaaatgtatacaactgagctgtttcttctgatcagcttatactatggacacttagtttgaagtcatattggaataatttggagaaaggtagaatttagtagatattacagaatttaggtatctattgtaaaatttaggttttatatagggcatgacattttttaagcgaatttataataaatagggctttttcaattatacagtaatgtaggttccaaagtgctattttgtgggttttctgtgtgtttagctgttttgtctgtacttatatttgtatttgtattgtacaaaggatataagtttctttgtagtttggataatcttttggatgaaagaaaggtagtgagtcatacaaaatagtgaaaaaaatcagatattttgaaataatacttctaattttccaaggatttaccaaaatagaggatgttaatttttagtatgaatttttaatgattggattggttttctgatgactgttttaattagttctgcagggcatcccatttctatcaacatagtgtgtgcaacaccttatttaccagtaa

SEQ ID NO: 76232 - DNA, 1013 bp, Homo sapiens
agtttaaacaactggactctgaacctgtttttgttctgattaagaagtttatttatatgttcaggaatacagcggcacaacctgttaacagctgtaaatttgcttgattaagctgtgtgtagacaaatttactagagggaactgttccctaaaaattccagttcacttacatatgaagttagtctggctgtttctcaccagtttccatcatttcctgccaagaataataaacattttcttgcaaagcatcgacactaaaggttagaagtgttcagtgttttatcaatcacactgggctgtcatgaatctcaataaacaaacacagagatatctatgtggatgcctggagaagccgttagaccctagaaaaataatttctttcagacagtatcctagaccttttcaaagtagataaatgtcaattatgaagagacatttattgtaatggaaataatggattcttcggtctagattttcatttactgacctagttcagggaagcttgtacttttagtggataataataagctagagcaagaaagtgtgttttcttaatttcatataactgtagatgctattatgagtattataataaagatgggtttattaatttaaacttatagtattaacatttctctaccatggtctgtcaggcaaactgtggctcacgactggtgcacagcgtgttattgtagcactcacaagttaagaatgggtttatagttttaagtgattgtaacaaacataaaacaaagaattttatatatatatatctagagagagcgagagaggagagagagccctcaaagtctaaaatatttattatctggccctttaagataaagtttgccaaaccctggtctatattagtagtaatagtttactaccagcattcaaaacgtgccagcaacaaagcaggatgaaattatagtcttagtgttagggtattttatttcttatttagtgttaggatattttatttcttatttgcatgtggtatataaaataaaaat

SEQ ID NO: 76233 - DNA, 1121 bp, Homo sapiens
tcttaaataagtacaaaggtcaggcatccaggagctcatccttccatattcttagaattgggatgtgataaataagtcagaattttttcatgaagcagtgcccagatgagtacatgttatcaaatattttatttgataataatgcaggactgactgaccaaacttgatttataaattagttccatgtccttttatgagaataaatacaatatcttggtcttgttgtgataatattacctaatggctatgttttccttcattggcattgaaatcagaactgatttttggtaaggttagtaatttgcgttatttttaaatctccattattatgaagatattttatcagggacaaagattgccttttctctctccctctccttttcttttctttctttttttttttttttcccattaacagttgatggaggaaggtaactttgtatgagttattgttggacatgcaagccctgtttttttacatttgttgattctgctttggagatttatcagtctctgagcaagttgctttgaagcatttcagtcttctttgtctctcagaacccattagtgctatcttcaggatgtgccagagtgacttttaccctggtacatttgtgacacagttacaccatatctcctactctctactcatcactgtatagcaagtacaagttaccagatagaagcatattcttgttggattatcaaaactcaggtggagtgtttaacatcttttttgaatatttaaatagtgtttttctttctaattggcaaattttgggtattctttaaaaacaatatttgattaggagatcatggagaaatttgtatggtcaaaacttgccaaatttgagactcacttatttgtttaaatttaaggatcagtaaaaataaataaataaataaataaataaatgtaggaatctaagatagagacctgtactattctgaatgtgaatgaactgattacattgattggaatacgtaatttaggagcattcattattactttttgacttggaaacaatataagaatgaatgcaaaaaaaaaaaaaaaaggagcatgtggattcattgctatcttgtttactgctcagtcacttatttgagagtgccaaacc

SEQ ID NO: 76234 - DNA, 1843 bp, Homo sapiens
cgatggtgtattagtctgttctcatgttgctaataaagacatacctaagactgggtaatttataaaggaaagaggtttaatggattcacagttccacatggctgggaggcttcataatcatggtggaaggcgaaggaggagcaaagtcatgtcttacatggccgcagagaagagggcgcgtacagaagaactgccctttataaaaccatcagatttcgggagacttattcactatcatgagaacagcatgggaaaaaacctgtccccgtgattcaattacctcccactgggtccctcccatgacacgtggggattatgggagctgcaattcaagatgagatttgggtggggacacagccaaaccatatcaggtggagagtgatataggttataaaacaaatatgtcaaagtgccatgaaaagaagaggacaaaatttttgatagccttaaacaatcgtttcacttttctctgacaccatttattcatttataaatgccttaccttttatggaacttttacagttcttcagcaggaaataatctctcctttattggcatccctatatcattttgccttatggcaattattattttctatctttcttttggcagctgttgatagtaatcattttgtatcttgttaaatcattatttgttcctatcttgtccattttacttgaagacagttcacagtcactcaacacagtacttatcaaaaatgcttcaaaaatatttactgagtgagtcaggtaacaaaacgattaaaatgcttagccatcagcgtatgcctctattttttaagggctttttataagcaaatacgggtagaaaaacattggcagtttgagagtaaaataaacatatataactcaccaactgactgatcaggataattatctgggagtctctgggggtaaaaagcccccagtttgttccattttacaactcccaccatggcctcagtcaggccaccaacatgatacaactagatgtggagtttggaagggtgtgcactggaacaccatcatatagtaatcctgccaactggatacaatagtgtaagcaaccccaagagcacagataatagtaaaatgtccaacatatttaacaaatgaggtgttttgagtatttattatctttgttttaatataatttttatttattggtacatttataacatttagctttaaatgatggctgtgtttaacaactggcttagaaaattcctgaaaatttagtagtcagctcttgtgaaagagtacaagccaactcacatacacttttacccaggctctgctgactgtgtaacttttgctagtaatttcactcctagaatctgtgctaaggaaattatctgtgaattggaaaaagcacaaagatgtttatcatagcattagtagtaacagcaaaaagttggaagcaacctaattgtttaaagtgagctgtggttaagtaaattcactggaatgttttctggaattaagtgacttctttgaagactttataacaacaagggaaaatgccataaagttaaatgaaaaagaaaaaagaaagaatgctaaatatctaatttatatagaatgatcaaaatttaaaaatatagacatatgctaatggaagaaggaaatgtcagtgtttggagctaataaggacatggctttttttctttaaccctttcttcattttccaaatttctaataatgagtatattttataattataatgaaaagatatatcatttttgtcacaaaaccaaattctaatttatagctctagttttttgttgaattacaaggcattatcaaaataaatcttttttattttattttttttgagatggaat

SEQ ID NO: 76235 - DNA, 1050 bp, Homo sapiens
tatctgttaccactctatttacttggtgtgggcgagtttcaacaaggattagattttttaaattaattctctatatttttatgggggagaaattgaagcattccattatattgtaggaattcccggaacttcttagtattccttttctaccttgttaaaccattaatttgtttctatcttattcattttacttgaagacttaaacatttctgtatcactgacagccactcaaacagtactcataaaaaatgtgtcataaacatgtactgagtcaagtagcaaaaccttttaaattattcagctttttatgtgtctggattttgagtcatagacttgtgtgtgccatggggtataatgaatgggtaatggactttggagtaaataagcctaagttcaaagtctgattcttccatttaccagctgtgaaaacttgggtaattattctttgggcctcagacgcatctctgaaatgaatataataatccctagcttgtggagttgctgagaggattagagataaaatatgtaatgttccttgcatatagtaagcattcaatacatggttagttattaggcattcagtaataattgagtggatgactgcttcagggaaaatttggtggctgatttactgaaacacccagtaaacatatatgaaaaaaaaaaacacaccaaaactgacttttagttagaacagtttagagaaactgagagtcagtttataaaggagccttgcaaggaaactgaaaaggtgaaatagacgggaacaaaacctacagagtaccgctgcagtggagaaaagaagtttcagaatgctagaatggtggcagtggcaaattctatagtgaattcaaacaagaaggtcaataattggtcatctctggatttggtcacctttgttatttcccaatttctgtatattctttttatgatcatggttgacaaaagtatagcgctgaacataagacatgctaggaaggaaaatgatttaggaggtacagttgattcttgaaaatcatgggtttaactgcatgggtccaattatatgta

SEQ ID NO: 76236 - DNA, 2134 bp, Homo sapiens
tctctcagcctcagttttcttgtgtgttgaagataataatacctaggtcatggagttgtcgtgaagatcaaaagtgatatctttaaagtgctaagcatagcaggtacacagtaagcatgcaaaataaaggtccttgcattatttttacctccctttctagtggctcctaaccttattaagagtctcttgtcttaagaaattgttctactacttcagtatttagcactctctctctctcttcaccatcacagctattctccactttttatctcctatttattttggctctcacatcagcctggcttcccaagcatttcaaattttatttttaatcttatttcttttccacccctttctctccaaatttgctctgcttccaataagttcatctatcatggctcaaatcagaaaaatagcagatgcccttgttcttttgccctctctacatttaatcatcaaacagagttctgataattctgctgcctaaatagttcctaaatttttctacatctcttctttgggtgctaccatttcagtccaaggcactatcatctcacacagtattgtgacaatagccttctactattctcccctttgccacactattccatactccacactatagatagagtgataacaagaaatgttatttccctttataaacattctaatgagttttcttgctcttagggcagagctcttcttgatcaggtcttatttatctcttctttcagctctatcttataccactattaccctgtgcatgccctagctctgatgagtttctttcagtttcattcagatctcttatttcagcttttccacatagtgttcctctgctgccttcctgatccttcttggggatcattgctacttggcctctggtttcaacctaaactttacttccttgagtgaccttcgcttaggctaggtacttctgtggtctgttctttattaccgtatcatcatggtgctcatgacattttacagttccttatctccccccaagattccagaaggcaggagccatgtctttttcattctctaccacaatgcctggcctatagtagacacccattaaaattttgttaaatgttgttaaataattaaagcaagagaaaaatcatcctatataacatgttagggtttagaactacatatggtattcctgtatttaactttgaatatttctttaaacataagtaaatgtggaaaataataatgctgcttttcagcacatgctcttatttttctatcttcacacattccctaattttaaaatctctttatgtttgtttttattccagactacaaacatcaaatcttttttttttctatttggatgcttttaagtataaagtgtcacttaatatcagcacttctgccaactcttattcatttttccagctgtatttggacaacatttacatagataattttgtgaaattttcaactagaagttgagttgagataaatcatgcagttttcaattcagtgtatcctgaaagataacgaaactcactgagctgcctggttttccaacaagctacatagaaagcatgaggagggcagaaggctatggcttccactgttttgaccacttcacagcccttcccgcagactgcttggagatggctcaagtggaacctgttgataaattaatgatcctctttttcccagtcaccattgagccaaagtaggctatggggctgaatcatcccagacagggatgaatgaatgttctgaaaagctgaaacataaactgtcagttaagatgcattttcttcaagtttatttgtgacagatgatggaaggtagttgatattgactgagtttgattgtttcttaggaacaatcacagtcatttgattgttgttcctaagaaagtagtctttttaaaaaaacaaaatctgagatacaaatgaatcactatatgttaattttccttgcccttcttaggtgaccactgactatattttaccagttgttaatgtagctttgggggggattttgttcatttttttggtgcaccttggataaaaaataattggaaatatttctcattttgcaattactgacttttcatactactggaatacaggatttgtcagagttcttatctgacccagaatag

SEQ ID NO: 76237 - DNA, 1137 bp, Homo sapiens
ttcctatctttataaagtgaagaattgtttttttttaacaaattaacatatcctgagttacattcttgagtgagatatgagaatttaaacatataacatgaatacccccagttttgagtgctaatatgcaaggaaaggctttcctcattactgttttacaacttttatgctccataaggttgattctcagtgctagttctctttcagagagaagattcagtaaaaaacactgtataccagtccttaataacttaaatgcaaatactggcatatatccagaagctaaggttcaattaggtgtagttgtttcatcttacaaaattattttaccagcaagaaatcttggcagttatattgatgatttctcatgaaagaggcaaatgggacgataaagaggcctgaagactattttttaatactaattttctaattcctcatttttttaaatgtcagaagccaggccttagaaatcaagcacctgagttttcctctgattttctaatcattactgtggttattctagttgtctcttatctgttcggaagtcataatgtgtaatgatggcataagtgaatgttaaagaagtggaaatttgatatgatctagatggcagtttattggtttagtttcaaagacaattttacctggaaaataaataagaaagcttatcaagcttttccctgttatccgtggtttatctgttccttgtgtttcatcttgaccaccactggtcttccagaaatcgctaaaatctctcctgcctatgtcatttctttttccttacaagatcaaagcttttatgagcattatttattgtagcctcacaatattctagagagcaaagtagaggttatgtgtctccatctttatttttaaagccaagtgaggaacagataaatctcttcgctaacgttacaaaatgaagcagtggtagaggcagaaataaactcctgaggcagaaacatctcctaattctggcccttacgtctaagatgcagtagactgtttggcctttctctaaacaggcctttgacatttagggtatgtggaaagtatgtgctcccgtcagagtttcgctgtttagttattctttgcctgttaaagtaatgactagaagactggagaaagcagaaagaa

SEQ ID NO: 76238 - DNA, 2039 bp, Homo sapiens
ctgtcaccaggttggggtgcagtggcacgctctcgctcactgcaacctccgcctcctgggttcaagcaattcttgtgcctcagcctcccgagtagctgggattacaggcacgtgccgccacacccagctaatttttatatttttagtagagacagggttttaccacgttggccaggatggtctcaatcttctgacctcgtgatctgcctgccttggcctcccaaagtgctggaattacaggtgtgagccaccgtgcctggctgcctctttctttttttaaagggctgcttttcatattgacctacatgactaaacctgagttataattcagaagaaacagttgaactattgtgtgccatcttgtcataaagcgcaggttagcacaaatgtcttgccaatgtcttaaatgttgcaatttttgtaaaatcttccgtgtgcctccaacatctccagttggtgaacagatctcactgtatttatccctgttgtgttcttccacatgtttgttttgcagcataataacacttgacagttgtaaatttttccgtatgttctgttttgtagagataaacaatgtactttctgtgtatttccctgagctttgaagacttaacttttgaaataaacaattccataggattttataggaggctttggtacgttattcacacaaactattctccttgaaagggaaggtagttgaatgttcatccttttgatataaactggttaactgaacttttccaagggatcaagcacaacttaactgcttttagctttgcaaccagggcaatgcagaccagaccagtgtttgaaagtctttaaaagtattatttgacatcataaatgaccattctgtggaataagctctctaattctctgagtggtttacttcagttagagggattagtgaattagctttggatttgcttataatttcctcttttatcttttacaaattaaaaagttggtatcggcatgtaatgatagcatctaaaacatttatgttgtggtggttgtatcatagaaaacattctttaggattcaattataagcagcctccttccattagcatgtcaagtttttctgagcagttttatttgtgaaaaatcagtacagatatttttattcatagcttgatatcctttttttttttcttactcaaatgaatatctgtttcctacctttctccctcaagatgcagtggtgcttttattatttgattttgtaaagcctgaagggcagaaatatttcttaagttttccattgttaactacaaacttggctatataaaatatacaaatcataatatctgtatggttatttttattgtcatttctttaacacacaaaatttatcacatttatgcaagaattttttaacttagaaaactcaaaattgatatgtaaattgggtggtagcaacaatgtgtgggatgtggtacgtggccaatgatgtgttggaggcagcccccaccagctcccaagatctagtgattaaattttcagaaattttgtgagccagttatcagtaaaaattaaactatataaacttacaattaaataaattatttaaaaacaaagataatactcaaaactcagtaattatgttttactacattttattatctatgctcttgaggttatttgtgtctcttgtatctgtattggaaatactatataatggtgtatactattgtatatctcttcacaacttcatgttcattaacatcatgttgatagcttcaaattagccatggtagaagtattaacaccatgaaaatcagcaaacacaaccaatcaggggctgatttattgttttgctgattgtctagacttaagaaagtgatggaaaaaatgttaataacacatattaaaaagtgtgttatatctggccgggtgcggtggctcatgctgtaatcccagcactttgggaggctgaggcaggcagatcacaaggtcaggagatcgagaaccatcctggccaacatggtgaaaccccatctgtactaaaaataaaaaatttgctgggtgtggtgg

SEQ ID NO: 76239 - DNA, 1997 bp, Homo sapiens
tattctcaatccttttgattattttttctctcctaaagtcataatttgtccactttccttccttccttaattggagtaccaggactagcctgagggtcaacatttatactctcttttttttttttaatccttgttttcttccccagcagccacaggtcaagttcttgccccttctaatggtctggtcatttcttttcctgtctgcctgaaactggcagaccctgagaactgtctacaggcctatagctaattctcagtttttcctggatagttttaatagtatggatgtcatcctgactcttagcttcttttccttctcccaccagttctctgccattcagctattttaccgctgcttttctttttactaagatgtgcctatctctgcatccatgaggcctctgtttccattctaccttgcagccatctgcttctcacttttgctgttgttgctcgtaattgtaagtttaatataagcagcagcctcaggagaccccatgaaagcaatcttctggaaacagtcaaagtgctgggaatttgatggttggatctgggaatatcaataatgtctacaactgatgaatgtagctggctatagattctgaagtactccagtgcgtcatcagcatttcatgagtatactgtctgtgtgattttttcacagagtttccctttgaattttatgtctgcagagtttctaaacactgcacctggctcatacagttacaagccttctttctcagtatttatatagttgtttattcagtctccaagatgattagttatttgagatgagtagaagttgcatctattcatgtaatcagagcttgttttcttgctcactggtggccagatacaggtcataatagtattttattttcttaactttgaatagcgttaaaggggagtggactcatttgaattacaggaggtactgaaagaaaactatattattcattacattttgtaaagcaaggaacaaagaggaatagttgtttcctaccatggtaatttcagactctgaaagatctgtttataagccaaatgtagacatacctatccctaacccagatttttttatggtcttcaattttgtaattatttagaattgaagggttttttttcctttctgccacatatttttgtacacaccctttctccctcccctttcccatgcttttgtttccttgagaaaaggagcgtccctcttagagcatagaataaacattctttgtgaagtgtgacttatttatgcttcaggggttgtcagtgtatacacaatagagaaggtgatggaggctccgaggcatgccaagtcagcactttgtgcatgttgaggccaaagagcatgttaagcaggcttaaaaaattttaacaagtcagaacattttacaatttccatatttatcaaacatgtcaggggatgggatcacaaagccttccagggattaactgcctctctgacttgaactgttttattaagatggaagaagccaagttctcaacaccctgtgatttgctctaataaccacaagaatcagaatgtaggtgatccttgctgaatgaaagcaatcctaaggctaaatgctctttgaatggggaaaaaaaaaaactctctcaacagatgaactatgtgtgaaactttctaacagagcttaggagtttgaagtttatttacctagagcttcagttttattaattctctggttggtggttcttgacctttgacacccaaggacttagactgtgaagcctaaatagaaggcattcagaaacctgaagacattctcaaagaggggtggccattggcttttttggggttggcaaaacatcctagagttattatttgtttttacatgtttggggtttggcagatcctaagatgcattttgccaagcactttcctttgaattttagtacaggaatatcttgggtggaatttaattcgtgattcatttgcattatactgatcagaatgccattttggaaaagatatc

SEQ ID NO: 76240 - DNA, 1048 bp, Homo sapiens
aatgagtaccaaaccataaactttttaaagaacagggaaagcacatagctaaatatggtacccaacattattgcccatcaggctgcaacaaagcatgatgacaaaaacaggttttttcttgtctactgtcagcttcctattgtttgtaactggcccaggaaaagcagtgccagcaactcaaatgactgctctcactgtcttcttgagaaaacagcagtgcaagcaagcgtccatcaggaaaagaaagaagcattttaaacaaatttacatggatatctttaggttcaaattattttgaaaccaaaggatatgaagtgttgggaattctagttctgaattctataaatcagtgtaaggagaaggacagtgtgatagagactcttttatttgcttcaaatagtggggtgaataagttataagagtatcactgggccagtgttgatgattttcttttctctcttgttccccatgttcttcaaactgcttaaaagtcaaaacacaagatgtattttgagttcttgaccttatcctggccctgacttagtttgtcagaatattaggttgtctacagagatccaccctggtttccatctaaatttttttagattttggtcaactttctatatctttatttaaataactgtaagtattcctttcagtataataaaaatttatgtttttcttcttcttaaactttggtccttgtccttgttactttaaaacagagaacttagtaaagataactttttcttttatttctcatttttctctttctctctctatacccctctttgcttgcccccgcccccaaccttgtctctttcttactggctataatctaattagtgaatgcttatcaatgaccaatgagaacattgtcacattttacattttgcttgttactgaactgtaatctctgttgcagaaagcaggatttttgtgaggttgaaaggaaagtgtggcatcccatgagtctgatgctattacgttttagaaaattgaaatgactggccaggcgtggtggctcacgcctgtaatcccagcactt

SEQ ID NO: 76241 - DNA, 1254 bp, Homo sapiens
gagaccagcctcatcatggagaaacctcgtctctactaaaaatacaaaattagccaggtgtggtggtgcatgcctgtaatcccagctactcgggaggctgaggcaggagtattgcttgaacctgggaggcagaggttgtagtgagccaagatcgcgccattgcactccagcctgggcaacaagagcgaaactctgtctcaaaaaaaaaaaaaaaaaaaaaaaaaaagaaaagaaaattgaaatgacttactacattattgagagcatatcttagctttggataataaagaatatagataaacattttaagagcagctcttgtttcatacttcttatctcacacacagtgccttttacacaataagggctgaataaaattgttacccattttagttcagttaatttttgaatgtgagggcagatcatttaattccgtatcttaatatataatccaggactggtgaataatacttcctgccaaaaatccattaaccttacaggaaacaaaacccagtgaggatcatagaagtaaaaataacttaatttagatttcataagttgttatttttttagagaaaagcataaaatgttctgtacctgcacatttgaaaataaaatcaagaagcaaaacattctcatgagtaagaatatgaaacaataatttgaaaataccaaaactcagtatttattactgttctacagtagatattagtgactagggaaaggacaaggtggctatggggtagtagaaaagggagccagatatgcaaacctttggggatgatgatttaactgcttcatgacagttaagaaaagatttattttttttagggtttaaaattactatatttaaaaatatataaatatttgagttttttcctcaagtctggaagcagaagcattcctcagtctttctctccttcgacatggcagcaacagcaacagcagcagcagccaccgctgctgccacggccctggctccacctagggaaattgcagaagaccctatctcattctagtgaggaaggttctatgaagtagatagttcatcttgtagactttttagaccattgctgtaaaagacttttatattttttattttttgagacaaggtctcactctgtcacccaggctggagtgcagtggcacaatcatggctcactgcagccttgacctttcgggctcaagcaatcctctcacttcagcctcccaagtagctgggactacatgcacatgccactctgtcagctaatt

SEQ ID NO: 76242 - DNA, 2258 bp, Homo sapiens
taatgtgccaggcactgtgttaaacattttacaaatattaatattatctcttctcagcactatgagggtgggtatagttataccttgagcttatatttcagggaatgtctacaaatgagtctactgctttaagtaggcttcactgtatgaagaaaatgcagacagcagaaaagaaagctagacgtttttcatggatgcttctttctttctttttcttttttttaggttttattttggagggaaggaagaagaacctgtcttctttaaaaaatgaaatatttttaaccgaaatgttatctagtgtttagtgtgtcaacaagttctaaattgtggaaaagtcttatcagaagaaaggctgctttgaaaacgatatggaaatatttgttgggtgttcactccttcaacgtctaaatgaaatacactggggagtaactgaattttacagtatttagatagctacatagtgagcaatcaaaacattctttaagtatttaataagaggttaagatcggcccgcctaaagcttatataatagaactgagtcagtgatgatgagcattttttcatgtgtctgttggctgcataaatgtcttcttttgagaaatgtctgttcatatccttcgcccactttttgatggggttgtttgttttttccttgtaaatttgtttgagttctttgtagattgtggatattagccctttgtcagatgagtagattgcaaaaattttctcccgttctctaggttgcctgttcactctgatagtagtttcttttgctgtgcagaagctctttagtttaattagatcccatttgtcaattttggcttttgttgccattgcttttggtgttttagacatgaagtccttgcccatgcctatgtcctgaatggtattgcctaggttttcttctagggtttttatggttttaggtctaacatttaagtctttaatccatcttgaattaatttttgtgtaaggcaatcagagaaatgcaaatcaaaaccacagtgaaatatcatctcacaccagttagaatggcaatcattaaaaagtcaggaaacaacaggtgctggagaggatgtggagaaataggaacacttttacactgttgatgtgattgtaaactagttcaaccattgtggaagttggtgtggtgattcctcagggatctagaactagaaataccatttgacccagccatcccattactgggtatatacccaaaggaatataaatcattctgctataaagacacatgcacagatatgtttattgcggtactattcacaatagcaaagacttggaaccaacccaaatgtccaacaatgatagactggattgagaaaatgtggcacatttacatcatggaatactatgcagccataaaaaatgatgagttcatgtcctttgtagggacatggatgaagctggaaaccatcattctcagcagactaccgcaaggacaaaaaaccaaacactgcatgttctcactcacaggtgggaattgaacaatgagaacacttggaccaggaaggggaacatcacacactggggcctgttgtggggtggggggagcggggagggatagcattaagagatatacctaatgtaaatgacgagttaatgggtgtagcacaccaacatggcacatgtatacatatgtaacaaacctgcacattgtgcacatgtaccctagaacttaaagtataataaaatatatatacatatgtataaagtaatagaaatgagtccaggaatcagtaacttggatactttgttagctgttcgagaccctgggccaggccaacacttcctaaaggtgccagagcacacagagagcatagagattgcactgattgcaaacctatccaagggccccagctcctctgctaacacccaaggcctctccacctgtttttctccgagttgctcgtcaccctgtcctttaccttctagattccccagggctcctggtctccttggaattaagactttgagattttgttgtaagagtttccaaacaattcttcacaatatctcttgggtttgtccttgtttatccaggcctttgttactcccacagcctccttgccagcctttttgatgcatcctttgctgctcactgccttaatacccatgccatctccaggtctgtatttctaaaacatttctcttgtgtcattcctctgctccaagaaggccttgaatgtcaagcctgtttttcagcttgtcttttgaggtcttctgtaatctggctg

SEQ ID NO: 76243 - DNA, 1175 bp, Homo sapiens
taatcccagctactcaggaagctgaggcaggagaattgcttgaacctgggaggcagaggttgcagtgagctgaggttgtgccattgcactccagcctggacaacaagagtgaaactccgtctcaaaaaaaaaaaaaacaaaggaagaaggaaatatttattgggttgggtggagtaggctcagagccatgaatgttccaaatgatagtaaaattggatctcagcttcctattttatggcaaacgaggtgattactggtaaaataaatgaataaataaaaaataataaaaataaagcctttaaagagaaaatgtaatagttctttccaatgatctttagattttttaccataatcatcagaattatctttgatggtttctaaaatgtgttgtattaatgtataatgtaaactttaataaatgtgcttttaaatgccagttgctgacattaaaatatatctataatgaagttcaaagataaatggaactttctgaaaactcctttgcaagttaatttagatataggaggtaggatttgaaaacaggatcacattataaactcaatagtcctagaattattatttaatatataaaagatatcaaaatgcatttgtaaacatttgaaagataacagaattggaaaattattgttcatttaatacaaaaatgctttcagaatctcttagctttttttgtcatttactagaaaaattgctggtttctgtattttttctttttcttcttctaactttttaatttattatacatcattgtactaacagtaaaggaaatttaaatgatgaaaataaaatctgccatcttatcaagttcaatgtgactgtaaccttttagttctttgtgtgtgtgtgtgtgtgtgtgtgtgtgtgtgtgtgtttggttggcttttattgatgtatataaaaagattacagacagcaagagaagataatcagaggccttttcgttcttatcaaattaagttgctttatagttgtatttttcttttatattttaatatgcatttgtaattgatagaggaaagaatttgtctttcctctgtctcctctaattttgtgccaaggaaaatctggcacagaattaatcaaatttttgcctaatttttatcatgatataattaaaaaattgagtatatgatactcaattttatctttattgt

SEQ ID NO: 76244 - DNA, 1473 bp, Homo sapiens
gtattctaggcatgtcatatatgtaacatgcatatgatatgcagatagtgtatgcactattataataatataatccaattatagtctttattttcattatcttaaggatatttatatagttcaattgagtcgctaggaaataaaaaaaagttttttaagggtggggccttgctatgttgtcctggctgttcttgaactctgggcctcaagtcatccttttgcctcagcctcccaagtagctgggactacaggtatgcaccactgtgcctggccaagaatatttctttgtttcctgtttctgtgtttaagctgcatttagtttggcagtgtttgaaaggtatcatttctggtttacattcagctcttgtcctttctaccagctgagtgacttatgaacagaaaattatagagtaaaaataatatgacatatatgttaggctctaagcccttcaccttttttttttccttccaaataaagatgaagcagcttgtctaggtgcaatgccatgttaatatcctgtaaagataattagtagctgacttagcatattgcttggaggtttcctgagagaccaactttagctataatgcaagagatatttgatttctattaatacttgaataagtcattggttttatcaagatcctatatttaattataacttggggctggacacggtggctcatgcccgtagtcccagcactttgggaggccaaagtggaaggactgcttgagcccaagggttccagaccagcctgcgcaaaagagggagcccctgtctctacaaaaaaataaaaaattagttgggtgtgatagcttgtgcctgtagtcccagctattcaggaggttgtggtgggggaattgcttgagcctgggaggttgaggtttcagtgagccatgatggcaccactgcactcccgcctgggcaatagagccaagaccctatctctaaataaataaataaatcctggtctatttaaaaccctggatttgttttaaatagccatctaatttttatgctacaaaagagttaacatactttcttgtttttggaatctctctgaccttagaaccatactaactttgccatggatatttcttggggcctatttttccaaaataatcattctctttttttagagtctactgttcattttaattaaattgtttcccactatgctggtatgatttcaggaaaggagcatttaagtcatatgttcaatcaaaacttctgcaggtaaattataacccacttttcttttttatttcatgtggtcttggcaaatcatgttttaattgtggtcaaaatctgcatagaaacatattgtttcattgatttgcataatattttggggcattttaaaaatatacatcaatccccagagatcttaagctctacttgacagtatttagcatttacttctgcttaaactctgatatatttgagaaagcagaaggtaccacagtataat

SEQ ID NO: 76245 - DNA, 2193 bp, Homo sapiens
tatctgaatatttaaagtatattaaaaacattaaagacaaaaagacaaaagttttttaaagtatatattttttctcactgcataggatattagactacatatgtgccatctattttaaaactaatttcattcatcaccatctgttttcaagaaagatttaaggtggcgtatgtgcgctcttgtacttggtctcacaggctctgtctctctaacatacaaatctcctggaagtcaaaggtcatgtcttttcttctttctcctccatcttttacatctggctaaaattatattctgtatgcatgaaaatgataattacatattacctggtagttatcagatagttcacaaatttcctggagaagacataggaacaaaacagggccttctgtgatgaagaaagatgagaaaaatggagtatgacatcaggacacttagccttagtgttcttactcattacttttgtaaacctgtaacattttttcccatgctgttcccttttctgcttcatgtcttgattttcccatttgcaaaataaggatggaaacagttgcttcctgtttatttgatggggaatttaaggatgaatgggctagtgtttccttccccagatgtatcaacttaatcttatttattttctgtccatacttctgattccataatgtccaattgtatatgtgttttcaattcttttatttacattcttttccttttctgggattcttcaaaatcaaagcatgttaatcacatttcatagtgcacttgagtacccaagatactcttcagatatgggctaatgtttgaatagctctatttgcttttgagtgtctatcaaaacccaggccccagaccatcaaagcatgtaatatgagaggtgtccccagcctgaaatgcagatcagtttccaaggtgttaaagctttttctgaaagcctcactttggtctgctcagatgccttcttttcttttaacctagttgagcagttatgaaccaatgccatgatgaacagttgggtttgatcagtgcaggggtctattcaggagcattaactgaaaagtctactttctcatctgaaaaacagatgttttaccgtgatcctcaacatgtatgtgcctggcctctctgatactgattgagaaaaagaaaaacagtttagtagtcaatatctggggtcttcatcagctccaaataaactattaacagttaaatttcaacataagaaaaaatagagggccttgggactctgaaacaaaccactcattgatagaatttcactgaagatcagagccaaagtaatgcctaacaatttataaggttgtgcaggggaagaaaactggtcctgatctgatgtagggagtccagtgagagcaagcacttagttggagactcaaagttctgtagcatggcctggaagaaattagcttgtcctagaagattttgaagttaggcgctaacaattataagcatctatcactttgatatggctctcaaataattaaagaaattttgtcctataatgaggtgcctaaaggatataattgtttagtaatatttgagtactatagaatgtcttccagagagcataggttttgggttgccataactgatactgagttgttttttgtttttctgtctgaagtggccagagattcaaatgcctcttgagcctcctcctcgcatgtgcaagtaggactgtggtcctggcccacaggagcctcttcagctttcctccagctgtggcacaggacatgtgttcggttcactcgatcacattattaagtaacataggtattatttaaaaggagaagagtgagggcggagtcctattttatggcatttaagtttggaaccacttatgtcaaaactcatttctgtgtttatatgtacttcctaatttatttataataagcatgttgaattatgaaggagaatgttatttcaaaattctattggaggctacttagaggctgtggtgacactgaatgagagctctgaaggaaatcatagtgaaacaggaaaagttcccttgtccccgtcgcagggcatgcgacaagggggagtggcttgcttcttcagtgccccactgctcaaacctctaggggagaacacagatgggcaggctgtggggctctgaccccacggcagtgtctaggggtaaatgtttacagctgaagccccagtgaatgttgaagaata

SEQ ID NO: 76246 - DNA, 1394 bp, Homo sapiens
ctttgtggttttattagagatggggtttcaccatgttagccaggatggtctcgatctcctgacctcgtgatctgcctgcctcggcctcccaaagtgctgggattatagatgtgagccactgcgcccggccgcaaataatatttcttaatttcagttgcatttatttttaaataggaaatacattcacctggttcagaatttcagaggttacagagctgtacgtaggaagaagttttgttttctcccaattccgcaagccatctgattagcccccttgaaggtagctcaagttactagtttcttttatttccttccataaatatttgatatgcataggagaaagatatatatatatatatgtatttatgtatgtatgtatgtatgtatatgtatgtgagaatgaatggataaataagcattcctctttcatacagttacttgcttaccatacctgctgttctataccttgcttaatttcacttaacactatgtcttggaattcattccatgttagtacataaaatgctgcttttttctttcttgtggttttgtggtatctattgtatagctgtattataatttttttttaactaggtccttactgatggacatttatgttgttgccagtcttttcattacaatgactaatgttgttttcttagttttcacttttcaattcatttcctaatttagtctgagcctacatattagtgccaagaactgaggtatttattgtgttctgacacatctgaggtatttgcatatagacatctgggtacatatgcacactgctgaactgtctaataatagtctctttccccaggacactctcctaaggtaaaacctatatattggaattcttatgctgtacatatatgctggatcacaactcttactgtcagactagagagtttcaacttttaacctgtgatttcagttattgtgacatatcctatgtttcaattagaagagacaaactttatttggtgagattcaaatagcgttcatgaaaacggtatcttttaataaagtgaggttaaaaaaatgggaaccacctaagatcttagagtgagaggagtagagattatgaaagcagttttactttttgattttagggtctttctatataatttcagcctgtatcagataattccgtttaggacacagctggtacatttaatgatcacaaactctgaaggtagtaactggatgcaataatcacacaacaaagtcattgagtaggtttgttgacttatgtcagattactctaaatcttgatgatattgcctggagcacaaaaaaggaatattgtcacagcaagcaatggaggttttgatactcgatcactggagtattcttttcccctaaattttgcgctcgttgtatcataactg

SEQ ID NO: 76247 - DNA, 1068 bp, Homo sapiens
agaaaattagtagaaaaaagccattagaactgatatatattagcattggtttggtggttacttattaaagataaaaatggagaatatttcatatttcttgatagaaaaaaagtaagttgccattcatgcaagtaaatcatattaatttaggtttttggcattttttttgttttctgagagaaacatgaagagttctgcttatttattttttatcttgagaatgggaacacattaacaagtacaagcgacaataaaacttactccataactacattatgaactatattaacttactctacaactcgataaccaacattatggttggttaaataaagagagtgaaaaagacagagagggaacgtgagaaagaaacaatctttttgtttcccaaagctgtaagaagcaatgataagacattgagtgtgtacgtgtgtgcatgttggggtattttagtattgtgtttatttttgttgggagtgagcagaaaatgaagccttcagtaaagaaattaataaatcttattagaacttgttgtaaatattttttaaattcctaaagttggaacactaaggcattatttaaactttatctctgttttttaaaatctgagaaacccattaacttttaccctagaaaatggaaagtgtcatatctcattttacagaggaagttaacaggtttattgtcttgttgtaacatcctaatcctgtgacattttgaaatagtgcttttggtagtgccttgtttttgaaactatagacctctggggcactatggacattttgtactagataattccttgtcactgggggctgttctgtacattgtaggatatttagcagcatctctgacttctacccactagatgccagtagcagcactcccttgggggacaaaattgtccccagttcagaacaactgctgtggacatacatggtggtcctacacaactggagtttaaatatggatcctgaacagctttcatcagtctgatgcacttccccaatatttgtaatcatgaggagcagagcaaaacaaaggcataaatgttggggtaatattttgttt

SEQ ID NO: 76248 - DNA, 1678 bp, Homo sapiens
gtgtgtgtgtgtgcgcgtgtgtgtgagacagagagagagagagagacagagagagagaggtgggggggagattgagatggaaagagtggcgggggatgaaggaagtgggggagagaaataaatggtgtctggggtaattgtgctggtgttttttcctgcatgagagaagcttcagatgtctgtctggctttggctcagttgctgtatgggcgtaactgaagaaggaggttggggtagaggagaaggcaattaaaactttgaacaccttaaatgcccttcctaattaagtggtgaggatggaaaatgaaataccttcttatgcttcatttctgttctccgtttaaaagtctgtggagggatcagagctcatgtccttagaaaggacagaactttcaaaataacaactctgaaaaacaagtttaaaaaaaatttctcatcattttctgcttttcatgaacttttaatataaagccatcattatttttttttcctgggcccccttacctatatcctctccccactctcattagtcactccaactttgaagcacccaattctctggagtattaatggagacagttcaagtatctaactgctgtttcctttgttcaagttgcttttggtccttgctgggaaatgctctgaaaactgaaccagctactgaacacaaaggctgacggtgttgtccctcctggtaatgtactgtgtgatttgttcccctctcctgttcatgactcattagtctctaagtacagaaaaggttgctcctctggaataaaaggaacggacccagctcggagtcctttttcgccttttcctgtgttttatatgggtgcactcacagttctccatcttcattagtgacccagcagggggctggcacagggttgagactagcttttgctggttccctggggtgtatcagagacctcagaactcaataccctactataaaaataaaatactgtgcttcaaacgaccttttgatggaacaaagccatacatcccaatctgcctgggcctctcaaattgagaccatgccaagtgccagatttgcattttgcacatgccctcccaccatcccctttcccccttcctctaaatgtggttcttttggtagcctcagtgtcaggtaaatgtttatgtgtgtgtgaaaacgcagactttggcaaaagaccttttgtatttaaattacacttcaagatagtagtttcttgtaagagatgtaggcagcagatatttgtgggcttttatgccctaaatgatatcattttagatttatatatgtgggcttttatgccctaaattatattattttagatttatatatgtgagcttttatgccctaaattatattattttagatttatatataaagtttaggaaagtaagcggaaactagaagtgctataaaaaactgagttacatattaaaaattcaagttattttttctggttttccagagtggccaaattattttcttatttaaaacctaggcaccctagagccatgtgtgtgcatgtgaactctactaaagtgagacactgacatgaacatagagtccatcagacctttatatcaagagcttggagtactcagagcatcgtatctcgttaatcttccagcattgatgtgctttagctcttgggaacagattactatacttattttaaagcaa

SEQ ID NO: 76249 - DNA, 1253 bp, Homo sapiens
tagaattcggctgtgaatccatctggtcctggactctttttggttggtaagctattaattattgcctcaatttcagagcctgttattggactattcagagattcaacttcttcctggtttagttttgggagggtgtatgtgtccaggaatttatccatttcttctagattttctagtttatttgcatagaggtgtttatagtattctctgatgttagtttgtatttctatgggatcggtggtgatatcccctttatcattttttattgtgtctatttgattcatctcttttttcttctttattagtcttgctagcggtctatcaattttgttgatcttttcaaaaaaccagctcctggattcattgattttttgaagggtgttttgtgtctctatttccttcagttctgctccgatcttagttatttcttgccttctgctagcttttgaatgtgtttgctcttgcctctatattgcatttacaaaaaagtagattgtctcttcctccttgctactgcaaacaatgatgtgaggaacatcctggtactctccagggtatgtactgaggggtaggattgtagggtcatcaagcatacacaccctgatggtcactaaatcctgccagatttcttcctggaatggctgcaccagtctgcagcccaccagttgtgtaagaacactcctgctgccctacttctttgccaacattttatatgtttagactttctcttttttccaaactaatgggtgtaaagtggtatttaattttaagttgcatttctctgattactaatgaaattgagtacctctttatattactagttagttatttggctttttattgttgtgacgatttaagatttcatgttgatgtagatcttaattttgagttggtcaaacatatcactttttaaaatcttatactttataattttagggcccagggccacagagttattttctgacgttttgttttctgttagtcacatttacattcaggccttgattcatcttgtggtcacctttggttatatcagcatcgtttgaggtagcacattcacactctcaaatacagtgtgatagtttggtatgcactagagggccatgctgtatcatggattcattttgaaagagtatttaatgaaaaatataaaagaaggctattcatagcatattgccatttatgaaaatttaaaacacacacacatatatgtaaaacaacacttaatatttttcaaagaaacactccatatc

SEQ ID NO: 76250 - DNA, 1454 bp, Homo sapiens
aaaatttgatgatatacagaagcaatatgtgagtggttacttagaaattagatgaatgagttatttcattggcatttatcatttgatgtgtaggtttttcctatttataacaaacattgaacactgactaattacctgcaactgaaagagggttaaaaaaaaaaagtcttagttgagaactgtattctcaacttattttcaacccaccagtgctcttgaagagtatgatgcactccgattaatagaagttgtgctctcttgggatcatgcttaattgtgttacaatataaagaagtcttcctccatggtatttatgggtatgaaaaaaaaagaagtctttctttgccagatatggattttgtacttccctcccttcaatttcatgtatactgttttttgtttttatttttctgattagttcccttggtatctgccctgccccatccccattcattttggtattcacatacccaataccatagtagcactttatatttactttgtttacgcctaattacagcctgcatattctagataaaacaaacagactcagccaggcacggtggctcatgcctgtaatcccagcactttgggagcccgaggtgggcggatcacgaggtcaggagatggagaccatcctggctaacaaggtgaaacaccatctctactaaaaatacaaaaaaattagccaggcgtggtggcgggcgcctggagtcccagctactcgggaggctgaggcaggagaatggcgtgaaccagggaggcagagcttgcatgagccaagatcgtgcctctctccagcctgggtgacagagtgagactccgtctcaaaaaaaaaaaaaaaaaaaaaaaaagaaacagactcagaaaggttaagtgatttttcgagggccatagagtaataagtagcagaaccagaatgtgaagccaagtctaactctaaagcccatctttttcatacttgactatcctatatttttcatggatattctacaaaatccatatttttatagagtatgatgtcttcattacgctcctcaatctttgaagaggattttaaccctgctctttggttcagctattgctgaatattgacacctttaagctgcaccatagaaaatttgtattcaggctccttttagagatgagtacttcgaactctctgctatccagttgctcaaaagtctgtttccaaatgtatttatagaatattgtgtgaatgacttattctccatccatttttctggattgtctgcattttagtttcaggccaagtcgtaccgtccaagagctatgtgcttaactcagctgcttttacctcttgcagaggtactttcttccttcctcctactccttttcgatattaaatcactggccttcaatgatggatgttatagcaaacagctgaataaaattcagtattctttctgtggttgagctttcattgaggagcc

SEQ ID NO: 76251 - DNA, 1013 bp, Homo sapiens
tcaatataaaaagctattttttctgaaaattagtctccttataatttgtatttttcttaagttcatattttttagtaaaagtgtaaatttcataatttttattaaaacatttgcctccctaaagaaatttaactattttggttttttttttaatctgagaataggagtagggaaatttggagtctctaaggcatgccatgtagaagtttttgaacatttatatagaatggattgactttttctgcttgttcttctgtctgttgcctagtagatgtctctaactggatattcaaatgacacttcagaccatctgaaacttcacgtattatttccctcccaagtaaactagtcacccaaaccatatacacaacagtcagactcatttgctcacagctttaaagcaggttcttttccatttccactgctattacctattccaagtgccttgcacaactttgcctaaggagacactaagaattcttcattgaagagatgaagaaatgaatgaatacagggatgagttttcttcatttcattgcttctgtctagaccactggaaaaacgtatcttcctttattctgacctcttctaattcatgttctacaaagttatcaaaatgttattcttaaaatgcaaatcattcttaaaatgatatacaaacacacatcattccaggattcatttagtttagtgccaaggcctttcatgctaagttccctgcatctttctggtcttacctcccaccatgtctctttactgactttgttgcatcatcacgtggctgcatactccatttcctcccatgtgctgttcattctgcagaacatctcactgaagctttacctggagaactctactcactttgcctgtcggattcagatgtctttcctacttgttctcatagacatttatgtacagtctcgtgactcttttcatattaaactgttatcatgactgacttacttatctaggggctttctcttaatcaacacaggttctttattcctggatgg

SEQ ID NO: 76252 - DNA, 2740 bp, Homo sapiens
taattggacttacagttctgcatggctcgggaggcctaagaaccatggtgggagatgaaaggcacttcttacatggcagtggcaagaggaaaaacgaggatgatgcaaaagtggaaacccctgataaacccatcagatctcgtgagacttattcactaccatgagaacagtatgggggaaactgccccaatggattcagattatctcccaccaggtccctcccacaacacatgggaattatgggagtacaattcaagatgagatttgggtggggatacagagctaaaccatatcacagtgttaggaagaaaataaagagggataaggaaattctagagcatatgctcaagcaaggcatatctaaagagggagcctttgagcagagacctgaatgcaatgagagacaagttgtgtccatggcggtgttgctggggaggtggttctgggcagagagaacagcatttctgtgctcctattatgtaccaggctctgttctaggggttctggagacagcaatggagaaggttgttaaacatcagcattgtttattatttaaccatgcagtctgttctttttcaatattatgtcatagttcaaaactcctcctttctttaattgctaggtttaacgaagttgaaaaaccctaacttgggaaagtctctttgttctccccagctgctaatcacttcctactctttgttgtggaagagaacacataaagtcttattatttagaggcccctaacagaataggatactggtcctggggacagatccccaactatctgaatttaatcatgatgctcagggatgtgtgaaagtgtcttaggtgttcatgtctttgacgtttgacctaggttatagatgtctgtgaaattctgtcaccataattagatatagatactactgatttccttttcccagtcttccaacccagcctatgaccctgagtaaaaccttcttaaattcttttacttcagtagcacacaaaaaatcataattttggatcctgttccttgctctgtcacctgcttgctgcagttaagtctgctctgtggcagttttccatttgcaagcagggcacccttccagttaagttgtaaaattttatgtttaagtaagcccctgtgcccttgaagaataggagctacaggaatgtagagtccaaagagaaaaaaaaagaaagagcattcctaagaaaactgtgtaaatttgcaaattcgttttcttctggtggcagctgacaggtggaatgacaacccaaccaagtaacactaggcccttgtgataggagggaacttaatgctgcggttgttctgcttagatggaattgtgtggggctgtgccaatgcctgtattgagaaagcccagtcgagcagaagagtttttggtttctgcatttagaactgccgaacaactgaggaaaaccgattaaatctggaaggtggcagctcacttgacaggcttctccaggcacctttgaggagaatcaaagataaataaacacattttatgagaggagtatggggtgagagggagtgtttggacaagagttaaaatttcaaagggagggggaagttctttttgacttttctcctgattagactcttgcctcatgtctttgttaatgtacaaattagagtttgtccctgtctacatgggtaagcttgatgggaaaggaagaagatagaagtatattttcaaagacctcaactatagaaggtagaaggaaactgatcaaatatgaatttctttattagaaaaaagtggctttaaaaactattttataagtcatattggatactcatgtgcctgtggaacatgcaaaaactctggcctgttgcacagaggtttgattttgaaactgtctaattttatttatttaaatttttttagagacagggtctcactgtgttgcccaggctcttgaactcctgatctcaagcaatcctcctgtctcagcctcccaaagtgctgagattacaagcatgagccactgcacgtggcccaaagtctgtaatttttttcagtaaagattgatggactttcattacggcctggtctagtgtgcagtgagttgccttgaggtcaggtagtacttgacaccccttatttactgggtatggaccctgttctctcatccttccattgtgctttactctttttttctccgtgaacaatttttacttgagcttgacttacctcaaaggggctatgaatattgaattggctaaaaataattcataacattctagatatatggagccttagagatcattgccctcttccccattttgcaaagagtaaataaagtgaagcccaaaagtgttaaattgctgctggcctaggggcattcagctaccaaatatgtatgcaggaactccacccagatcctgaccacactattagtctgttctcacctgctaatgaagacatacctgagactggtaatttataaaggaaagaggtttaattgactcacagttctgcagggctgtggaggcctcaggaaacttacagtcatggcagaaggggaagcaaatatgtccttcttcacatggtggcaggagagagaagaatgagctaaatggggaaaagccccttataaaaccatcagatctcgtgacaactcactcagtatcacaagaacagcagcatgttgtaaccacctccaagattcaattacctcccaccaggtccctctcatgacacatggggataaggggaactgtaattcaagg

SEQ ID NO: 76253 - DNA, 2416 bp, Homo sapiens
agtatgatgataaaaaaacataaaatgaagtggcccagaggcaggcaaccagaaggtgaggaacaaaaccaaaagtaatagattattagatgccagtaactaagattctaaattattactcttacgaatatagtgtgggttgctttaactatttcgttataatgtttatgtctgcacccatttctcatttctttttcctagtgtgcaaagttaatttaaagtgttagtacaaattgaggaagggaagtctctccagatttcattagaggatagactgaataagaacatgtcctacccgcaaggacaaaggagaagaaaatatattcttgactgtttcagaccacttcagataaggaggagacaatttaaaaaattaatttaaaaaaacacattaggatcaaataacccctccaaagaaaggtgttctatggatgagaaatgtaattactgctgtaaaaatgtagggaattttgcacgtttaatatagtttgtctcctattagaagcactagttggcatttttcagtattagggttgtggcttgccaggcccaccctcctgctgtgtttgtttcagggaatagaacttacccagtcgcaggtttcagaagagctgaggtaacctccttcaatgtgacacaagtactgtttatgttggagacaaatcccagaaactcaaggtaacaacgtacacagagtgagagagtatatgcaagagatttttatttggcatttttactgctaacagtctacagaagttttagtatttagtgccagttcaggcttaaggggtagtttctatttctgtgtgattttgaaaggtttaaagaatcagcaaattattatataatagataataaagaataaagattctggcttctatggaagcttgcaaagatatgagggagggcaaacaactgcttctacgtgttttgttttgttttaagaactcaaaaaagcatggtaggttctttgagcaaggccttagttgtcaaaagtttctgaagccctcaaaccaataaatagtattattactaattaaaagagcagataaactgagaaacaaagcacttagacctagggtgacatggtgagaccaaaactgaattctgtgtcttaaaattcagttatctaatctccccacttcattgcatattctactagcagtcattcagtaaagtacctttcatcactgcaggagtctctctgaacacagtggctttggaatagggttatctccagacattgttgacatcatgtctctgctcacataccaattgagtgaatattggcccacatgattcttgtaagtggattacaagaaatccacgatagacttcattcacttttgatgaaaccaagaactttccctcttgagctacctaatgagatactgttatttgtttattatgcagggtacaggttggggcttgttagctctctgaattcttaagcactcaactgaggaaatcaaatgcatgattttactatgcctgcacaggagttggagaaattcataaagtttatactttactagttttcttaagaatacagatgtaaataggctgttaagtctgcccaggcagaactgttgtttcagatgaaacttaatgaccacaccctcccaccccaatggagattgaaacagttggagaaactttagtttgaaaaatatttactttaaactaaactccaggaatcttttttttttttttccccttggtgagaaagatattctcaggtctattcggagatagcaatatctttaaaatcatgcaagaaacaaaatttcggagcttctcagtggttaggaatagcttcggacaatttacctaattgggcttcagtttcctgacctgtataaaacaagaggattggtaaatgctctccaacattgcttgaagctcctaggttctctggttactttgttatcgtcataaaatgataatttaaaaattgatgtatatgcatgattttatgtatgtatgttatatatgtatgattgattatacttgcctatgtatggaaaatttcaggttgttaataagaaactcgtttcttttggagaggaggactatgggcctgggggtcaggatgggagaattttgcattattttatactttctgtttgcttgttttttactaagtatgcattgtttaaagattttaaaaatagattggttttgttattattttaaaaggatgaaaggaagactttcaaattattgtaaaatctatacccaggataataataattggaatttcatttcagactccaagtttaaagtatttgtaattataagtagacttttgcttttattatagtaagaaaagtcttttaaattctcttcttcaatgaaagcaaccacttttgtttggtgaaacaagcagcatttacaagcacagaaacaaggttta

SEQ ID NO: 76254 - DNA, 1633 bp, Homo sapiens
aaaatgaacttcagtgtttgtgtcacattggagttgttaaagttctcctttgttctttccaggtttgcattgcctctggctaaatttatttgtatttccattccatgcagggtatggtagcactgtgattcagcttacttagtacttcattggaacgttgggttatttatgctaaagtcaataatctcatagtgatgatgatgatgataaccattgctgtcacttattgagtccttacttttggtagatactacattagacttttaaaaaactcatttaatgggtattcattgaacaccttttatgccccaggcattgatttaggagccaaatacataatagttaacaagacaaagtcctggcccataaatatattgtttctaatccacataaaaccttgcaaggcaggtattgtcttaattttatagatgagaaaactgaggctacagaaggagaacaaagttttcagcattttatagcctgtgagtgaccagtctatttaattccagtctgtactttgctctgttctcctgcctcaagatagatcagtattatttccctcttcattaagatgtttataaacattcaggactggtataaacatgcttggctatgacacagttaagctgacagggatataggatgtgaagtctataaacaattattccttttttaccttagtgctccatgagagctagaagagacgctaaaacctagtacttttcacatcaaaaaacgtaaaatactaaggaataaattgaacccccaaaagtataagatttgcacactgaaaattataaaacattgttgaaagaaattaaagaagcctaaataaatggaaagatgtcatatattcatgaatcaggagacttaatattgttaagatggaaatactatctacgtggatctacatagtcaacaaaattcctatcaaaaccttaaccaatactaaaattcactgggatccagaatagccataacaatcttcaaacaatcttttaaagaagaagaaagttggaagactcatattttccagttttaatactcagtataaaactatagtaatccaaacagtgtggtcctagcataggataaaaatacagatccatgaattataaatgagagttgggaagtaaactttttcatttttgattaattgaatttttacaagggtgccaagacaattcactggagagtagtctcttcaacacataatactgggacaatttacagccacatacaaaagaacgaagttgaattggtactttacagaacacatcaaatggatcagacacctaaatgtatgatctaaaactataaaactcttagaaagaggccatagagcacaatctttgtgaccttgaaagacagtccacagaaaagaagaaagtaattgcaaatcttacatatgataagggtctagtatccagaaaatatggagaacccttataatataccaatagaaagacaaataattaaaagtagattaataattttaatagattttttccaaagatgatgtgcaaatggccaataagcacatgaaaatatgctcaacagcatcagtcattgatggaatacaagtcaaaaccataataagataccactttttaccactaggatggctatgata

SEQ ID NO: 76255 - DNA, 2104 bp, Homo sapiens
ttgtctattgccttactttataccagctagacttattatatacaggcaaaaactgatacagagcaatatgatatattttcttcttgattccttttttaaaaacttaatgttatattacttttcaaaccaagagtggcatattgttgtaattatatcattaaaaaatgtgtttattttcaagagtatggatttgatttagaaactgcttttcctgcattctctattattcatggcatttgatgaccacacacttgaagtgctccctggccagagcgtaagagtcttgggggtggggtcagtatagaaatgattaatggtttgttaaaatgcaggcaagttgaatatgacttttataatgtggctgtgagaccagcttatggtatgaattcatacatgtctctctcttttgtaaacatgttatcgaagtaggttttatttcttgaatgctctggcctggtgctaatgagatgtgtgagtgtcctacccaaagcattatgtaacaggaagcaaagttttctgagggaaataagaagcttactagaaagagaagataaaatctttgctggggaatggttcttttccattagcattcccagtgcatttctccagaagtgtgcctaggaatcctctgctgtagttgctagataatattccctctttttcagggtgattggagaaagaaagcagttatttggggcctggagtatatagatagcaaggagccatggttctgaatgtggtgattggcccaggcattcttgctagtgatggaaatagagggctgaacaggaaagagtgggcagcagtacttgataacatgaggcactggtaataccaacttcatgtctggtcttcccatttaaaatggattatattttagcctctcgtcagattgaatgctaagtatccctacagtcaatgcctgcaaaatctttggcgtacttacttcaaccaaaacttaaactcaaagaggaatatagtgtaaactttggtttaactgaacatagaaagatcacacagagagccctggttttattgcttggaaacatgatgagatgtaagtactgtcaatagattggagactctaggcccaaatttcactgaagttcataaatgtctgctaatttcagggaccatcatacttaggagctagtatactaagaaattggaaagtaagtttaacatgtcttttgtgaaaggtggaaatttaagatagggacacagctgtctgcaagggacagtaggcttgttttttgaggcactctgtggcattcaagatcctaggggatttgaaactcagagaatggtacagtgaacataagaggggtggaaaaaagtggaggatgaagtggttatctgtgtcaaaaggaactgaaaggtgttcatactgttccacaatcccctcttcttaccattattagttaggtaaagagacaaaactgaatggcttccctttctccatctgtctcaagattgtttcctgccttggttgaaaggaaaagagggagggagcaaagtggcattacttactttggtctctctttttagatctttgggtcccaaaagtcttattggtgagaatatctggtttcataagcagaagtgggaaaaataattattactacttattgaacataagaactgtgctaaacaccctaataacattatttaatccgtacaacttttttgtataagcatttatctataagttaatacatgtgaagcacttagaacttagaatgagagcccattaaatgttaatacccattttggagataagagaactataccttagcattggtagaattttaatacatgattgttaaactcaaaagcccatgatctattatgcgatactgtggctctcttccttaagaactcagcttcctttacaaaaatcttccctgatattctcctctatatgcatttagaatcatacctgtttttcaattctatattttgactaattccaggttgtcagtcctaaatcctcttactctccctgcacttatccctgaggaagttcattcttcagattatcaaggtctggaccaaatttatttagtgagaatgtggaatttttcttacaagattttaaaatgac

SEQ ID NO: 76256 - DNA, 1733 bp, Homo sapiens
aagaatagaggccaggaataagttttcagaaacaggatatcagtggttttaaaagcaagcaaatttatacacacaaaagctctcatgtggttgtgctgttacatgtcttttcagttcatccatcttaaattatttgcttttggtgagtaggtgtctgctttcaaggctttctttcacatattgaatgtgtgacagttctctcttttctgagaagtaaatacaacacaaccccactacaataccatcctacgtactttggttttgggtaaactgaaaatccagtaatgttcaccaaactacttcctttgtccagtacctctctgttcctgccaaaatacaaagggaaaggaccatcttgggcaggttgccagaagtgccacctgggtctcctgaaatggctgtcagcaagaagggagcaattacatcccataacagactcaaagcagatggtcacctgcggtgataagtattacattattaagcctttgatttgtgattgtactttgtgctttccaggcactgaagttatgttacttgtgcgatgttcctctctgttcccctagacctcattgctcgttgtttggccatgtgttcccatggcttatcctccaaaaagctttattctgcaatcttctaactctcctgcaagaggctagctcataataggatctctgccaggccctccagcagtaggtatggtgttattacatggagttacctttaaaggaatttttaaaagcctttggggctttactgtggaagcataacttagtcacagtataacctcatataggaaattcagttagtgttcagagttaggagtcctagtataacattgcactcattgagatttagtctctggagtctcttcttccattgaatttttatgttttcagccctatttaacaatggtcttccataatgcattgaggctcaatctcaactgtcctcctttgagatctcgcttgccatcccctccacaccttctttattttctgaagatttagaatacaaatttatagtctctcctatagctgaagttaggagtcacttgattcatagggtgcctagctccctggactaagatagatggcagaatgtgcgtagagatacatgatgacacagtcacaaatctaattcttcatgcagatagtctttcaaaattcttagcaaattttaatttttaatattgtgagcctcagctgtagtaattcagatttaattatcatgtgatcatgctggggtgattgtttttagtgcagacataggaaatcaaagttggcagctgggctgcagctgtgccccagctggttttatctgagttgaattcagagggagaagtggcagcatgctcaccagctccagaagatagtcttctttggtcatacaaagcaatacctgctagatgctttttgagctagtgcaattaacacccaattagtgagacttcactataaaggtattaagaacatagtccatgtgtagtggacatgtcatcattgtttctttacaaattaaataaacttgctacgtagaaaatttactttatataattagacagtgttttccctaaattacaaaaacatgctcttaaatttggctgtcttaaagttctctgaacttgtaagattttgacctaccatatctaatttttgcctgaaaatattttatagatgctgagtacaatagcatatttatgtttaaaaatacgaaattggtttattgatttttta

SEQ ID NO: 76257 - DNA, 1042 bp, Homo sapiens
gatgatatcagctgggcacggtggctcacacctgtaatcccagcactttgggaggccgagatgggtggatcacttgaggtcaggagatcaagagcagtctggccaacgtggtgaaaccccatctctactaaaaatacaaaaattagctcggcatggtggcgcacacctgtagtcccagctactcgggaggctgaggtgggagaattgcttcaacccgggaggtggaggttgcagtgagccgagattgcgccactgcactccagtctgggcaacagagtgagactccgtctcaaaaaaacaaaaccaaccaaccaaacaaacaaaaaactgttggttgcatttcaaaaatctaactgaaaagactttgtgcacaagcaactgcatggaatttcatttatccatcttggataaaaagcctagttggtcctgctatgatttgactctgtgtttcttcaggctctaagtattccaaaatgatgcattagctccctggactctctgtgcatcagagacctaggatgtgctatttaaatcatctggcaaattgatgtgtgggggaatggaactctttcccccattttttaaaaaaaattaaattttgtaatggtggcacattgtataataagcacatatgaagattggagctatcattttggaaatgaccttaaatagaaggaggaaatgatagactcatagtaccatccaacagtgtgggttcagcctattttccattcctaccacagagctgctgggtgactctgagtaagcagtttcatccaattttactgtaagcctttgcattcctaatagaggcacaatagtattggtacctgtcttattcagagagtggcagattaagaagactttgggtgatttctaacttctagcagccgtacacacgaaaaagtctgtacaatatagtgtgtttttgtactcagatatttcatgtgatggctctattttttgaagccatagaataattcttccttaagtaaaacagcaaactagctccttgatgtcactgagtttgtgaattattttc

SEQ ID NO: 76258 - DNA, 3450 bp, Homo sapiens
atttaaaatgttacatcagggagtcatatgctttatggtgcactcatgccagcagtaacattgttgagctccatatgagacacacagcaaagtggtttaaaaattgcatagggctgtagcattcatttacacaacattcaaaacaaaacaattactgaatcaagcaagtggaaatgcagaatctaagggggtgaaaaaagattgtcttgtgtttacttcttttttaattctctcattgtcttcagttgatattcctctcagatgccagatacctgtcattgttgccagatgactggactctgctggctcatcaaggggctgtggcagtgcttgtttccatgagagctggaagaaaaactgcaatggaaaagcacacgcagtcgttcataagtagctggctgtgtaattctcagtgccctgtgttcatctgaatgtgaacttaatctgatattgcttagaactggggcttcatcaatgcaaatgactgtgcttgcaagctgaacttcaatatttgtgagcagtggcagagcactttggttaatgtgtacatattcaggtttgtagaaaaaaaatctgtgcaatttgactgtggtcagtttagttgccaggagaattggatattcctgggaaaagaaaaaaagtgtctcacttctggagccattgtaaccatgtaggtatttaagaggtttttgttttgttttgttttgttttttcaaagataaatccctttttggatgattagtcagttgatcttaaatatcatgtaattggccatgaaaattgatggaaggctctgttcttagaactgtagctccattgaaactcattctcatggtgtcatttagaaagcaccaacgtcccataggatcacatgaaaacagagtctaaaggagttatcaaaatgatacttaagaagttgaagtaagtcatcccatatctgatcttcatgatgactatcaacacttatgttagatgggcactctcattaatcctggtgttttcccatgatttctctggtgctagatctgatatgaataacttggttgcaataattataatagaagggagattgaattatatacatctttgttttatagctatacctttttttgtgctaataattttttactgtagtaacaacaaaaatcattcttttatcagcttttaaatattcgtattcataatagcacttcccttagtttatgtagccttgtttcctgagcatgtttgctgccttgattctattgttgtgcatgctcttgttctgggggagccatttaggttttgtgtatgccaaaaaaaagtctcatactcagcagttacaaaattactttccttctttatggattactttatattcaagtcctccagtcctaagtcgttgtcagcaaagattggaagcagcagtcagaagtgttctactcctttgaataactgcataaaactatagcccctcaccaaagaaaatgggttttcatgtatgacacgttgatcagcatgagattgctgctgagctggagaagagactgtgcagtgacttacttgacagcagaggtgctttttacttccttagtactcaaactgcagcatctgttccataccagaagtgagcagcttgttttccaatcaaaatggattcttctgcaattgtaccttttttggaaattaggtacactttctaacatatatgttttgaggcccttgagtatttgaaacatttcctagtctactttcccagacttaaaagatatcatgtgtgaaatatgtggaatgagaatctcaaggtgtttgggtggattcgttctacggagaatatatttgcttattgcagtttctcaataaagactttaaagtagctgagggaaaatctaaaagcacctcttcagaactgaaataatttatgtctgctggtatacatagaaccttccagagtataagctaatgagccacctcagataccacctcctttgtgaaaccttctccagcacccttaaaagaaagtagttatcctctgctctgcttttccaaagccctttgaccctctgtaaaagggcttatctcatatatgtgcctcaaattatattttttcatctctctccctatttatcatggaaatcagaaaggagattttgtcttatttatttttgtatttcccaaactactccacccagaccattgaatgtagctatagatcaggcaacaaccccaacccacctggtttcctcctgagtggtctgttcactccctgtgctctgctaggattatatgctcttaaaagcactattcacatactgtttcaacgatttgtttatatagctgtctcttctattagactgcaaattccatggggataggactaagtcctccatctgtattaacccagggcctagcataatgctgcaacacagagtactcattaatttgtattgaatgaatgttggatttattcagtgaatggtggccttgagtatatgaatgggaaatataggggctcatattccagttagcggtactgtatagtgataattcataaataacaattgtacattgtaacacacacacacacacacacacacacacacacacacacacacacacacacatacacacagtaatgctttttgtccctggaaaaccacaagtaacaatgaagtattctgctttattatgttgatatcatcatgataggaaggatatgttgcttattcactcttactttaaaacccagagatggtattctgtcatttcttagaaggttaagtagaattgatctgttatcagatagaattaaattttagagttttcattgtatctcatgatggaattgcctgttagtttgtgtcccctaggaatgtaagttccctgtgagtaggtgctataccttctatgctgaggttcctagcatagggcttggagagcatggtagatgatcaacaaatatctattgaatggaacataaaaatgaatgtatgatacaattagaaaaacccataaaaattcgttagctttaaagtgaaaattctttttaccgcttgggaagtatcactgggaccaaatggcttttaagagaaatgtagaaaccttctgaacatggcagtatttagaagctggaatatgagtttggttttgattgttccaagttcttcctttggaagatcaaacttcattcctttagaagcttaatcctttttgtgtctctatctttagcttagattctcacccagagaaatagaccttcaataaagttaatgtgaagagaagtcaattagatcgcaagaggagtttctttgcaatcaaattacctggaattttcaggtcaaacctgacagagtgtaggtttcattaaaaaggggcttataggccaggcaccagtggctcactcgtataatcccagcacttaggccaaggtggatggatcacttgaggtcaggagttcgagactagcctggc

SEQ ID NO: 76259 - DNA, 1047 bp, Homo sapiens
ggcaacagcagtgaggtgcctgtcacttaaaaggggaaattagattttcccctaaactagaaatcgataagcacagggtcacagtggaaatttacacaattttcttaaatactatgatcttgaaagaataaaagacttgactgcaaaactaaatagcagatattagtcagaaaagatgttggtcatctatagaagcatggacaagatcaaatcgcaaggtaaaggttgcctgtgcctacaagcagagtgtactccagtggttctcaaactttagtatatactttagaattaactggaggccttgttaaagtaccaattcctaggccctatccccagatgcttatggcccaagaatttgcatttctaacaggttcctagatgatagtgatgctggttggggaacaacattttgaggatcattggtctataggtgtgttagttttctactgcggtgtaaccacaaacttaacagcttaaaacaacagccatttattagctcacatttctgtagatagaaatccaggacagtatggctgagttttctattcaggctgaaatgaaatcaaggtattggttggcagtgttcttacctggagctcatagtcctcttccaagatcattccttttattggcagatttcattcctctgcagctttagaactgaagtcttgttttcttggtatcagccagggactgctctcaactcctagaggttgttctctggtccatagagggtgccttcagaggagaaaatacagtagtgtggctgactcaagtgttcctggtctatgtagcaattgattttctctgaggagattaataaatcaacattcttattatatacatcagcctctgtgaatctgcttaatgtgggtctcctcttgctgtgtttaaagattgggttttgaaactgattagctgagatttagatcctggaatgaagataaattcaccaagatgaaaaccaatgttggggaacaaactgggcagccagccctcccttttaggaatcatctctctattgctttacaactgtatttgttcttc

SEQ ID NO: 76260 - DNA, 2397 bp, Homo sapiens
tgtgttgcccaggctggagtgcagtggcgtgatcttggcttactgcaacctccacttcccgggttcaagcgattctcctgcctcggcctcctgagtagctgggactacaggcgcacaccaccacgcctggctaatttttgtatttttttagtagagacggagtttcaccatattggccaggctggtctcgaactcctgacctcgtgatcctcccgccttagcctcccaaagtgctgggattacaggcatgagccaccatgcctggccaaatctgaatgatttttttaagattattttggcttgttaagaaaacttttttttttaaataattatatattcatagcaaggtacaaagaaatgtacagcgaggtcatatatatccttcacccagccttccccagtgttgacatattccatggctcaagtacagtatcaaaacctggaaaccaatatgggtacaacccataaaacttatttcaccagtaatgcatgcattcatttttgtgtgtcatcatgcgtagctttgaataaccactagcatccatcaaaatgcctcactgtattatcagaagcctctcgtgccacatcctgctagccacacccaccccatctcatattccctaacctctggtaaccgtgaatctgttctccatctctgtaatcatgttatttcacaaatattacataaatgaaattatacagtatgtagccttttgtaattggctttttccacttttcttatggttcatccaagtggttatgtgtatatagaattcatttatttttattgctgagtagtattttgttgtatggatgtaccatagtttgtttaactattcacccttttaaggatatttggatagttttcagtttgggactattatgaataaagctgctctgaaccttcatgtacaaatttctatgagaaaagttttcatttctctgggatatgtatcaaagagtacaatcctgggttgtatagtaaatctatttttagttttaaaaggaactatcagactgttttccagaatggcgattccattttacatttccaccagcagtgtatgagtgatccaaaatcatttagcgttatcattaatttttaaatgccatttttgataggtgatagtaatattgtgattttaatttacatttttctaatgactaattgatgttaaacatattttcatgtgtttacttgccatctatatatcccgcttgagtgaaaggatgtctgtgtatattttttgctaattttctaattgggttatttgatttttttaatgttgaattttgggaatcctcttcgcattctagatacaagttctttgtctgatatatggtttacaaatattttctcccattctgtaaactaccttttcatcctgttaacagggtttttgcagagcaaaggttttacattttgatgaagatgattttatgttatttttatgattaatattttaaggaatgaagtatacattttgcatactttttattgatcttaagaattttaaattgccaaattacctgctctaccttctttttcagctcagacgtgttaccaatgcagatgcagttaaattttaagatgagtaaaaccattgagtacatagtgtttaagtgtagtggaatgtctgtgtgttctactctattctaatacctgcttttctctagtgttttaattaatgtagcaaaggaagatctcactttctgaggtagtttcattttgagtttcagcaagatttaataacaccggaaagaggacatgtgattctacttgtacaatggattattgtaaataaacacctcatattactaatatttttctttctacacaatcccaaccatattagacagtgcagcaacgtcccatgttgctttgtttatataaatttagcctttagcttttccttttggcagcccatttgttcattccagaaatactgcacacctaccagctttgtcaagattgtgctgggttcagggttataatggggaatagtatacacatagacataggttctgccctcatggagcttacaatttggttctcatttcttattatggtaagcttgtattgcctgtcagtatttcactgatttgattgaatatccttacttcccatcttctgtcacagaatcttcctcattcatccaaaacgcaacatgtccaaatcttagtgaatgctttcagtgctttgggagtggttacattccattaagattaaatccaagccaagcaagtaatacttacaagcatgcacaggagaatatgagatgaggagagaaatcctcatacttagttaatttcttgccaagtagagaaattttcagtagagccttaagttacctcagggatggctgaagattctaaatatgagattccaaagtccac

SEQ ID NO: 76261 - DNA, 1570 bp, Homo sapiens
gccgagaccacgccactgcactcctgatagaaggaaaactggacctaaggatttgagttttgacattactagtacaagctgtgtgtaactttggggaaggctgctacattagtttcagtttcctattgctatggtaagaaattactacagatttaagttacataaaacaacccaaatttattattttatagttcttgagaattttaaaatcaaagtgttctttaatgactacaaaagctaatacactgttaacctctttccaattctattaataccatcattatctttaatagttgcatggaatccacatggaatgcaccataaatgaatcgaaatcttatgttgaacatttgtttactgtcttttgccattataaacaatattatgatgaacatccctaaatatatgcctttgaatacttgttcaattttattcattggggcaaaaaggtatgcacattttaaagaactacagtccacaggtgttcatgcaattgctgagggttttctgagaaggtgaacaagagcagtctatttcaaaactactgaagccctttttgcatgactgactggcattccctaactgggccttcttcgttgccctgacactgcctgttgctgctcctctgagaaggaatgtgtattcacagatgaggcgctccattagtcatggtgcatttcctgggccctggagacatgggcatgacatcaccaagggccaatgagaaaggattctctgtagcaagctctcaaaactctttagaggattgtagactgtgtgttctgttcctagccctcagggtgtgatttgagcttgccttgctcatccagccatagtctgggcacaaaagtctagcttacagacccaagaagccaggacaagcttgaaaatctgcagagctgcaggcagattcccatttagtattttttttttccagggctcaggttgttattcccagagttttccactcctaatgatgttgttacttcatgtggtaatgggtgggtggtgaaagatgaagtctgcattaaataaaagacatttggcagttaaaatttctgggtaagtataggttggtagcataacaaaatcagaagtacattttaccgttttgttacattgcttttgtgtgtagtttcacataataaaacaacatcttttaacagcaaaggctcctagcaaaatgagtgtggcttaaaatagggcaattaccaaagaactttactgaggggattagtaactcattaaatcttttctcttcaaggagaaaagaaacttaaaaaaaaattctcttttcttgggttttaagcattttggataaaaacttttctgtctttctctgtatctgtctctctctctgctccctaatttatgtatttatttatgaaaatgatttgtggaatttagtcagggataactttgttaattctgcacaccaggaagtctattgaaagacttatttcctaattggcccaatcttttgctaacaaggtataattgtaaaattatctttttaaaaaatagtcaaggaaattaaggctcaaaactcaatgtgagcttacactgaaca

SEQ ID NO: 76262 - DNA, 1047 bp, Homo sapiens
tactgaaagtcactgacacacacttcccttggaatgctgctgatgtcatggaaaaccaggaccttagcaataacccctaacaaccacagctacagtaaacagtaaatgttacctccaccaaggcattggtttttaaagagttttaacaggccagggcttgccagccacaactcataaaaatgttcttataattttaccctactctctaaaagtgctggataactgctgaggtttctctgccacttgggatgcaaagccaaattcacgtcactttcaaggttcactaatcagaatttacagcatttcttttgcagtcctcttcataccccctgccatgctcacagagttaggtctggtagatttcatactttttcaaagaagtctcttgtcttactgagttgtctcaatttctggtgatggtgtgaattaatgtgccaggttttgactagtgttttattagtctagaggttaggcaaatctggttaattgatagcactcaatctataggttatattccaatcaatttgaaacaaccgggcaaagtggcattctatagttcaaactctgaactgggtattgtcaaggtgaccatataatttatcatcaaaactaggatatttttgaaagtaaaggggctctattaataattactctgagataacagcaataaaccgggactgtcgaagcaagttgagcatagggtcacccttgttactgtgccaagagtcaccatctagctgtcatttattaagtcagacattgaagaaacttgcaggaatgcagaacagtgccactcttctcatgaacattttttgttttagaaaatctagtcattctcataaaaatgttatttatgataagatgttatgagtttattagtgttagttttaaatgaattaaataaatgctttaaaattcatctattttaatttctaatatggtaaatataatcctcccaagtaaaagctctataggtcttcaataatttttatattcttaaagggaacccaagactaaaagttttgagaattgctgctttttctctgc

SEQ ID NO: 76263 - DNA, 1424 bp, Homo sapiens
cttgttcttgaagtccctagttgacagataatggtgtggaaggaaatgatacatggcagagtcctgaatgaccaaaatggactttgtccacacttatgtgctaatctccaaagaagaagaaaatacaaatgggccagcggccaaacatgaaaatggtgacagtgagcaaaacattgaagcagacagctgaaagcttcatttcctggcccggctgccatgagaaatgctgtgcttgccaaacccttcaggctgtcaaggccagaactttggctagctcttattttgagctccccccataccacacacacaaaccacacaggaaaattgtctctctccctttatatttgtgccttttggctacacttctatttatgccaagtccttgcctaatctccttccttccagctgtcactatactctgcctgttgctttctgggggctttgaaaagcagctgcaaccttcagaggaagcgcagggtggttggcattggtggaagggtattgtaagtgtgtgtggactctatcagaaccaaccgtcacttttacctggtttatggacagtccaaacagtgttctcactctctttccttggcaaatgttagaactgatggctttatttttttctccctcccttcatcttcagggattttttttttctcttctacattactcagcctttttgtctgtgaacatcctgtggaagatttcatttatcttaggttctttggccaggctgctcatcatcttttttttccacataaaacatatttacctaatgagagaacttaagatggataaccagagcctctgtactctctcacaagcctagaaatttgacactttctcaattctgacagttcatcccaaaccattggcctcctaaggcccagagagctcttggtcatttgctgtctgtctagccccagctgttggagaactagcttaggtgtactttcacccctggcctgtgttgtttccccacagagcttgtctgcatatgtctcatattggctcttagtgagggcggctgagcaaagaggcacttggttgtcatcattttagaaaatcaaggaagaatctcaggaagcctgattgaagaatcttggctcaatataggggaacaccatgtactatgaaggttttaagttattgcgcttgcacagactgactttgtggccttaatatggaaagcaaaacaagattaaaatctcacacagtcattgtcttttgtagtagagcattgtcttttgttgatgagtagagctttttgagatacaatgagttgttctctgctgctctttctggaaacttcgttaactatcttgccctatacctggcagtgccaacccacatttctgtttatataaaaggaactccatatcctcttcagaagctagtaaacaaaaaaacctcaaagcatatct

SEQ ID NO: 76264 - DNA, 1741 bp, Homo sapiens
ttttttgatgggatcttgtttacctttttgtatactatataaagtcttttttattcatattgggaagataacactacaaagccatttttttccatttctgcctgtataatttcctcaatctttgacttgcttggctatattgtttcaaatacccagttaacctttttattactcatttccttattacatgcttttgcattgtctacaattcatagaatcagtatggtaaaacattagagctggaaaagccattaaatattaactatccaaactccctattttatattaatagatgagaaaaagcctgcagaaggaacatgattagaccaaggtcacacacatgccacagccaggctgacaagtcttctgacccattgtctagtggttttccattataacacctgtgctccatgtgtcaggaattttccaaagcactagtgagaactccatcagagactgcatcctactggaaagggcacaggctttggagctggatagatctgggtttgaatatcttgttctgccacctacgggcggggtacattaggcaaggaaccaaagcttttggggacttgttttttcctctgttatatggcaaaagtaacaagaatactttatggttattgtgggtattaaattatataacctacattaaagtacctgttacacatattatgtttaataagttattataaaaatctgctgttcacagaaaaatgtgatatgtgtaaataataacttaaaataggtatttcattattgggtattctgagcctctcttgttcagtagtattttcttgaagtcagtattaatatgtgaattgagtgaattgtctggaaatgaattactgaaagttatttatatcttgattgtgattcatacatttcccttttctttatggctttcctctgtacttagctgcagtgcatctgcatcctatccaagaacttttgtacaagttgaactcacccaaagaagacatttggagagtacttgggtttggcccctgcttttcatctggctaaacactattagataaatctagaatatatagtctatgtagaatattatgtttacatttttagaaactttggatttttagtgtttttctgaaacttactgaactatgtgatgaacagcttcagtgtgaaattatacgtacttggtctgagtataggtagaagttatgttcaatataaaggggcccaggactgttgttaaaaggaataaggactacattatttaactagtagtgtggggaggtggaatgagttaggaaacaaaagctaagatggatttagcaaaggccagagcaagaaaagaaagtttaggctgggcgtggtggcacatgcctataatcctagcgctttgggaggccttggtgggcggaatgcctgagctcaggagtttgagaccagcttgggcaacgtggtgaaaccccatctctactaaaaatacaaaaaattagtggatatgatgacgtgcacctgtagtcccagctactcaggaggctgaggcaggagaattgctcgaaccaagatggcgccactgcactccagcctgggcaacagactgagactctgtttcccccccacggccccctcccccacaaaaaagtttagaatcgtcgcaggaggtgactcaggggaatttcatttaagggcctctcaaattgcttgggtgttgttggcttactggaatgccttgagtttgaattagagggaaggaccttaaggaact

SEQ ID NO: 76265 - DNA, 1051 bp, Homo sapiens
tgtcttatttcagaagcagcaatccagatgagctctacatcctgaataaaaacaataataatggcaataacaaactattatttttttaagaaatatgacttaaacctatttgtttttatttatttggtttgtttgtttatttatatgtagtttgtcagaaaaccataggagtcaggcattgggtagctcgtggccattagtattattttcaaagtcagaaatcattggagaagaatccccttctaatataaatttttaaactattcatctgagtgtttaggaagctgtgatctctgctgtgataatcctagaagacattgctcaagccacagctggctattattgagactatggaaagagaaagagcttttgccctgatttatcccataaaatgaataataggccacattcagggagacctagcttgtggcagactattctcaccacacccttcacacagcctttttttttcttctcccatcccaagccaccatcccaacctgccttgactaaactcaatgaacaggaaccattgtatgaatcggaaggaaaatgtcttaaatatatgaagttataatgagttggtaagtgctgtaaaaatactctgtaacttagttggaagttgcatcatccatgcctgtggcactatggactggacccaaatggtataattcttcagtgtaacactgaagtaatttttgcatctgccaagtaaatggtttagatttcaaacctatgaaatgccgaactgtaattgttcaattctagtgaaccacagatgtgtttaatttccttcctttactttttgctgtcttctttaggtaagctgaaccaactaaagagtggccttatgtgaatctacaaagtgaactttaacgtcagtcagttaatatactttaacacctaaatgttgtataacactgctctatatagcacttttaaatgtataaaatttttgatagaggataagtccatttcatttagggaaaacagttgtttcaaccacatgtattataataggagtaaaagtggcatatcgtaatgaaagaac

SEQ ID NO: 76266 - DNA, 1225 bp, Homo sapiens
cattttcatttgcaaggttcttttaaaaatgctattgaggctggtcacggtggctcacgcctgtaatcccagcactttgggaggctgcggtgggcggatcatgaggtcaggagttcgagacaagcctgaccaacatggtgaaaccctgtctctactaaaaatacaaaaattagccagccacgatggcgtgtgcctgtaatcccagctactcgggaggctgaggcagaagaatcacttgaacctgggaggtggaggttgcagtgagctgagatcgcaccactgtgctccagcctgggtgacagagcaaaactccatctcaaaaaaaaaaaaaaaagacaaagtatatgcttggaccctgaacacagacattttagtttttcatactcagtttttacattctatttccaatgctttctaaccatttactacttttaacatattatgccatttctttagcgttaatatattacacttttttcttactcccgttccagatgtttgtcatgtgctttgttgtcaattttagattttcattttcctatttttgggaattataagcagtcacttattaacccaattactttatgcttcaatgggcttgtcattgggtagccatgtgaattatttcaatttttagagacacagatcaacctgctaccctatacccacaacagaaaactgccgacttccccattgtaggaacttacaatcaaacggcatttgaaacatgtgagaacactcctattattaaaaaaaaaaatcaccctcaacctgggttattttcactgacagacttcatggttaaagcttgctatttcatgagctcccagatgacgcaaatgctgggaaatgtaacatactcactgtgatttgtttttagacatcaaaagaaatccattttacaaaggaatcatataactttagagctaagaaagatcttaataatcatctggtatagatctttccatttatttatgccagaacctaaaattagaaaggccaggtaatttgctcagtgttacataccttagtatggcagagctggaacttgaacctgagttccctagctttcaattcagagttcttaataggttgccactcaagtgcagtcaggtctttgatgctatttgtgaacaccaaatatgtctctgcttcttacaacttagaaatcttactctgttttgcaatgccctgccaagtcatattggagcctgaggcaaaatga

SEQ ID NO: 76267 - DNA, 1968 bp, Homo sapiens
aaaattctgatattttcttcactatggatttgtgggattaattttgattttttaaaatattgcattaaatattatatcttgactactgagttttttagtagctcctaaaattttgcatttgaagtgggtgccttgcttgattcaccctagtcccaatcctattatttttgctttaatctactaaatccctttttcagccttctggcaataaaataaaatcaacctatggaacctttataagcaaacccatactattggccacttacaaacaatggtggcaaacaaaccagaatctgcaagtgcttttcattggcttgattgttggtaacattgcatggtaattacatagtcatttttggctccatgaattgaaactctcttggaatgtctagcagtttattgaaaagagctcaaagccaagacgtgagttcttttgtttgatccttcacagtattgtgttttaggctcttatatcgttgtgtttgttttgatttctataaattgggactcaagggaaggaagctctttataggcctattattttcattttacttggtcctctcaacacctgtttgagataggcactttataggctaaaaccaactcacactgacttaagttaaaagagaattcactagctaacacaattgaaaaatctaaggagtagatctgacttcaggtattacacatcattttgtcagggctttctctctcgtgttttctactgggttggctttattattattcaggtttttcctgtgtagtagcaccaggtgtatactctactagcttagcaaccttagtagaaagggaatgaatctttcctgattgcttgagccagagtctcagaattgagtataattggcccagcataggtcacatgcacatccctgcactaggcattaaggcctggcgaatgcaattaaatcactggctgaacctggttcatgtgttcaaccctgggtcagggactggattgagagtagaagagatctgtttcctctaaaggaagagacgactttttaagtcttttccccccaaaagggattctggacagggaaagacaaatgtcaactaaaatgttactattctcacttcatttatgaggaagttgaggattaattaagtgaattttcacgaggctgcatagctaatgagtgataggatcttaactttgacccaaatctgcctaaatctaaagcccatctcttttctccacaccttgtatccctagaacatcatgcttcttcctccttctccttaatgtgaaaccatgatggttgccatcactttacagcagtattcttcaaaaaggagggattttgcccccagaggaaatttggtaatttctggagacatttttttattgtcacaactgtgcacagaggtgagtgtggtgctactgtatagaggctaggatgcctatacctcctgtagtgcacagaacaattcctcacaacaaagaattacccagcctaaaatgtcagtagtggtaaggttaagaaaccctgctttttaggttcaatttctcggctgttactattaacatcagttttgagagaaataagtaatagagagcaggattgaaataattcatacatgtaggtataattaagttgtctcttaattcagggaaacttcctttaatttccatagaagctaactttagaatattgaattatcttggttagtgagtaaattgcaatagaacgtaaattcctttttaaaatatttgttttatgcaagtttaagctaacttcccagacataatttttcattctaaaataagtcctataatttttttcttaaaatagaaatctagggatattttaaattgaatactgaatgcttttaaaggaaatatataagtttatctcaaaagccttttaatatttcatatagaagtttctataccaggggaaataattattttttaaaatccgagctgccgggcgtagtggctcacgc

SEQ ID NO: 76268 - DNA, 1074 bp, Homo sapiens
ctttggatgataataagggatttaatgtactaaaaagcatacagaaattttcttcctgtaagcatgtgctttgtgaaagaataatgaaagcagaagaatgcgttaaatgtattatagctgcagttattgggtttgacacttcagagaaatcaaccttcttgttaaatgacatgaaaatagtttatactgtctgactccttgagacttgcaagtcgtttctgaattgtgcatatctgaatgaatccagggaaagctgtgcttctgtagtcaaaccacagataatattctagtagaagagctgaatgagtagagtgatactacagatggatttcatataagaaatcttttacaatccagcaagtcaaatttattgttggagtcggaagatttgaggcttagcattttctcgttttgccagttttatacaaataattcttcttgttttccaaattctcatgactgtatgcagcatggaattacaagtccattcctttctctggttctttttaaccttatcagacccaacccagatcaatgaacattcctctgatttcaactgaataattctgacttgctttgatatctcacatggatgactttcttcccatctctcctatcccccgatggtccttcagctcatgcctgtcgtgcccatttttttggcctcacttctttacctaatctcaggaatactcattgctttttctatttcttctatttttctttggcctctctttccgctcccatattaaatttcctccttggctataacgcctgccttcttctgtttcccaagtcctatttactggctctgtatccttagactcacttgtttcttaattcatatcctcatctactaaggtgcctaatggccacccacctagcatattttagtaaggcatgtgtgtacagacaggtcacctattcattgttaatagaattcaatttgcagtttccctggaaataaggcagtttctgatcttcaaatcacccaagttcttactcgttagaatgcaagttcctttgtcacattaggaaggacagtaatatttatttatgaaaaagttgaaaaaa

SEQ ID NO: 76269 - DNA, 4871 bp, Homo sapiens
tgacaggtcacttgactaaacaagtgacttatttagaatttcacaggaaagtaattacagagcccttaaatttcctgtctcttacttctatgatataaaacaatttactttgcattccttatttatataaatgccttagagcatttcctttcctttaataaaatcatgaagactatcacctggtaatgaaattgttaggatggaagagaaatgaactaggcacagtgtacgtgaatttgattattgccttttcaactgtctaataatgggagctgtgggctcataggctctccttttgaattgtgaaaactatacttattttatactacattggtgaagttccctgaagtccttaaaaaacaaacaagatttaaagtgcaaaatgttattgttaagttaaaatgacccttgtgtgtttgcaaagctccgcgggctttctggggctagtgatccccttggtgagcattgtggagtgtggtgggaaccagccatgttttggtgatttcttttagatttctaaaactgtttttctgttgggttgaagtgggaaaacagctttggaactgcttttggtgttgctctgagtgtgtttgggagtgcattccaatagtttgtgaggggatgttagctgttcaggaaaaataacccttaccaaaggtaatggttcccactagcattttcagtaacatgtaccagatgtgggtagttaattattctcagatctgataaatacctgccagccaagcctaattttattttcagtaaacagtggccaaaggtcctagctgttcatttgataggatgggcctgtttgcacttatctattaataaaagcacaacactcctttagttttcctttcccagggccagataaaacattttagacactcacgtatttgtcttagtaaatcagacaaagtaaacaaatctggtagattaacttggtaaatagagtgtggttaagtgttacctttggagttgaactcagtgccatataaatagcattaatcgcatggtattttcaataatctttatggagtaaaacggagggttgtttttttctttcaaccaacagggacttaagtatatttcttaagtactttcagatgttcttctgtatggagattttaaaatcactttaaaatgaaatttattcttttgtcccattagtaacttgttgggaactttgtactagttaacattatgtttaaaaacctggaaacctctatagttcatctcagaagaaaaataggactacatagtggcatgcaagctttgccagacagagataatggccatctagaggttactgatttgggtggaacagtgaaaatggggccgcttttatggggaagacagtggctggtaggcagaaattcactttattcatatgcattttttttcctcttgggtaaagagttttattagggtcagaagtactatttatttttgtgaggtaaattcttgtcttgtgagaactggcatgaaacagactcattatttcacactagccaacaaaacagtattttatcaaagtaacttctagtcagtccaagactggactggatttgtactggtaacctggtggtgcagggctctaagtctcatgccagctcttgtctccctcattaaacttccttttttagtaatgattaaaaacaactctctttactacaatatattttctcattggctttatactcgaagttgcaagtactttataaaattatttttagttttgcatgctgtataataatccatctaatttggtaagcatagtacataaaagaaatagctgaaaggctttagagaaagttccctactcatacctccccctttacaatgatctcggcattaatatcttatgctgtaagagggtggcctggcacagtaccatgaatattgtgcccgatacccagtggtaacctaccaatgattgttatgaaaatgatggtgatgatagtataggggagagagtgtaaaccaaaagttgagatctgtattctgttttcagcttcattttaatggcctactggaagaccaggtacattatttctgctcttttttttttttttttttagtttctccagctatacatgaagaaaaaagtcctagtccactagccaacctgacaggcatgttgtgaaaactaatgaaagtataaagttctcatagtccgaagcataaaaggtgctgtaaccaataggtacaaaatactaattattatttttacagttcagcatagtaaatctttggagtaaatttttttcattatatttactagtctttcctttaagaattatttgccaaatttaactctttttctcttttaattagacccagagtatagtaaaaaaattgatggtttggctttcagaaagagttattttgttatctgtaccaaattttcaattaaatatttttagctgtgaatcaagtttcatcttcaaaagtgtcttcaattttaaataatttgagaatacttacctggttagtaggctaaactaacgtagtagggaagagagtgtaagaaaagtgctgttgaattcatcattcccattagcaccagtctgcggattcccaaacatgtatttctaggctcagatatttttcctgatccccagacttattaatccaggaactagtcaacttctttacctggatgccctgtaatgatttgtagcacaacatacataaaacttaatattctgttcctgaatttgctctctctgtgaatggaatatctatccaccccatctctcaagctgaaaaaccctcaccccatttcctcaacatctgtagatttaactgtcttaatactttatgccccttatctccatcccacaattactaccttaattcggcttttgctcttctgtcaccgggcagctgcaattgtcttcctgccaccagtctggtctcattacagtctactctcgataccatttccagattaacctttacaaaatgcaaatcatagaatattactgtctcattttaaaaatatttagtggtttcttgtgtgctataagacaaagtttacactctttatattggttattgaaatcttaataatctttaccttgtttctagtcttgaatcctcttatgacctctgttctagtcacactgaaagtttgtgggttccaaaacatgccatgttgttggacattctacattctctccacccacttctttaattgccaacactgttttatattttaaaacctaattccagtgtgaagtcttttgtaactccctccttgtatcccatcataccctgtatatacttcttacatagttcctataaaacctatagcacgtattttgtgtatatccttcccttcctgctttattgtatgagagattatgtcttgtttatttttgcctttcaacgtccagctcagtggttggtacagaggtagcacttggtagattgattagatagtgggtggagtaaaattctatgaccatattttcctcctcaagttctactcccttttcagtgttgcatggaaatggctttttaaagtactcagattaagatttgatgggtagacgaggtctttacttaattggtatgattgatgggacaacaggaatactcctgtaaccactatacctacccaaagatttcatagacagtctgacatttccccatgaaaagtcatttattagagttctgatattctacttattatactccctgccctctttagcactttataggtacaaagtcctcccataaacattatcttatttaatttttaaaacaagcttatgagatggattttattgtatatactttaactttatctctaaagcatatacaatataatttgcacccttaggcagatctgtgaattgctttgaagaataactcgctattctttttcgtgatttggactactctgatagtgacactgttttgctaagctgtgagagtttggaagtgtctcccataattttgacactagattttattgggtacagcacaaatatcactccttggggtgggccacatagtcacggacccacagatactcagataggaagaggctctaaaggacattttctctttatatatggaattgtatgaaatttaatagaaatggatctctagaattttactccttttaatcaggacagtagtacaaagcaaaacttttgtacactgcctagcatggtgctcagttctgcaaacgtcttttatgtctttgatagtgatggtggtgatgatttagaagcagtttttgcccatatacatataccatggtaaagcagttttctcgtttaccaacgatctatgaggagcattatttttatagatcttagatataaattctctccttcagactgtttgcctgaaccttaaaatgtagcatgattacacaagcactctggaatttagattaaacagcattcaatttgaaaatctaatcatatcatctaaatatcattaagtaataataggctgattgatagggaccaaagctgttttggcctggtgttgcatgcctttcactcagccagccttttcaaaccaagatgttgataaagaggtctataaatcttaatagttggagacagtttaaaagcatagttcactggataaggtcacacccacttaagtgacctattttgtatacttttcaaaaataggttaattaacttaatagaaataagactctcatattgatgtgcaattactactaaaacagctttgtttttttttctttccaagtgaacatgatgttcatgaaattgagggcataatagccatgacaagaaccaggcttagcaaggcaggtcatgttcagcgagtacatttcagacttcccctttaaaatcctcttttattccaggtcctag

SEQ ID NO: 76270 - DNA, 1033 bp, Homo sapiens
actttatatagtttctgatccctgaagactccagcttgcatagtaagctcaatgaattttggtctctttttcttttaatctgaggctttcttcatttttctaacagatggatgattcatttgctaccctgggagaagcatggtttcagaggaggatacagtataaaagggcaagggagtacccagaccagagtcatattctggttatattctcctcatacagcctgctttcatttgttgttgtcgtttagtgcccatttcaaattttctgctcctaaagccttttatctactcttagtcttcttattgatgattataaccttcttagtctattattggtcactaattttgcataatttgattttcccattcatctgttccttaacatataaccccttaatgttttatatcgtaagttgagtacatgggcatttattattctttgaacttttaaatatattttaaataacatatacatttagaaaagttaacctcctcccccagtctgatatcttgtatcacacataactctctgtgtagatgttgctgagtcctgctggctcgaattttcctgtggccagatggtctgagaggcagttagtgatgcacattcatggaagggtgggttcttgcaaggtagccatgatgggtatatttgaattgatggatatatgttgatctgatgggcgtattttgaattagaggttctaatatatatagcagaggttctagatgacctctttgttcaccttacagtagtgtcatttctctgcttgtttgcactgcacttacagcaaagacttttctaaattaaacaagtcttgtttatatgttttgtgtatgtgatcacaaaaaatagcaaagaatactgttctatggactcttagctgtggtggaaagaaccattgaaactctctcagcctttagttcttcattaggaagatgcctttcttactgagggttgtaatgattgtgaagtccagttttctgacttctccattagggaataagagaactctttggttttaaattga

SEQ ID NO: 76271 - DNA, 1041 bp, Homo sapiens
aatattaaatgcagtgttttgtaggcagtgattacctttcatcttgtttgtcatatttctcattctttttttgtgtgtgtgacggagtctcgctctgtcgcccaggctggagtgcaatggggcgatctcggttcactttaacctctgcctccggggttcaagagattctcctgcctcagcctcccaagtaactgggattgcagatgcccaccaccaagccctgctaatttttgtatttttagtagatacaaggtttcaccatgttggccagcctggtttcgaactcctgacctcaagtgatccacccacctcagcctcccaaagtgctgggattacaggtgtgagccaccacacccagccatatttctcattcttattttaggctgatgaaaatactaaatatttcaacacctctgtatcatagccatgtttaaatgtgcatatccaccagtcaattttaatacattcctttctagtaaattctgttaggtcttcagttcaactgtacctccctcagtgtcactttttaccttccctcctcccttaaatcgcctagttctcattttgaaaaggtagagaaatcctttgtcagtagttaggaggttgtagatcctgtatgattttctgtcattacattcttaatctattacatgtgtatttgtcccgtccttactgacttaacctctgaccacattgcaaaatgtaaacagagccagataccgacaggtttgtcccttcattagccagggcccaattcataatttctattttctaatttggagaataagaaggttagctagattaagaggctttcctaagtcacataaccgtttgcaagtagctaagaacaggattgtgaactcttgccaaactcctccataaaattccataagcttgtgggagctcatttatacaatatttaagaggttatataggcaaggagaataattgaatttctatatatttagattgactgatatttcccaaacttcaagtggaaaaaaaaagcccttaaagaaagagcttaagagaattaaaatg

SEQ ID NO: 76272 - DNA, 1088 bp, Homo sapiens
gctagtcaagcctatgttatgaaagagaaataagacacttaatcctgtgaatgattaactagtattggcctcccttcccagtagtttgcccttcctgtattgtagtctgtgtactcatttctgagccaaatctccaaggtctcttattattgagtgtagggacacctggattacagggagttaggcctttgttttagtctgaagatgatgtggctaattatacagctccaggcatttgcattttttcaaggcattttaaagtttattgcttgtgaaaacctagtttgtaaagtatcatttttaaattttacaggtgaagaagtagaactcagagaagttttacttgccaaaagttctgcagcaagtcagtggcaaattcaaataagtgtacactcatgtatacttagctcagtgtttaactcatggaggtattgttttgtttcttatttataatataaagccaagtagggctggctagagccatttgtagttaatacattttggtctttgatctttttccacataaggtcagacttcaagatagaaaaatattctttatattctttgcaaagagctgattgccatctttctatactgcctgtgggaacactctggccttagaatccaagattttattatccaagacagcagccagtaagtacagtgagacctaagtggggaattaacttttgggctgtagattttgaatgagaagtcctactcaggatctgagaggtgacaagaacgagtgactattcattgatttggattcctgggtcttggcaccttctgtgggataagaatcacatgcaatatgagtaattttgtggaaaggtcttggtcctggttcatagactgtctcagttcctcagtagagagaacttagaggagaaatgactcccttgttgtcatattgaagcagcagcagactattagggagtacccatgttcctggcttctttccttgggctggaaccattcaactgcacagataaatgtttactcaaggaagaatgcatagctttgaaacagtcttaagatgagtaaaagtcttaagatcagtaaaatatacaaactactcctatgta

SEQ ID NO: 76273 - DNA, 1916 bp, Homo sapiens
gactctagtggaggtgctaggaagttccactttctggtagattatttagagtacaggatagtcaagggaataaggatggtgctaaggcaggctgtggtggtttaagcctatagtgccagctactcaggtgggaggatccctggagcccaggagttccagggtgtagtggagctatgattgtatcactgcactctagcttgggcaaaaaaagtgagaccctgtctccaaaaaaaaaagaaaaaaaaagtggttataagaaccataggaaagagaacaacatcattttgactaagacaaaggcataaccttgacagatctcagtgtctccaggctaagagaagagcaacttagatatagtaccttgagcctttcaatgattgctgtttaaaaagtatatgactgtaggataggatacattggaaatactgaacaatgctggaggaaagccaacagcatgtggataagaccatccaatggggccaagatgagggggcactggattggatcaacgttaatgactaaaattctctgcttctaatatacacatgactaactcccttactcacttcaagcctttgctgaaatgttatcttctcaacgggtctgcaaacctattctgacctacctatttaaacttggaattaattgaatgaattaatggaagcctcatgttgattaatcctcttttcaaggactgaactgcattacataagaaaatttaattctattaatggtgagctcagtggcacaatccacatctaagtttttagctttatcctccttgcaaataatgatattaagttagtgtaaatattaataatatttgcccatgagaaaggaacagaatgttctctacctttctccagccatactttgaatcctggggaatcagcatttcccagaaagatcaaactatcaatgacataaagcaacagattgattccattgatgatctttttataatactgacgtaccacattcttccccatggcttttgcatttctatctttccatctgagacttacaacttcaaactccattttccatgcttttgctggcatgaagaaggaaaaaagaaatcatggtgcatttactggccttaaagaaagttggtatgtttataaaagaaataaagcatactgaagaggaacagtatttgagtttcatcagttaagcagagcaatttaagtactgaatgcttcatactgaccatttccattttattcattgtaggcaggtttataaagatggctaggtgcacttgtccatggttctcccacccgtgtttgggatgtgctacctcacaagcatagctggctggggatagtctttaggtggaaaatagctacgaaatacctatttttggttgtattaaatgagctatggctgacatattctgtgattcatttctttctaaatgagtgctggggcatgatactaagtgtgcccatgtctcactggtcttgggttcttttatggttccccagccaaattcaagttgaattatggtgtccgtttaacttacaggtgtctgagataagttgtcagttaacatttatacatgagatcaccatctcctagtaagtacagagtactggtagaaaatgtgtggctcagtctgacttgggttcaaatcactctaccgccttttattacatgaattccatcaagtgaacctctctcagcctccatttcctcatcagtaaagtctgacagttccaagccaatggcttaatgatttctctactatatatgcacttcctagaatagttgcattcaaatttgcaatatctttcatcaagatgttgcctctctttccttctttttctcttccatcacagtaagtgatagaaacctgcttgctgcactcataaataaatggccagacatgtgctataataggcaggatcctcctg

SEQ ID NO: 76274 - DNA, 2472 bp, Homo sapiens
catgtgtgtatgtttacacaggtaggcacctaggtgttttgttctccatttttagaatgatctttgttgctggccagtaccagagtgatctaattatacatgctttactgatttccatctaccaaaattcatgtttcaagtttaactagatatccttagtggatgtttccttaaaaacatgcgatcacatgtgcttatcttttctctcactaggctggagcttaagtccacttatgaggagaaaatatataaaagcaactctaaattggtgagggcgatggagggggccagtggggaatgagagaaagggaaaaatgaaaataagaagcaattaagttttttttttttaaattagcctaagctcctggaaacagatataaataaatttgagaaagccttccaaaagtcagaagaatttaactctccagccgagatgttcaagctttctggcatttgactaacgttttatgctctcttgtctattgatcattgagccactgttgagatgaccagatgaccaggtgctaagcatactttaaagaaagttaccttgcctgaagacattttcctactcagatatctttaacagctcaatgcacatgaccttggcattgcttcaaaggtggcagctcatccaagtaggcagaatacctggtctctcagcactgcttttataatgccctttttctaacgttgagctggtgaccatgctgccctcttcattttgcagtaatcagggttgtcttcttttttcatatccctttcctgcctgaggctgcttcaacaaacagcaagtataaactgaaaccctatctctttgcggatcaaacacacagcttgaatacattgataagtaactttaaaaaaaaattgtttagcctgtggacctatttatcagaatgctatataaaattattgttttccagtgacccaattagttgaaatattctttctgaagctataggaaaaagacttaatattgtttgatatgattttatcatttgtttagttatgtatcacttcccactttacagtgtgttatgcatactttctttttttctgtcatccttcccccatgtctctactcttcagtctcatgcataaagaaacagggttccctacttgacagtaaccacatgaggagttgacattggcaactggtttaagacttcgatcataagtcatctaagtaattgggctatgcgtatcctgttgaatcacattccttctcaaatccttctttgttaaaagtttgaagcccaggcctttcaattttctcttatccctttaagtccacaaaggaatttttaggctgtttctggagggttataacttctccccagtgctgtccaatagctggcatattggaaattggcagaatgtgggtgcaagagagaagggagttctcagtaaagcaccattagaattctcccacagtttgacacattcatttcattgcccctgttttgtgtggctagcaactgatgttgtttggctgtgacatgcgtaaacagatgttgtaaaaaacctgaaaaacaaaaaatcatctttccctactttttcaggcatactgaagacagaatccttttttggttatcttgaagagtctgaaataggaaacactttgaagtgtagataaaatttctgctctggtcacaatggatgccaagtgttataaaatgattgtgggagtgtgtttctatattggcattttgatatagaggcaggtaagagcaatgccaccttcctgcagagtactctaaaaccctttcttccttcattaatagttttcctttgaagataaaggaactgctttcattatgtgtgaagcattccttttacagttaaattactgtttattggtgagtggtttccttgctgcgctagtatgcggcagatgtttctcatgtatccctaggttttcaggctttttcttttcaggatgaggctctgttgtcttttctttttttctttcttggcaagaatctgattgggataaaacacattttatgcagcaaattaaaaatacgtatttaaatttaccttttattttttacctaaaaagttcgcaaactacttgtagctattattactctgaggtcattcctctgatacaaatgtatttgttgttttatttcggagctacagatagaaaatctaaatacagaatattaaaagtatgtagtgtaacatgacttgtacttagtaggtactccgtaaatgtttggaacttatgaattgaaggtttctttctgatcttagtctagaacagtgcttcacagcctttcttatgtcataatacacatagaaattgataatatttatatgtcatatggaatttttttcaaagaacatctctagtaataacataatacagagagggatacaagttgaaaaatgctcttctatgttgttattgtaacttttaggagtaagactaccatagaaagcatgcattagaatgctaggcta

SEQ ID NO: 76275 - DNA, 1743 bp, Homo sapiens
agtagtgaaattttaagcctgtggctttgattatgcaaagcagtgatttctctgcagtgtccctcagatgtaaaaggagaatgactgaaatactagaaaggaagttacgggaaatcaccaaacaaccattttccatgtctacagatcctttcatctgagggcaaaagaagctggagagggtgcctccaaaggtgggggtttggaggagcacaatttaaaattctctgggttgtaggctaaggatcaaagggttatgtcctcagaattacacggtgagtcactggaaaaactctgagtaaaagtcaggcatcctgttttccaatcttatatgcctaataatttcaactggctttaagacagtacatttatgtatatttttcatttagatccattgccacctaaagaatataatgatgtatgcattatatagattatggtttccatgccctagagcatcatgaggtgttttgccatgagaatacagtgggttaggtgaagaggtgcttgagaagccttggtgtctaatgtgtggtctcagtactctgtggaatctcctcctcccttacaaaccactgcctctattcaagccatcttgtgcttcaatttagaagttctcctttaagagagagttttccaaagctaaattaacagctatgcagtgtactgagtaactctgtgatttactttttccaattttgactgctgtaagcatttcagtttgtttcccactagtttggatcaacatgttggttttaactttatctccaaatgtaatgattttacatattatagacaaatgtgtttgcacagttaagggcagcaggatttgcttgaacagagaatatgtgagttctgtaacttttaatattcaattcaatttaaattctttttcatatgtcctttttatatattccagtttctgattatgggtaacctgacttgaaggtcagaccatctgaagtgaagatggttaaattgtatgtgtttgcacatgcatacacgtgtgtgtgtgtgtgcatgcatccacatacacatgggtgttcatgtggtaaaggagagccagagagatgtttaatttcctcaccacattgtagaaactgaaagagacatgtactgcagaaacaaattctgagatacgtttgctaaccacttttttaggtttcaccttccggggaaaatgttaaggcatttgcaaacatgcctagtttcttagcgatttaaggcgcatagactctctgtgactacacctagagaggtaagacatggaaaagaacataagctttgagccacctagattaggggcttaatctggccacaccactttttagatgtataacttcaggttgattactggacctgtattccttttctttccttggttgacacttgttccaacttatgatgttggtttatgattttgattttagtttggttaacttcttatttgggggattttgactgacttaatttgttctcatcttgtgttagggttctctagaggggtagaactaacaggatagatgaatatatgaagggaaatttattaagtagtattgactcacacgatcacaaggtgaggtcccacaataggctctctgcaagctgaggagcaaggaagccagtccaagtcccaagacctcaaaagtagggaaaccaacagtgcagctttcagtctgtgtccaaaggcccaagagcccctggcaaatcactggtgtaagtcaagagtctaaaagctaaggaatt

SEQ ID NO: 76276 - DNA, 1313 bp, Homo sapiens
gaaagagttttttggaatgatctttcagaagcagttgctataggcaacaatattaggtttgtctatggctctacttttgtattagccaatccattacttgtgattgttgtgttgataatgggaatcgtgaattgattacttcatcaaagcaattttttccacactgacattctttctagcaatgaacttgtgaaatcaaatggaatttagaggtgatgctcctctgttttggaaaggtggaatgagttatccacctagaaacaaatctgatctagtcactctcctatttagagacttcttttgacttcttctctaaagaatagaatccaaatttattctcttagtttgtaagattttcttgggtcacctctctagccatgtatgtgcttcagacacactgatttcttgctgttcctcatccttgtgttttgcatcgacttttcttccactaggatgctttttgccagcttctctgcttggtgaaactcgtatgtttatagctctttgataaggctttgctcctccccctaggcacaactcctcctccttgttctctacttctattgtagtggttctgctgctatagtttaacttaccttaccagtcctaatctttcttttaattttttattgtgtaatttattgctgcatatgtattatattttacaataattaatattatatatttgttactatataatttacatatcgtaaagtacacaaatcataagtatacagttgatgtatttgccaggtctgaatttgtacctgggctgtgagccttcagagggtaggaacaatattttagtcattcttatatcaccagaggtactcaataagtacttgaatatgagcgaccactacataatttcctcagttcatctagtgtctatttctttatggaaaggggacattaacaagtatttttttgtagatgtttcaaaccaagtaatatttgtttactgtcttgctactaatctcaaaagttgagagattcaacctaaaatattgatttcctagtggcaattatagatcagtgactaaaaacaaatttcatccatttttctactcacttgataatgttttattagaaactataaatcttaagacttgaggtattaaacagcagagagatatggttaggatcaaacttccttttcctcactatttattccttatagaaaaaaagcaactaccccttcccttaaatttattattattattattatttgtgatggagtttcactctgtcacccaggctggaatgttgtggcatgatctcggctcactacaacctctgcctcagggttcaag

SEQ ID NO: 76277 - DNA, 1444 bp, Homo sapiens
gattagatttcacgatgttgatcaggctggccttgaactcctggcctcagatgatccacctgccttagcctcccaaagtgctgggattacaggcatgagccactgcacctggcctcccttaaatttaaattcccttaaatattccttttgaaagatgctttttaccattgctaaagaagtggaatgatttcaaattaatttcaaaataatttcaaattaatttcaaaattctcccactaaaagttgctgacatattaaaggaaatgatatttatgcatgttttctaaaagctagatgtagaaaacttgctcggagtaatttgattcaacaaaagagtttagtagtttccttgaaagataatcctgaaatcaatacctttaatttacattaggcactcaaagaaaataaacacatttccctacttaaaaggctggtccaggtactttttttgtgctagaaaatcaaggctgaaatatctttactttgtattgattcagattttaaattgttctttgaaaagtatatatggaaacagatttttaaaaatgtataaatagataaacatgtataagcagagttttaaatgtatagaaaaacagatttaaaaaacatgtccaccaaatggacatcttttcctactatattcagtaacctaaatgaccctatcccttctcagcttatcttaattttagtatacagttgcccttcttccattaattaatcaataagctcattcattcacataatcagtcattgttgatgcctgttatatccaaggcactctatattctatatgctttatattctatgtactctatattctggagacatcaagatgaaaagttcagattaaaattttcctgactccatttttaaaaagttagtttttacttttatggttaattgtcttaatttaacaagtgtccatttaggatgtaatctgtgctcagtactgttgtacatcatgatctatattctctctagaagctagcattttatcccattgatttaaataatgtctaatgaattttaagttcttcatgtggttagtgttttacattttatgagtaataatgaaatggaagattcaagcaaactccattttcctgagaaatatgcatctctttatttcccaatgttaattatctaaatgctgttagttaatgctatattactacaagcttttttttaaaaaaagagacaatatcctttcttaaaagaatgttataaatataaaaaagtacttgtgttaaataaatgttattgttcatttttagagaaatcgagtgttttcttggcagagatgggagaagaaatgtaattgcttaaataattaagtattcatgcttggaaacccaacttctgttgcagggttaacatatgaactggtgattaactgacaaaaattaagcatatgtgtttggatcatggtttctgtggaggc

SEQ ID NO: 76278 - DNA, 1130 bp, Homo sapiens
gggtgtttcctgaaattgcaacattactgacttcccagccatgtgacatagcttttcagactctaagttaaattttaacccagacatctctcttcaattcaggtcacctacaggccagacaaagccaaggtcatgtattgagtgaatataaggagttttgttggttctaataactgtaatgttattcactggttgaaatactataccatggttaatcataagttgcagctgttgtgtccttttatttatgagcccttaatcaagaggacacagcaagagccactgtttgaaaggagcctttcatgaggtcttctctttgggtgctccttcttgtttcattgtgaaaagaagagaagtttatattgccttgcaaaagttattaaatagtatatgttggcttctctgaaaacagatttttctattccaaatttgaaagatcaaattataatctttatatttcagctgatgataatagaaacactaagcctgtgctctccaaacaatgtcttttaattggtgccaagtttgattgaatctcaatatcagccatcagaagttatatgttggctctctgaaaacagactttcctatccagaattcaggttttctatttgtgacaatatgtctctgctgatgttaaggtaaacagaccagagctctttgtgcagccctttttactggtcctgaacctgatgaatgagattttaaatgtaagtcaatctctctctccttttttaactttttggttttaaatcctcccttattttatgagaattcatcttatgagttacccttgttaaaatattggcatatccaggagtttgaatagggtcattttctgaatggattttggaataattacgtaaattgatttttctgatcaaggaatttagtgataggttatattttcaaatgtgttgattgtcagcttcatcctaaattgcaatgtaacacaaaagctggtacacagctcttttctttgagacactcaaaatgtttccaaactttaaattcatactttttactgataacatttttgtggatctcattcaggtaaacttttcttcttcacttgttgatcccgcgtgacccctccagccacacaggtttcatgtgcttccctgaataca

SEQ ID NO: 76279 - DNA, 1923 bp, Homo sapiens
tcaccagtctgttttgaccaagtcaagttgaggcaagaatgctgggaacaagcttttctgattgaatgtgttaatttagcccgccttcaaacttcttaaccaatggcttccactctaccacctttcaacgcttttttttctgtaagatggcatgttatctgttagaaataatggggatcacattcattataccagcagtagtctctctgtgatcacactcattagactgtttactaccacgaattctgggagaaatggcctgggacattaaaagaaacaaacaagctaagagggctgtctaggaccaatgacagttattggatttgttttaagaattaagcttatgagttacacttttttcctttgcagcatagatgaaaatcatcacttgaggaacatttcaacatcatagttgcaagtataacttacacaatggaaaatgtttttcattttgagaagaggcaattgctattttgtaatggaacgcaaggactactggagataaaacttgcatgcaagaccagtacagcttgatgaagggagcagagtctagtttaacctctaaattaggagatgtttgttttaattttactgctattccaggcaagaaatattaagtgtctgctgtgttcaggactgctaaacattatggacaatacagtaatagtagaagacatggtgtctgcccttgagggagtgaaaattgaatagacaactcttaactatcaggatcaacaaaaaaatggtgttagttagggagtaataaaagtgccacacggctaactacaaaccagaaggccagggacggattactgtgaactcagctgctgtgtagctttgagtttcttgaatattgtccatgacccatttattttgttttaaatagagaattatatctgccctctaccaaatacacaggaataatctgagtaatgtttataactgtgatctgagaactttttgagtcttttgcaaatctgtaaacacagagtgagaatgagatatgacagtgtggtaaaagaggacttttgagatttattaatatttagaagtacaagggggaagaatacttttatagtatgattataatgttaaagatattcttcctttagttttataaaatgtggcttttgatcagtaagtggcaacttagaagaaaagtctatcctaagttgatttgctattccttgaccttaagaactatagaacactttattttctcctaagaccacttttttgtttttattttactccattcattaattcattcagcacataataacgaagtatgtacttggtggcaagcactgtggtaggacctggggatatgaagttgaagaagacctgggccatatctctaaaaaccttgtgaggggaaaccaagggggaaaaagtttctactattttaaataattagaatagattttattttatagttaaatttgaagaaaactacaattttagttagatttactatgccatctttactcatttgttcactcccattcgttcatttttcaagttaatgggtgctggaaacctgagtcatccttgacatgtccctttcatttgccctccaaatgcaaacaaccacctgttgtttcagtcctttcaaatgcctgcctccagaatgagcattaaatctgtcaacatatttaccatctcagcttctccagtcacctcctaactgctctcccagtttccactcttacttacctctaattaacagctttcagacttttttgaggatgacctacaattaaaaaatacatccatgatactcccagtacacatacttgtgttgctatgtatctataagtaaatccaaaatcaaagattaacagaataatacgtatcttttctcagtatcatgcattttgatatttttaaaaattatattcctggccgggcatggtagcttac

SEQ ID NO: 76280 - DNA, 1080 bp, Homo sapiens
atggttctcagtgcagaggattgtgatggtattttgaatgactatgaataaatttttggctgatatattaagtcaataatagatacctttgatttttattattatttctatattattatgcagttctcagccttgaagtttgaaagactttaataagacattgacaccagtctcccacttaatgctggaatgctcaattacaaatccctggcaaatgttcattagactttgaactcttccaatgctggagaaataactgttacacaaaacaccctattccatttggggacagtttgaattgttggaaacgttctttttatattgagctagttttctgcctgttgtctgccctttggagtcatggagatgagtttgccctctctcctacagagtaccctccagctattcgtagatagctaatctgcccaatgaattcttttttcttgttgaaacaattctagtttctctacttattcctcgcatgacatgatttttgtatcttttctctttctctgactcttttgacatgctccagttttctgtattttctttaacttttggcatccagaatagaagcaacactccaactgtgtccagaccagtgcagagcacagaaagactattttttttccttactctgaacactatacttctgctaatctggccttaaatatcatcagggttttcagcagccaagtcacactgttggctcatgtaatgttcactgtcagctaaaacccctagatctttttcacatgaactcttattcagactgctcattctttcatcctgaacttaggcctgtaatagttttctttcttgtgttcatgtaatagagtttacatttattcccattcagtctcagaacttcagaccaatcttctagtcagtcttttgtggagtctataggcttgacaaaagaaaaaactcagactccagtgaataccacaaacagttatttgctttaggttcaggaaatgaaaatgtgctggttttaagtttctgaagttgcctccctccttcatctcattccgtcctcccccttcagttctttggtccgagacccaatagaggatgtct

SEQ ID NO: 76281 - DNA, 1050 bp, Homo sapiens
tcctggactcgagcaatcctcccgccttggtctcccaaagtgggattacaggtgtaagctaccatgcccatccacatggttttttctataattgtacaaaggcagcagctggatccccagaagctactggtaatactaagatttccctcccaaagtcgaaagtagtcctgattgctttgcttaagtagtagagtttcattactattttaattcctcatgaattttttaaaaaatacaaatcatattcggagtttcatattgaaattatttaagagaaaatttttttctcaagtactgttacacactttaaaagcgtgtatgtaatttattgattttataaatataaatgatttgcatcttatgagagcaagttctataaagctctttcttggttacaatttttagcatggttttatttttaagtaaacatatctacctgaaagcaatgaaaagaacagttttgaatcttagtgatatttctggaaagagaactcattaacctgaagtactcatgcatataattaatttaaaaaccatttggttttaaccttaagctaatccaatcaacttgtgctttcatcaaacatttaaggcctaacagggacaggtctggtatcacaaaaactttcccagggaatactcttcttatggctcatcttaggacataggctgtagaactatgtcctagaaccagaccattagcaagtaagtcaccttttcataccatgtttctcctacctgtcaagcgaagatgcaggcacttgccacctgtcaatgggagaaaatactgtatatcaatcttttttatatcagtgataaggaggaaggatagtgatgactgtggcctgtagagggtatagggaaggctctgtggaagaggagagatttaaataaggcttacaagaatatgtaggatgttagtcaatgaccgttttttgagaatattgataaaaaggcatttaagatatgttgcctgcttctgatttggattggcatagaaaaggcatgaagacaacatcagaaagggagtaaaagcacaggtgtgtcaaa

SEQ ID NO: 76282 - DNA, 1873 bp, Homo sapiens
agggtgaagcatagtgattaagattaggaagtcatccacacagagttaggagaaaatacatctagagtttgccaaatccaaaggcaagactgtaagaaaaagatactaaaagagaaaagagcagaggatgtctctgcattttgtgatacattaaaaagttatggtaggagaaggagataaattaagaatagcctggggaaagagatgtagagagtgaagtcaaagaagcaggggagccagtactaggtagagtcatggtggtcaggattagaaagaattccagcagtccaatactgcagaatagtcaaggaaaattgaagaccgagactgggcctttggatttgatatttggttaccaaaggtttttaaatctggatttaggaactcatttgagattttttttttgagaatataacttttaaataacaagtcagctcacgttaattaatgtttaatgttttggggacatttacatttagcttttcttaaccttttaaatgtgttcactaaatattattttatttctaactgcaggctaagcaagttatactgtgtgtataaagtgcccaagtctaagaggcattgtagacaggctatttttagggaaactcatgtttttctttaaaagttcagctagcatttggaatcgatatacagtataatatttaaaaaaaaaaacaacatatttcctcatcccccaagaggtttcttaaaatagcatgtaatcttacctacagtgggaaaagcctcaaattttataaattgggttggatctaacccagattacctgaccaagagagtccccaagaaaaacaaggtgtggtaaaggttatagtaatggtaattaagaaagttgtgttgtgcctgctgggcctcactaaaagcaatgacccagcctgtggctactggcatcattttgactgctgagacatgctttcttttggagagaagtccaaaccaaatctttgcccactttgaaagccaagatattctcattcctttcagccacagaaagggctggtttttctaacaggatcatgtccgtgtgaccttctgatgtatcaacttgttttctatgcagtatataaacaataaagggtttaattttagttgcttttcttcacagagtcatggaatattacaaatgttagaagctagagaggatctttgaggttatctgctttaagccccttgctttccacaggaaaacaccaaggctcagagagataaaatgtgtccatgctggacacagctggaaaatgatagagcttgaactcaggttaactgaccctccatgcaggtctgtggctgcaccatacattacagcatctctattcaacagtaaaactcattggggttatatattataccctagtggatattacatctgtgggatgacaagctgcattatgatagagttgcactgtgctcagcagcagttgagtagccagcacccacaggcaacctctatgggcaatctgaaagtgaaatctttactgaattgaatggaatctgtggagatcttcgatagtcttcccttgaggtgaaatcttgttttgttgagtggtttaagatgttttctagggtgtagcactttgcagaagtgctttcctctttcatgataggtgacccagtttggagatcaggaagattttgtcatccttcacattgcaagacttgaagacttgcaactcaaaatggtatatttttttcttttcttccaatagagaacaattccactctagcactcaagtatctaatacttttgggacatgttgaaactgtttccatttcatctgatttcactcagcaattatttatagaactctctgtgaggtaggcaccatgctaagtatcctgaggctgacaaaga

SEQ ID NO: 76283 - DNA, 1054 bp, Homo sapiens
attaatatataaaaccatcagatatcagagcatagttgtggaaagtcacctaaggaaagtcattgtctctaggccaaagactggcctagacgtaagtaatgcaccagtgtgtcagaaagggggttggtcgacatcagaagcacccagaggcaaacactggttgtgccctgtacccacagtaactgtccatagaaatgtgaatgttggtagtcttcaaagtttcagtgtcactggcaagtccttctttgttggaaattcaatttaacattcaagttctatagcaaatgcctcctattatgatgtcttgtgtttacagtttgcctctgtaagtagaaccctctaaagggaaaaatgctctggtcagattgttatggtctgtatgacagatacataactgttgtaaatcaacacattggcattctcgtttgctccaccagtttgttgtgaacttcgtcaggggaaggcatcatgcctaagtctattcaactctgggatactgacaaggtcaaatttctgtgcctgcaaggctgggactggacccaagctgtacagttcatacaatgaaatagtgccatttagtaaaaaagggagataatatggcacttggttggaagtttggctctagaatctgattgaactgggtttgaatactaggtcagccacttacatgctgtatgacctaagaccccgctctaaaaaggatattatctttacactgacctcagagggctgttttgagaattaaattagacaatccatgtaaaatacttgactcagagccttacatagagctgttagcagcagcaacaacagcagcaccagcagcaaggtaaataccaccatgtgtgtcctttgggtggtcagcagtttgctgaacaatttggactggtttagaaccctcctaactcactactggggactttccattggaaccacagcactgggtagtgacagaatttgccagtgtaatcacatcatttatgagaaatgatagcaatagggtttggtgtcatagtaatggaaaatggcactggacactatcctaattttgaag

SEQ ID NO: 76284 - DNA, 2000 bp, Homo sapiens
aagacaaccttcaaatattaacatagttacatgatgagaaagagtagatgccattggtgtctaagagagtaaaaaaatcacttctcattccctgttgagaaatggactctggcatcaggttgatggagaacaaaatgtcagctttattccagtaaaaccatattagagaatgtggcctgatctgtggctacaatcaggccttttatacccttccctagttaaacacactctcagagtcaggtaaggccctggacaactgttgtttgcaggaggagggcagttcctgtgtgaaggagaaggagaaagtgtgcatcctgaagccaggggtgcacctgacttctcgactgtgaatgagagaggaggaaacctagttcatatctgcacaaaaattctttttggtatccttgaagtgggctgaaacaaaaaagatcaaaatgttactctagcaggaggccactcatggaaaccttaggcaggggaattgtgttacccctggtacttaccaactttaacttcagtggggcaaccaagccaatggagcactcttatctctgaaatgtttggcctctgtacagaatgatgtgaaaaagaatcttctagcatggggaggtggaggggagggatgtctagattacttctacggcccccactccctaagattcttttgaaatcagttaagacacgcataaataaaaaaactccaagtaaagcatgtcagtattttaaaggcttatttgtttgagcaatgagagatgatcagtgttctaagtgctatggttcatcatgttctggaggtggctttgttccaactgtttgttcacgagtgttttgagttaaagggaattacagtctacaaatttatgcacatggcacttcacagaatagaagaggccaacttctggcctcttatacccacatgcaacaaatacagctcgtgtccttcccccaggactcaatttgtaagcctctttattgcattgtgctgtagtaaaaaattctcagttttgtgggcaacctgtgaaaccagccttcttttatttcaactttgttgttttgcctttatactgtgaattaaatgaatccttgggggttctaattatattatggaaaaaagaacttgatattctgagaagctgaagaacaatttgttttcctcagctaggtatttaggacttttaggatttagttaccattttcaaaaaacttgaagaagattaattatctccattgcctcaaatgacaaagatagtatgttcaattctctcctgagttatcatcataataaccctatattcttaatatggccttttatattttacaaagtttctcaatagggaatgagaagaaagtgattttttaatctcttagacaccaatggcgtctactctcccttatcatataactatcttaatatttgaaggttgttttcatcttcctcttcagtttttctcttttctcttttaccacaataatcatcacaaataatcctgtttggaaggtggagaagaggaagcaagacagatattattgtacccatttcagaaataaggagaatggaactcagagagtggtggtgggaacaattaacaaatgttttctgagcaccaatctgttccaactacctgcagtagtgcatttaatccttataatagttccgggagttaggtgctattatccccattttgagatgaggaaactgtggctcaaagtgttagttgcccaaggtcatgcagtattaagtagaagaaccaaaattagacccaggctttctggttctgaaatccatactcttaagcactaggttgttaccactggagaggttatgaacgtgcccaaaggcactggctgcctagtagctgaggcagggccagaacctgtctttagactgcttagcacatcttctagatcctgtagctgcttcactggttttcattaactttggggtttttcaatacaaaaagaggaaacaaatgaaagctgagccgaattttgcttttgta

SEQ ID NO: 76285 - DNA, 2761 bp, Homo sapiens
ccatcaacaggggtcaagaggagcctggacagtaatccctgtccgacccccctctcagcctaatcactactatttgcctcaaacaatcttatttcatgaggcctttgatcaatgttgagattagtcactgtaagaagcctgacttgtaggaaaccttttacctcccagactctaattcttctattccgtttctccccaagtcctgtgtcctctggaattcagaatctgtcattggcaagatctcctgtgttctcaaccccttctcagaacagtcctttcaccttcccactctaaactgaactgtggctgtcgcctaaggatgctgcctcccctgctgctctcctaagtggtggtagtgttatcttccccagtctcctatgacaaggcctggaggtgggctaggtgtcctctttcttgttccccactgctgctttcagaccattcttcatctcctcttttctaaatccagccctcctcccccttaaaatcttatgttatcagttatctatagacctctgtgagcttaatcctacgcaatgtaaaggcatatctttctggccaatcaatatggagtttatggcacttttataaagaaagtggataatggcctcctgatcaagaacataactgctattttcattagtcggtactctatgatgcgggtgcatggtccaggggaagtgggttcaggcccatcagactgactgagagttgagttctttacccactcagagtcaagaattgtggtatggggggaagcactgtgtgaagcatcctacaggggtctgttctgaacactgaaaatgtacagtccctgtcccagagtggcattctcaagatttttttcttgatgggacttgtgtggctatgggccaaattaaatttaatataagcctgactctcatagcctttgtagaggaatgaaaccagaagaatttggagcagagagtcgggcactcatagaatatttttctaaaacagaggaagtcatggaagactcagggtctagagtataaagtgtttgttacttaactttgaaaggacaactttgtataatttagcaaagccttcttgtttaagattagtctctaataagtaagagggccttgctggatttcttcataattctcagtagttaccagaagtcagaactattccttatctgtaagtaacaggtctttagattatagacctagtggggatataactttaatgttgtacagttaaatcaacttcacactatttacaagacatgtcatacaacactgaaaacaagaaattagagtatgtggaaactatgctactaaaattaagcagcataaggaaaattaatgtaagcctataagtcacagcttgacttctgtttcagcagctgacccagaggcaatgaagccaaaaacaattttaagacctgttctgttctgacttgtaaagattatttgatgttaaccccatacccttatcccctttccaagtgagtaccaggggttaggaaaaagatataatattgcctggctcatttctaatcaaactttaatgctggcttcagcaaggccagatgcctactttttgtaaatatcattggcagttggcagtacatttcattaacagtttttatggctatcagtagtatttttgatactctgaggatgagcactagagaaatatgtgcttgctgaaaagcctgctaatctctgtgtgataacttaattttgctattacctgaatgtaagtgctattgatgtggcattagcattgatttcatagctatttaataaagagacagaaacttcaaatgcataattatgacatcaatatatgaatctttctttagagatgaaaaacacatagttaaaaactgtgaaaaactgccctgcttatatcagaaaacttatacttctctgttgaaaaaataggcaactaaaatagtttacaatataatctaaaaggatgaattggtggaattttcagtataactggaaggtatgatgtgttagatagtggggagagtgtatatatattatcaagccacaatattacaacctgacactattagatataatagattatgcagccaaaaatgtggtcatggacagtgataggggagcagaatggttcggtaaagtaccaagtctggtgacaggacaatgggaaaatttctgcagcctgatggtctgggtagttggatataagtctgacagcagagatactttcatatttagggaaaacctgcaaaatactgaaaagattaataaagagaaagggaacttctaaatagctaaaactcccggcagagcagcatagctgacagagcaccataatcttgcgtatcagagcttctcaattcctttggaacaggagaatttgataatttttttctcccatgaggatgcactatgaaggaaaccgctaggaaattggaattattttaaagtgattattttaacattaacttggtagacttcatctattccatagcatttcttttcttttatcccattcaattgcatcctctctataggattaatgcactcttgaaagtgtcaccttctagccagtggccaactaacacaaaaccaattcactaaacaaaaacacaacaaaggaccctcagagagtccacttcactccctgctacctccactggagcaggtactggtatcctcggctgcaagacctgaagacagatcacatcacaggacgctttgcagacactcgccagtaccaacccagagcccaagagctccactagatggctagg

SEQ ID NO: 76286 - DNA, 1124 bp, Homo sapiens
atgcatgggactttggggacttgcgggaaaaggttggggtggcgagagataaaagagttcacattaggtacagtgtacactgcttgggtgatgggtgcaccaaaatttcagaaatcaccaccaaggaacttactcatgtaaccaaacacctctgttccccaaaaacctattgaaataaaaaaaataaattaataaattaatgtttgtgttattcaaatacccataggagaagtaatctccttgagactggagctccattttcttcacttttctatgcctggaaatacctcacaaaatgactacagagtagttacccaagaggtatttgttgactcgttatctcttacagaattttagataccatctatacttcttttcttactgtacattttccctgggtgagctctcatttattcctgcggatgcacacataccctgaccagtcacagatctctacctccagctcaggctcttctcctgagctccagccccacgtgtccaagtgtctgctgggaatctcctagatgttgtgggctaactccaactcagaatgcccatgtctgaactgttagtatttctttccagaatggccatttcttacacttcccctaccttggctaacaggaaaatcgttatctactcagttgcctaaatcacaattttgaggcgtagaaactttccctcgtcctttcctcccatttttaatcaaacatgtttacattcttctttttccttctggtttaggatctcctccaagacggtttctgtctcattacttattagccttgcctaggccaaggcttgatttaggatatgtatgtttttaatacatgtctaatgaatgggaattttttgtagcttttagattttctgttgagaaacacacataaacacatactcacaaacacgtgtgtgcctggaagcacatacatgtagtattcacccaagtcgtccaagttcactgagtcctgtccagacctttaattctctcagtttatttgtgagattgttgtgtggcacaagcttacaggcatgtgtaattgttaagggaatatggattgagaactctgccatgataactcatagctccttctgggtagttaagccttacatcccattctgcc

SEQ ID NO: 76287 - DNA, 2382 bp, Homo sapiens
tttgctgagtgggaccaagcaatcttggtgtagaatgaagaaaaaatggtgaaactatggagggtgaaattatttaaactgtaaaaagcaaatgactttgttttccggatcttttataccacctcctttgatgcagcctgcttcctgcatgaagcctgttttgtttgttacttgttttcttatcctgagattgcgctaaaattgcatgactctgttacaattcttggataacttttcaagaaccactttggaaaaattattgtacaatagtatctctctggaatccagttttattctctcccagtcacttactttgccaatggcccattagctgtgtaagtgatgtagctcttccttttttcactcatggattacttctgcttggcatatcttctttcaccttgagcagcagtcaaaattttacttatttcttaatattcaacttaaatatcacctttgtgaaaagcctttcgggttcatattattatgatctattcatatttattcagttctctagtaagtactgtatgcataagtaggcatctgataaatatttattaagttgatattaacatatggcttaagaaattgctaattttataatacagtagttttattttttatgcaaacaacaaaagacatcttaaaaagctattcttttttttttgagaaggagagtctcactgtgttgcccaggctggagtacagtggcgcagtcttggctcactgcaacctctacctcccaggctcaagcaattctctgcctcagcctcccgagtagctgggattacaggtgtccgctgccacgcccagctaatttcatatttttagtagagacggggtttcaccatcttgaccaggctggtcttgaactcctgatctcgtgatccacccacctcggcctcccaaagtgctgggattacagatgtgagccactgcgcccggcccaaaaagctattttctttttaagcctcaacaatacatattaaaaaatacaagagaaagaatgtttgttaagaaaaaaatttagacatacaagtgtgcaatttagagaaactttttttctaaaatattataaatttagaaaaattttgcaaacagaaaacactgtagggacaatatatgataagtaaattgtacttcagcaactcattgctttttagataccactgaattatttgcactaatggaggaacattgttataccaacctatttatatttgatccacattttaagattcctgttcagcttatttactttcttacttatgtcttatctggattcttattaacgttagttctcccttacttgcttggaggagaaatcattagaaacatgctgagaactgggagatggccacttcaagtttaaatttgctatgaagaagctaccaataaccttctttcagtctaaattaaggtggcctgtagttttacaacccaaagcatgattgtgggatgctaatttagggaactattctgcagaaaccatgacacaatcagcttgctggtccgtatttagaaccatacttggaaattgtgctcaggtctgcaatttgtaattcatgggtaggggttgaatctagaggtggctgagagttcagccacaaaggtgataaaaggattgggaaagaactatgaaggaatttaaagaaactgggattagcttggaaagagaggaagataaagagcaatttaatcgcaatctttatgtacatagagaagcttagcggaacacagtgaccagtgttttctgcctcacctgaggacaacacaagaggcttaaactgcaatatgagggatttgggataggcataaggaagtatctactaacaagcaaaattggagtagactactgagaaatatggtagaatttccatctctgaggactgaaaatgtatatattctattcctttcgagtgttttaaggtaaatcttgctcaaagatgttgacctgaacttgatggcttcctggaaatccattcattgtgtgacattactgtttttagaagcttcttcatagatggcagggaggagcaagtacaccaatcaagtcacgggcagtgtgatatggagaaaagggctccaggctgagaggcaagggaacttgattgctgtctctgatgtactgcaattagttgagtgttcttatacttgtcacttaactcctctgtgcttcggttttctaatctataaaatgagggagccaacctaaatggctcaaaaaggagtttaaaagtaagaaagcataatattcagtaaacataagctaaaaccctctcccgggccagccacggagcaagacttcttcacgtattatcttctagagcatctcatctgatatagtttgattgtgtccccacccaaatctcaccttgaatt

SEQ ID NO: 76288 - DNA, 4391 bp, Homo sapiens
aaataatctattctctagatttagcctggcattgacccgctgtgtgacttacgtcaagccactatttcttgactggccctcacatgcaatttatcctttgcaaaatgatgggatttaatctaaatgattgctaaggttccttccaggtctcagcttttgcagcttcctatagactgtgaacatgggaatacagtctgattttctcagtgactcatctgggaccctagaaactggcagattgggaaagaaaactaatattctctaaaactgaatttcttaacttacagattataaaactctactttttaccatgtctaaaaattcagtattcgtggaacagctgatattatcttttgctgatgggcaaaattaacaggcacctttgagacctagcttcatatctatgaaaattcattaagttgaaagttcatttgtaaacaagcttctctagacagctgagaagtgattgttctatcttgcattgtatatattttaatcttttgtattgacctgtagtcatctcactggtcaagctaacatgtttttgatagccaagagttggaaaacctggtcactattggcctaattgtactcttggaccacccatggaactcttggcaattagattttcttataaaactctttcctagagggccctttgtggataagatgagcctcacattgcattttagaatagtacgtgctaagaagcagtgcaagtaaaagtgtgacattatagaagatgcctctggcttactcatcttcattatgacaggaatttgccattgtcaatgtcttatatgttgtagaatgagaaagaaatgactctttggagtagatatctgcaataaaatctggattgatctacttacagtcagtttcagagtaggcagtctccagggcactgggagtaactagactctggtctccaggcctaggttcagctacattccctacaaggcctttggcgtgtacctgttcagttggtcagtcaccctgtttccaaacaaaggacatggccctgaaaactatacacaacagggcaagatcctggctctagtttgggattcgtcatgtctttttagttaggcaagccttcaatttaggggacaggatcagagctgtgtcatagatctcttatatctttgtgccctatcttgccctcaagactgcctcatctctttgattagttcctgatgctgtcatgggctaggccaccttcctcatttcctactaaaattttcactttaactaggttgaagcaactcatatcatttctagcatgtcactgaattctatccctgctcttcagaatcagttacactttttcaactaggtatccagcactgagaaggcacagaggagaccaggcctgtagccagttgagaggttacaaaaagcatcaaattgtaggacagtcttatacaggtgactttctcattcagtgtaatgtggattatataagttgaggctttttgattgcaagcaatataaattactttggctaactgaaaggaaaaaagagtaatttttgaaggtatagagagtgtgtcatagaattgaaggaaaagtagaacagattttcagagtaggacatctgtgggagtagaggaaacagaaactaatggtcacgtcaaggcaccaccactggaatgagttcactccagacattttctgttaaacatctttattgtttgactagtcattcagattcccagcagagaatctgactggctttgattataagcctacctcttagccagggaaggccctgtaccttagatgacagtcctaccagcactgcccataataaaggtcaggggtggttacccaaagccaagcacttttggtgttcctaccaaaaaaaggacattcaaaggcaacagatgtctactacaaaatctgttctatgggatctacagtgagggaatagattcagccttacagctaaagaaacggattgctatgcagagatttctgcttcttaggagttgccaaaaagacccttatccggcttaggagttcttggctgtgattttagtgttcttttgtttcccaagtatttttaaaatgtaaatcagtaactagcaagaggcatctttggtcattgtagttgcttggagtagaataaatttaaaaaattctttgatgtgagaaaaattactatcatcattatcacacatggaaggtcaacattagggccagtcattggagttaaactgtcagaagaacatcccagttactttctcacttttgagttgtgtagactgacaggatttgagtctttgagggctttgactagggtaactgacctcaaaacaaatagctagagggatatttctacttctatccgctgagggatttgtagcaagaagccatattgtggatggtatattttaataacaaaggggattttaaaaggaggatgacacattgatttggaatgttttctcaactgtatttacttattcttaaatattttccttcatgctttctttctcaagtggatgaccagctggttgccacctttttcttctctctttgcctctgttcctaatttctttcttatccttaaccactccactttccttcctccaatcttgttttctctctaaatctttcctccaaccttattgaatctctccccttctttttgttatctggtcatttgatctataatttcgattccttttcctgaaattccctcctttttccttttcccctaaaccatcattctagtcctccccacacccaagcttcttatctctttgctgttaatctccaatgtgtttattgacttgtgtgccaaaaggcaaaatccccagccccctcccaaccatgccagtgcattgaaaagcagcagctgtcattgctcaacaagttccttgtgatctacaaatcaatggataagaattctcacagtgaaggtttacatgtatatatttgtatgtatatatgagacatgtgaccatgtttaatgaatggagaaggacttggatcttttctagtagagaagagaagcagaaagctttgcctaaccctatttctttactaaggtaatgaaaaaattatacagggaaaataaatgatgttaatgagagaaacagggacaggagaccaataaacaatcatcaggcatgagaatatcttgctgaacttattattgatagtagacacaggaatgtaatataaatgcagtgatggaacagaaagcagactcaggaaagaaagagatgataataaatagtaataaaatccaagtgattcatatgctcaagtgaaagaaagaagaaagagggcagtgtacacaaagtaaaagggcaagaaaatggaagtagagtcatcactcgtagagataaatagttgggaaatatgagaagccttcctgacatcagtaaaatattacatgttaaacagcaaacaaaagacaacaacagtgtctgtagtacttttggaatataaaagttagataatactagagtagtatcttcaaaataagcaacttcagaaatcaagtccccagtaaagggaattggaagaatttgaatagatgaaataaggagcagtggcaagtgatacaaaccttaagcaggaaaagtgattttaaatggtactggcaggttaacaactggcaaaaagaaaaaaaaagaaaagaaaagcaagatggtgctatatcccccaggtgctgggaaaccaacctggcctaaaaaaggagcagacccacctaactttttgccaagcactgtgctaggtgcattgcatacacttttaatttaagcctcgctgtacataaaagtgaagccaaggtctgagaatgatatccattgggaggaaaaaacaggaaaattttctgagccagttccaaagtcataaggctcagggggaataactttgactttgtcaagtcagagtgaacagccagagtcagcagacataggatattgtcagaggtaaatcaccagcttggtctggtctgtcttattgcaaggtcagaggaccatagcaagccagccaaatgttttcaaccatggaaatcccctaactttccaactgctgcagtcccacagctctgagcttttactcacaggatggctcccttccagctttcaaatctctccaagttgattaatcattttcttgttctgactcattcaggcctctagaaaaatagctgtaggtactggaagggctatgtagatcaaggaggtcagataaattggcttgatgttggtctatagaaaaatctagaagatattgccaaaagcttttaagcataccgtcttcagatgctgggatgtgggctatatccacaggccattggctcattcatgtgtttgaagcagaatatttttgtgtgcattaggagacttgggtatgttcatttcttaatg

SEQ ID NO: 76289 - DNA, 1317 bp, Homo sapiens
aggactgaaatgtcagttctggttgtctgagccaagggcatatatgctgattacattattttgtctggctaatacactttatcatgaagcttattttagaagaaatgttcatttttagatttctgtttgtatatttaggtcatactataaggtccattctcttgcttttataataatttagtcttctgctttattcattcaattcatgaacattcattaagtacctgagtatgctagtcattggagatgcagttgtaactaaggcatcaccccagacctgaagttttatgttgtgttttgtgcttagtgattggcataagtaaaatacttgaggaaacacagaagcagcagcaaatatttctgcaaaggagaagagaaaatatttgagttgaagcttcaagaatatatcaacattttccagtttgacaagggtgggaggagccccatcaatacagggaacagcatgtggaaatgcaaagaggtgtgaaagagcatagtatattcagggtgaaaaaatacattttttatgaattgtagtagaaaatgagccgaaataggttaagttgaggtaagattgtgatgggtcttacagcatactaaggcattatcctgtaagtaatagaagggcttatggaggttttaaagaaagagagtaacttcatttgatttcttttttcaggaagagaattctgatgatagtgtagggtggaaaaaaggggtaacaaaggaaccagtgggaaagctgctgtatagtctggaagtggtagcagtaagaggagaggtgaagggacagatttgagatgcatatcagaagtcaaatgagcagactactgtgactggttggatacaggggtgggtgtttgagtgggacctccagttaggaactcagatgtctggatgggtcatgctgccttcaacaagaaattcagaggaaaagcagccttggggaatgatgaggtcattttgtaacatgttgagtttaaattaaggcactaatgagaagagacattcaggtggagaagtccaatggacgacaatagtatgggtcaagaaagaaagctgagaagtatctgaattacaattatgcatcacttaatgataggaatgtgttctgagaaatgagttattaggtgatttcaacattatgcaaacatcatcgagtgcacttacaaaaacctagatggtatagcctgctatacaccttggctggatggtacagcctgttattcctgggcagcaaacctgtagagcatgttattgtactgaatactataggcaattggaacacaatggcaagtgtttgtgtatctaaacata

SEQ ID NO: 76290 - DNA, 1042 bp, Homo sapiens
gcagtcactctgcatttcttctccttactccccatcccagccctaggcaaacactgctttctgtctctatggatttgagatttttttctgctttttagctattataaataatgctgctgtgaacatttacatgcagtgttttacatggacatgtgttttcatttctcttttttttttttttttttttttgagacggagtcttgctctgtcaccaggctggagtgcagtggtgcaatctcagctcactgcaacctctgcctcccggttcaagtgattcccctgcctcagcctcccaagtagctgggattacaggcatgcaccaccacgcccagctgatcttttgtattttagtagagatggtgtttcaccgtgttggccaagatggtctcgatctcctgactttgtgagccacccacctcggcctcccaaagtgcctcagcctccgaagcatttatcatatgaatatatctccgagtagaattgctgggttatatgttaactctgttttcttttaacattttgaggagctgccaaatcattttccaaagtgaccacaccattttacattcccaccatcaatatattgagggttctagtttctccacatccttgccaacactttttattgtcagtcttatagccatcctagtagttgtgaagtggtatttcatggtgattttgatcagaaacatttttcacaaaatagaattccttagtttagtttagttttgttttgttgtttttttgttttttaagatgaggtcttgctctgtcgccccagctggagtacagtggcacaatcatagctcactgcagccttgaacttctgggctcaagcagttctctcacctcagcctcccaagtagctagtactacaggtatgtaccactgtgcccagctaaattttaaaaaattttttgtagagacaaagatctcactgtgttgcccaggctgatctcaaattcctgccctcaagcaatcccccttccttggcctcccaaaatgctaggattacaggcatgagccactgtgcccaaccata

SEQ ID NO: 76291 - DNA, 1023 bp, Homo sapiens
tggaggtccaggtagtgtcctaattttgcacacacagccctggtgacatgaaagggcattgttgaaatgaccaagtgagtcatggtaatcagggcaatcctgtaggttagagatatgggggtcttgtttatttgtttgcctgctagagctgcaattctttcataaactacatgacttttgaaaatacctcaaacaacatatataaatcagaccaaggatattaatctcaggccaccgccatagtgaggctttgaagccaggggaaggtggtgagaccttcttgtttgttaaggaagaaatgtcataaaaattccaaagcaggactcaaatttccaggggagagggcctctttattgtttcctctaatagctgctttggcgctttagtgaataaatgtgttgcacaaagtaaccctagatgcatctgaactttagtctggcttggctcccacttttgtatttagcatccattctgaattatttatttaagatatttttgctgttgtttgtcactccttcttcctgtctccctaccagtccccctcattcgtcctgtctttatttttacacttctctaattaattgatatcttctgctcttagcactgcagcaaatgtgcctgcatttttatgtggatcttcactatgcaggctatgcttttaagtttctggaatagaatgatggtaaaaatgagtcatggcttgtttctatatttgtttctgagtcaagaagcttaattttcttactataatgcctgagatatcaagctatacagtttacttttaagggaaacaatcacaatttcatcaattcctttaagtagatgttttcaaatattatagaattctttggatttgtgtttccaaaatgaacaacacaatggtagtgctattattgttttaaggagaaaaagaagcatatccaaaataggtaaaatcttcccctaaatcccctgggaacaggcctatgggtgttgccctggcctgctcacagccccaggacaaccggcattaattcactgagg

SEQ ID NO: 76292 - DNA, 1896 bp, Homo sapiens
agctgtattattatggttaggtttgatgaagcatggacagtcatgtagaagtatagttggacaaaaagcagatatgacctaatgatgataaactagggggatcttagcaaagcctgtttgtttagtttcttcttggcctctgtgtttaacattccatccctccgggtatagtcaagacacctgtctcatgagggtcttcaagagagaaggtcagagagacctttttgcttctgcagttttcttaacttccttcagcttaatactcagtgcgccaagcttccatatttgggggtagcattttctgcactctatcatgctataagctgattttctcacatttagaggaacattcaacagctaacataaacaattacctgatgtcatatttgaagatatacttagataataaggtcttaaaaaacagtaagtacattaagtacattcacaacaattgttaatcttccattagttctgaaatgcctaatctaacctttgttttatctcagacttgggctagaatgctccttttaattcattctgcatgatttcatagaatcaattttttcttaaggtctcatatccttcaaagactttagggcaattggtcacgaagacccttgcacctcctcaaggctgtgtgctgtggatgttgcagcttaaggaagcattttgaaattgggcatctttcacagcctagtgtagaagttattggcccgcagtttttaccggctttctctttcagaaatcttcttttgttcctgccacaaggcaaaaacaggaaaagagatctgtgtgaaagaatgctctcccttttccttttgtggtgattgtgtatcttaagagaaggcctcaaaggttcccggagctgtctgtcttttcatgtaaatggagcccttaagcctatttagaagtgtgcgaaaagactgtgggagttgaggtgaaagatacagaagagtagcatcagcaccccgtttaatgtattcaagttcaactgtgcactctctctttcttgtatataattaaaaatactgcagaattgtattttgcacttgtacttttaattatatgctattcatattactatatacccatatagtgtgcagcgttgcaactacaaaaccatatattttgtattgggaggtttaagggattttccagggtaattttgaccgcgtaaaatttgccttacatgccaactctagaatacaatccccacgtaagatgtaaccctctatattaggtatttttaaatccctgcttatcccaaagtgagcagaactgggactcacattcaccccttgcccccaaaccagtaacaggtatagggttgtcactgaattttgtgagaagaaaagaggtgagacagaaggaacttgtgaggtttgacagaggagcaaggaaatctgtggcaggacacagtaggccggggacgctgggtcaggcagggaagggggctgagagagagttcctgggtgagactgtttgtactagtaaatgcagggctcaaagccatactagccatggggttggtagagtttgtaaataggagtaactcctactggatggataatagccatttttccctagagtaccttcaccttacaggaaagtttactgtgcattgttccatgtgaatgttgcagcatgtgtgtgtgtgcacacacgtgtatttgtgatgttgtagacagagtaggaggaaagagtagcagtgtggaaagaggagaaggcatgaggatttagcatccaaggtttaagaacaaggtctgccttttgttgttttgtggctggggcagtatcattaaatggctgaggggacctgagatattggcatgagagagggaaggtcacccttgtagcccctgtcacctgctaccttgggaggcattcccttcccct

SEQ ID NO: 76293 - DNA, 1048 bp, Homo sapiens
tttggtgcttgtcttctaactgccttacacttttctcttctgggaacggccaaggcccccaaaacacaaaagtgaactatgatcccactttgctagactcttgagatggctctgtaaacataccctctaatctatggtccttccttcctacttcctcagaattcactgaaaacaatagagctctaggaactcctattgcttaaaacaggggtgaggatcgtgtttattcaggactatggctgttaaattagcaggactgttttgactagctggtactcaggggtagggttgtcatgttggtcaacatgcctatcccatttgggactactctaaaggaaataggaatgcctaaaaagtttctagacttctaagaattctatgactggggttagggatgacttataggcaggaacggagccagactcctgacggtatccaaggtttataggcttggtgatagaatttaccagagtagaagagaaagttttctgagtagctagtgttttgaatggcatggggtttgtgacaagatttggggtaagccagtgagagatgctttggagttatctgggacctcatttattctggtggaatgccagaagtacaggaggcatctcctagggtatttagttttttagaggctaggaaaggtagtaaaggtaaagtagatacaaatttgttactatgacttttatggagccttgagatagttatacgaagtaggaggttgagcagggattattttaatcggagaagagattagtagaaactcatttaggaggattagagcatgctgaatgagatgtcagaagcttttaggatccaagaaaagtggatggcagagagagagaggggtcagcactgtgtttaatttccttctttaccgtttctcgtctgcctttcctggatattacctatttcaaactaaagggaaatgtgtggaggctgcatcgggtagcagaaaaacatggaatagggaactctgcctctgaaatagcatataatacttcccacagggtttaatgtgaaataagtggtataatctagg

SEQ ID NO: 76294 - DNA, 1022 bp, Homo sapiens
tgtcggccaggcgcggtggctcacacctgtaatcctagcactttgggaggctgaggcaggtggaacacctgaggtcaggagttcaagaccagcctggccaatatggtaaaaccccatttctactaataaaatacaaaaattagctgggcgtggtggcatgtgcctgtaatcccagctgctcgggaggctgaggcaggagaatcacttgaacccaggaggcggaggttgcaatgagctgagatcacataccactgcactcctgcctgggcaacagagtgagactctgtcttaaaaaataaaaaataaaaataacataactaactgtataatataataatatgataaatgctattctgttggtatgaatcaagtagcacagaggaagaaaacaattcactctagtagatggttggcattttgagagagatataaatataattgtgctcatttataacatgaattataaatgtagcagcattggaaatggacatttaataaggtgtagcactactaaattggattaagtgcatgcactgggtttatagatggatgttcccatcaaatttgttctttatttgtatccctacccctgagcagtccttgcctggcaagtgattggtgtttgcactgttgggggtaggctttaggttcctgtttgggcaccaggagctgtagggttagaagaagtaatgtctttttctcacctattgcaaggttcattactgaaccctatagcaaaggcagagtaacaagcaaaaagcataacaaatttatttaacagagttttatgtgacactgaagcccttagaaatgacccaaagacccagggaaaactgtgtatttatatggatagtcatacagaagtatgattggagcaccacagagtatcatctaatggtaatcaactagggagaactttgcaagccctgtttgttcgaatggcttccaagtatagggtaggacccctctggaatgaagatcttaaggcctacttttagggaagataggtcagaaaattattt

SEQ ID NO: 76295 - DNA, 1060 bp, Homo sapiens
catgtctttggggcccagtgtttctgtctctctgcttctcccaacactcagtggcctgaagaagaagagctttggtatataatttcttttttccccccagccaagaggaattgagcactcatgaatattttaagcgtgttacaaagaacacaaaagctgtgccttcatgggaggattaaatgttggtgtttgactcctcacaatcagcacattttaaaacataaaccagatcatgtcagtctcctgcttcagagccaccagtggtctcccacactcttgcaaccaaacccaaggctgggtgccagcctccaaggcactgcctgactcagccctgcccactgctctgaccacctcttgcagtaattccagccatgctgatctactctgggttcccagggcatcgtaagcatctttctctttaggacctttctacacatctcccctgcctgggaccctgccctgaaccctgtgctaccgcaggatcgtcactcagatctcagcctgaatgtcctgtctcagacaggactcccctgactgtcctatcagtatctacacccgatattttatttcctcacatcactcatcatatctgaaattgcctgctcatttcctggttttcttgtttactgttggaccctgactagggggtctcactctacaagggcagaaagaggttgtcttagtctggttctctgttgttacccagaagctggaacaacgcctgttccccagcggttgctcagtaaacacatgtggactcaatgagggattgaattggaagttatttacctctctcctggcttttgcttccctctcttcctttgtctctcttttgcggaatctgtaccatgaaaagggctgttgtccagtagtggaacacaggccttggattgaggtcctggttgactcacttgatctgaagcttctggtcatgcacaactgccaattggaaacagctactatagaaccaccctctttttccaaagggtcaacaaggaaatcaaaaatagaaatacatttcaggtagtcatgtaatactttactaatactaaccctaaga

SEQ ID NO: 76296 - DNA, 1036 bp, Homo sapiens
tctcggctcactgcaggctctgcccccgggttcacaccattctcctgcctcagcctccccagtagctgggactacaggtgcccaccaccttgcctggctaattttttgtatttttagtagagatggggtttcaccgtgttagccaggatggtctcgatctcttgacctggtgatccgcctgcctcggcctcccaaagtgctgggattacaggcgtgagccactgcgcctggcccaacactttctatattttaaaagttctagaacttcggcttctgcccatgatgtcctgtggggtcctgaaagcaactgttgaagaatatctttgcttgaaaagagccacgagtgaccactgtgtcttcctacaagtggtcagacacaattgtctcttgattatttagtgtaatgtaggggaataactgagattaactggtggttatgattttgcttaaggcagtgtgatgaggacactaaggttagggcagctcctgagcaggaggaggctgctatccagagtcaggaagtctcccaaggtgttttttgcctggtgatcagcttttggccaaaagcctattactctcaggtgaacctggccctgttcttggtcccaaagctcccggaccaggctgagctataaaaatagaatgccaaattattgatcctacagtgtaaaattaagctgttctatccactggataggcttgcctaagttcccctttaaggcaaattaagtgacaaatcaaattattggacagttgcttggtaagtacagaattgatgtgaggggagttaagtgattcaaatgcttatattatcaggccccgttagcctgctgttccacctctacagtgcagatctatctgtcaggtgaccacttgagtgggcacacagggcttcctggcaaccctgattaggttcggaacaagcacttccatcatttttcttttttttcttagagatgtgctctcactctgtcatacagagctggagtatagtggtgcaattatagctcactgcagcctcgaactcctgggctca

SEQ ID NO: 76297 - DNA, 1027 bp, Homo sapiens
cttgcctttactacacctaacaaaattaacaattcattaatatcatccaatacccagcccaaaatcagatttccctgattgtctcaaagatatccttttacagttgattagtttaaataaggacctaaataaggtccataaattgcatttggttgttatatccttttactttcttttattctggagtacttcccagaataaaataataaatgtcacaaataatgtcacaaataattaataattatgtcagaaataattacttccttactctccttttatttgtgacattaattatttggagaaattggatatcaaatgccctatattctagatttggctgatggcttcttcaccacgtccttttaacttgttctgctagatcttatatttcccataaactggtggttgctgctaaggtttgattagattagggtttagagggttttgttttgttttttctttttaggcaaaaacactctataggtggtgctagtacttcctattttatcatgtcacaaggcaataatgtctgactatatcacctttaatggtgattaagttgatcagtggttcgggatagtggcagcctgatcttcttcccatgaccaagatttctgtcaacttttcacctactggttttagcacccattgatgatcattgcctagatccattgtttaatgagacatatattctgtcctttcattctgcagttctgtcctgtgccagtgagtgctgattattatgcagtttaactccagaaggccatcttattttcctcatttccaagtctgtgttagagtcagggagtttctctgtgaccctcatgtgctacctgagaactgactaaatttatatgaaagtaacattcttatagttgtattgattaaaatttttatttgaacctctagttgagctttgctgttggctttgaaaacataatggaaaagtggaaagcattcttgtcagtcatgttgaaaagtaactggcagaaaaagtggacttaaaaaaaaaaagtagtggaacaaa

SEQ ID NO: 76298 - DNA, 1050 bp, Homo sapiens
gacagatgaatccctggtataaatacctgtgctgttattatagaaagagacagattggtcaccttgttaatgacttccagtattccagagttcctcctctgaaatactctgcagatccaaattatcataatataggggcctcttctgccatttagaatgaccttccacataactctcaatgtccaaattgggcccttccttcaaggcccagatcaaatgactcctcccctgagtctcccattgagaagtcataccttcccatctcctagcttcccatccatcctcttttcatggattacttgctacatttcattttagctcatttgcgtactcattttactttttttttaaacagaaaaatatcagtcttatctttgttttaaccacgatttgtatttaataagtattttcataacatttttaattttaataattaattacttgagtaattttgttttctgagatattcagcttttatttcaactatgcttccagtatctacaggggagtctgtcagtcacatgttgagccaggttttctatttcagaagaggaaggaaaagaatgtgtaggggaattagtatggaactggagtgagaagaactagattcaaaacccgtccccaccacttcagagcaactgctttagtgcaattggtatgtcagcaggggccttccctcaaaaatacacagctctgtagcaaaagtcatctgtaagacatatttaagacttagttcatcagaaagagggtagggaagaaaggactgtgtagatttatgagcagtggtggatggcacagggatggggtcttgggccctcaaagccctccgaggtagtactggctactgggaaaaggatgtcggggagcaggtcccacttttagctgcacttgaaaagatgagtgtacaaagcttatggagtactcaggacggagagaacatggtgagtgttagggaaggaagccttaaatataaactttactctttaacctccttgcaatctcactctgaacctccttagtcccaggtatgggtttctctcacttcttact

SEQ ID NO: 76299 - DNA, 1042 bp, Homo sapiens
aaataggcaatactagttgccctagagaagaaatttatctagagaaaaaaatgtacaaggtagacacagctggtgagttacccttatactatttccagtactaccaatttcatttcttccagaaggatttagaatgccacatagtagttttcctggtgccatgcttgaaatggtgaatctatttgaaagaagggattttgtagtcacattgatgttgctgcttgctgcaagccaggcaagtcacttaatatctttatccttaaaagaggaataatgtcacctacctcatggtgttacgatgaggatgaaaggaggtctgtaactaaggcactgaacatggtgtttgatactcactgggtacccagtaaatgttagttttctttgtctagactatgtagtgctcttcagttttcaccctgatcaaattgcatttgttaaaaattccaagtaagacatggcactgggtactttaaataaaggggtgctaagggaaggtcagcatgcggtagagggctgaaagagccagttacatttgtttgtttgtttgttttgttttgtaataaacaacagtggcttctcatctcctttccctggtcctgagcctgctgagtcactgttccagcccttgggccacatgatctcaggctgtgtctatggaatacagcaaaacccacaagaaaccagcactaatagatggcaggtcattttgagggatttttctttgcgttcctgtgcttgctctcctggtgagataggaaacctttaataagacttttcctaaatgatgttgcatgtgaaatgcagatttttttttttctgttctcctaacaaatgaccatttcatgaggtttcttttcattttttcttctttcctgcttctcagtacattccacaaagagcttattcctctgctggttactgattgatggttctactctgtatgccctttaattttgcaataaaccaacaaggagttgagaccacaaacttaaagagaattgacttatttgactggattcactggagccaacaggcagattta

SEQ ID NO: 76300 - DNA, 1016 bp, Homo sapiens
tttggccaggacatccttttttttttttttttcttttgagatggagttttgctcttgttgcctaggctggagtgcaatggcgtgaccttagctcactgtaacctccacctcctgggttcaagcgattctcctgcctcagcctccccagtagctgggattacaggcacgcaccacaacgcctgactaattttttgtagttttagtagagacagggtttcaccatgttggccaggctggtcttgaactcctgatctcaggtggtccacctgcctcggcctcccaaaatgctgggattacaggcatgagccaccatgcccagcctcaggacatcctttttaacgggcttgtaccacatgattgggagtttgaatgttagtaaccatgatagaagatctccactccaagggcatcaccgtgggaggaagcctgcccctacttaccatgtaaatatttagccatttcaatatatttgttctggacttgttcttcttatgtgtgtctcctgtgttgagtctgtttaattgtaggttattattgtgtgtctatattgatgtcatttctttaagtacagacacagacagcattgcttcagctgcccccacccctccttttaaaaataacaccttacacaatatcccttccttgaggacatcaaataaataacttttgttcaagagcatatctgatgaggtggctaacttggaaatttgttcctaggcagaccttgtgacctctgtttcaatacatagtgagtggcctttgctcccattttatgctacagattcactctggagatagaattggttgcacctctccaggcagtgagtttggagagcccttggtggttaggatgccatttgtgctggtggcacagaaatacaagcagtaagcccagagttgcttactctccactggaggtttctcagaggctgggggggacccgagactcctctgcttcaactccgctctactatatgccactggaagtgtagctgaggctgaagggtatcaatgtt

SEQ ID NO: 76301 - DNA, 1036 bp, Homo sapiens
tggcctttctggacctaccctgttctcactctcttccttctgcctcttgccctcattgctttccttattctctttcttcctcttgtctccttctcacctccagctcctaccacagcagacaggttggggcagacaccgtcatggttggggagcaggaggacagcatggggaaaaccactccaggcctttctctcaaaccttagtgatgaaaggactcaatggacctgaacaatttctcacaggaaagttccggtctctgtctccttaaaagcaaggcattcagtaacccttaacagagccaggattaaaacttgaatttctgacttatcccaggcctctgtttggatagaaaggctaggtcactgtcatatatggcaattaggatcacttcagatacaaaagtaacatttttaaagctgtgccttaagcagagagaccatttttagtacaaaaaggaaaaaaagattaactgtgccttcagagctgatgaaaggcagagcctcgtcactttgaaagcattggatttagtgccaggcgggttggtgagtagactcagcacccacattctcttcttgcgtctctctctggccacccagattatccaggggctgctgtttacttgagagctagaagtatcaggacggactatcactgcacctcgccatcctggcccagttaaagtgattttgaaacttcctgatgtgtgttagattgtggcaggtttctgccagggagtgggcgggaggaggaagcaggtgtttttatgggctagaaatgcccctgagatgcctgaggttgcttcgtgaatcctctagcccagcctaccccttcaactctgttgcacagagacatgagttccatgaaaaatttagtttcaaaacttcccgtgggcgccggaaatgataaccacatgttatcaagagccactgaaaaccaccaaaaatttgtcaaaattcatataagattgcctcacatacttgactttcatagaagcggaagccattgacctacttgatttatggtatttattagcaga

SEQ ID NO: 76302 - DNA, 1080 bp, Homo sapiens
tgtgtcttcaggcctggccatttcccactcaggtctccagtgctatccaattttctcttcacctgtacattctagtactcatggaaggctccagtatacaaaatggctactcatggggccccctccccttccaccccaccaaagatatttctaaccttcaatgtagagtaagttagaattgacatatacattgtcccttaaaggccaggaacattaagcttgagcagagggtaggtgtagcctgggtatagtctagtcatagcctagctaaagaaagatgagtcagctgaaggcagagggtctgcattgggcacatagactggcagagagttgggctcagttggctcaatcctctgactaatgaccagttaattctgcttattctctcttaactcaaggtatttgctgccttaagctactttttaaatacttagtggaaataagtcatctattttcattagtgtgtgtgttgtgtgtgtgttggttggattttcctggccaggagcctctgccttctgaccaaaatgacattgattcccagccttctgccttagcagttcatcccatctttaactggttcccctctatctcttttctctagcttatatgccttgctggctgtgaaaggaggacctactgggtggtctatgaatctataccccgtatttcttttttaaagatcttaatttttctccctatttttccttgtgggaaggcattaaaaatgggactcaaggtctatgtgacactatatgaggtgccatttcctatacaggtgcacctctgtaagcagcatacagttaagagggcaatgcaaagaagctttgggagtaagcattctctcatatataaagttgagttgagacagaagttactttatacaaatatagggtttcttgttccttctaataggtggatggtattcttcttcctcgagagaagctgattaagttggattctgtctattcctggcttcagacctaatcatgaccattaaaaatatctatcttttcctttgtccaagaatcccactctggtcttgcattgtaattggtggtgttgggggtgtgttgcgtgttt

SEQ ID NO: 76303 - DNA, 1008 bp, Homo sapiens
taaaaattaaagtctgataaaatgtgtacatgtgcatttaattgtggttagctgcctattatttaaccaatatgataacacccctcagtcccaacttactcagcatttagaatgaattgatagaggttttactctgaaaaaagtcagtctatttcctcagttttctgggttttgaataactgctaggccttgccagataattctggcctaaagataaagctggtgaaagtcagggctggggttttgctacctgtgtatttatcagtcttctcctaaaccatagtctgccttttgatagctctaataattaatttggtcttccctgtctttcttctcccttgccccctaccccttctccctgtctgttcacaggttatcttgacgaatcagattacaacccatctgagtggagccctggcttctcaggcagacctggtgtctccagctgatgatttgtccctgtctgaaggtaaggaatctgtcctggagaggctgaaacttgacactgacatagagccccactgcctctccacctcctgttgagagctgggagatatggctaataggccctggccagtgaacccagccggagcctgttgatttaggtttggccacctttcctggcatctgatctcttatattggggagtcttttgccctgcctctataagggagctccatttggaggccagtcactcctctgtgtgttatttcaagtccttagtatgagggctgatgaattgttaaatgactttgtttttgagactgatactcaaaggttggctttcccagtggtcccctagcaatttagccttttgcttgtgctgagttcttttggactaaaaagcgtacatcagtttcatgtgccagagatatgacattcctgatcagctttacagaagattaagaaaaaaatctccacgctggtaaatctgcaaaattttctccaccctcccctgctagcaaaggtcaggctggctatggtttcgatggcaataagctttacgta

SEQ ID NO: 76304 - DNA, 1070 bp, Homo sapiens
atacaggagacttttaggcctagcaaggctcctggatggctgcccaggtgatcttctgcagatcagctttgctttatggtcttagaaattgcaagaaccacacctctgcttcttagtggtggctttaggagggaaaactagtggctaatttatgaaaactgtacaatgctttgtgtacgctccttccaagttcagggatacatcatcataacccctatcagcgaggctgaaaacctgaatcatcgagcattcctccctcctgaaacttttgtcatcaagtctgcttagtacttctttccgcatgtatctttcctttgtcccctcttttttgtaatgtgtgttgtgatcagcagatttactaaactcccaattgaattattttaataacatccagattggccttcccagctctagcctctacagtttccattctgccactaccaaattgaacttccccgtctggccttgttctgctctgttgctctcctactcagaaatcttagaatagttttttttgtttgtttcttttttgttgtttgttttgtttttgtttttgttttttctgagaatgagctaaaatcagtaagctgattttaacatatttagggatttgggatttgttagcttgaaatcagccatggtgaaagtatttataccatggaaatcagcaaatgctgaaaatcaggtggcttgtttttttatttcctccctttgcgtagactggttttcaaaacaccactagataaagtgaatgatttcaacccttcataatctgtcatttcctttctattcaaatttagttcctgccgatatcttaggtgaagctcctatgccaagtgtgccactcttggcctgcccctccccactcccagctccaggcctgtgcagagacagctcacctagaacagtgcttccccctttcacttcttctgcttctcgtcccacatccactccttcgaggcttatttaaagactgcctctttcacagaacctgcttgcctatggtctcagtctctttttcctctgtggccgctctatctgctcaactgtataaagaaaaagtctagaaa

SEQ ID NO: 76305 - DNA, 1205 bp, Homo sapiens
cagcaggggctgactcagggaaatgaagtcccttctgctctgatgcagaggagggaatacaagtgacctggcccaaccgagagatctcttccaccccaacagatcctgtactattaatatctgccagctgcaggcccagagcatccccctgctgagatcaaaagagctcctatcttagctggaacaaggtcatctgcacagggctgtaaaaagcgagccctggctggctgcagggacgtctatgggggaggagaagtcaggagatgggaggtgctctctcacgctcctttaatctcggctgaccagctgttgccctcccagtgtttgtaaagttgagagttctttgtttttgtgttgctgggtctccccgccccaccacccttattaaatttgtggctgagttgttggcttggattaagtagactcatgttcactgcttgacatcatggtataattcccttcattgaggtttcattccactgttgagttatccagctcccaggtgggagagccaaagaagggagaagtacaccccaagggccaaggactttcccggcattgctcctgcccctgagctttgtgccttgagaaggaatgagagggcaaactgaattttctctatttacttaaaatatctcctcatatttgcagtgtgcttgtcaatttgcagcctgcctttcacaaactatcccattcacaaactattgggagaatggaacttttggaacttatgcaaattgaccagtcaccccatcccagtgtgtttctcattctcactggtttgcacacacttctgattttgtacacctttgtgtggagagaggcagagagagcaagagacagacagacaagaccagaagtgtccccagagtgacaaagagaaaacatacagggaggaaaggctcctgcaggtatgccgaagtatcagtgctaagatttattaaagatcctttttattgtgtttaatctagggcaacatcagcaacacggccattcttcctactctgtaagtcagaattaaaaccccatcagtgggtgaatgctcctgaccttcagacctacctcatgatcttatatgctagagctggaaaacactttagcaatcttgtattcttccaacctgtcatgtaacagaagaaactgagacccaaagtcatcaaaagggcctgcctaacaccacagttaataacacaatggcaaagctg

SEQ ID NO: 76306 - DNA, 1080 bp, Homo sapiens
aagtatttggggattcatattccctaccaaaccatccctgcgaaaagctggagtccatttgaaagattatatgcaagtttgtggcttgtgttctcttttaaaataagttcaacaagcaagacagctcagaatggttgggacaaatcagagactcatggttgtgaaagaagcaaacttcaaagcgcggtatgaattttcaagtcttatttccactcttgctttccagctggatctgctctggatttactgcaggatgtttgaaaatgtggctccctgctaatctcagacagttgctatgatcaatggtttctttcatttccgataaaaaacactggtgtttctacttaaattgtgtgtattttcagctttattattatagttatgatttattgtcctgcattacccaaatttgtaatccattaaccacagactttggggtgggttggtcaagttagcagaaatctctacatgctttagctccaaggcccttcacagcccaatctcagactaaatgttcattggtttgtgtagggccatgtaccaacgggtatgagtggagtagttttaaaaatccactccttgggggtatggtgcaagttggctgtaattagtactttgaaagcctaaggtgtcaccatgtgactacaaagttaatattaacaactatgatcaacattattaacattagcttttccatagtatttttaattgtcttaaaatgatgaatttcttaatctacctcaagcaactgaagcatgaaggagagaagagaattgctgaaaggccacacagtgagagctggtgtgctgggaacagaagtcagagcccctcccgtgaagttttaaatttggttactgctgcctcttaggagtgagttttggataaaaatgtttaagtgtcctggtgacctttcagtttttgtttccaaagccatagactatatcaacacacacgattttacatggttctattcacaagggcacacgccggccagtgctctacttccctggtattcaggagtccatagcacttgactgggcatatgtcttccagcagctgttcagatgccatgaaaggcct

SEQ ID NO: 76307 - DNA, 1033 bp, Homo sapiens
ctgttaaggtctcaatgtcaagaaagctggagggacaaaaacaccaaggcatctttgtcagttgcctcagctagagaggtgacgacagggccaaaagccgagagaatgggatgccaagaggtggtgtgatcccagaggccttcaagttagaaggactctctgagaagagatccttgttttccatcactgcagagaatgctataccaagggcgagaggcctctaggtcagagatcataaagaagaaaagaatggctggattttaggggtggtgcccaacgattagtttgtgttgtaatgtggcatgaagcgtcttcagaatgcatttgcgatgtttactgggatttggaaaaggatcgtaacaaggtctagcaaggcagtctagcccaaggagggtccagttgagttccgaactagtttctgatatctatcccttccaaaactgcatgtttaattaaagaacagccctcctctatcttccccagatagaggagggctgttcttcagtcgaagatatggagtggttgtgtttctctaccaaaacctttattccattttctcaaattttagcatacatcagaatcacctggggggcacattaatacacacattatggaccatatactgtatgcctggcatcgtatgtttattatctcatttagtcctcacaaccaccctctgaggatagtgcagttggccctccttatccatgagttctgcatccatagattcaaccaaccatgaatcaaaaaatagtaggggaaaaatggatgattgcatctgtactgaacacagacctttttccttgtcattattccctaaacagtacagtataacaactatctacatagcatttacactgtattaggtattataaataatctagagattatttaaagtatccaggaggatgtgtgtaggttacatgcaaatacagtgccattttatataaaggacttgagcatccatggattttggtgtctgcagcgggccctggaattattcccctgcagatactgagggacaactgtatta

SEQ ID NO: 76308 - DNA, 1810 bp, Homo sapiens
gtgtattggaaaactcgttgaaaacacatgagttagtaatgttctctttcagaagatgaacttgcatggccgaagtgagattccagtgggaaagacctggtagagaaagagtgggagaatgcgttgacctctggagggcagattatggcatgccaggcaatgggttgtgccatcagggaaggaatctagaaagacgaggagactcaggagaaaggagatgacttctgttgacaggtcattgttgctcagacttagtgcagatgagaaaggaaatccagaaacctacatgacagctcctcttggattggatgaaaatattgattttttttttttttccctatctggaatttgacagggtcagttcatgtctgggttttcagcacttaatacagggcgcttttgtcttgggaggcggctggactggtttttcctccaggcaggtgcacagagggcgtttattgtagcctgaaacacaaacaccaagcccctaggccctgatccacacactctccagtgtggctcaaggaaataaagtgaacaatgtctcttgcaacaggcgagcactgtaaatgccactcctgaatgatatatttcttaaaactttgtatccgtaacctgatcatctcttaaaacttaattatatgtcagagaaaaggaagctattggctcctccagctgtccaggttgaacgagagcacacaatggagcatatccgattcacagccttacttaggtaatcagattaatatctcctgaattgaatttacccttttgatatggagtctttcagctgccttgtttcacatctcaaattctgacaaagctgtgcggcctttgagtaatttccctgaaatctatatgtgggaagcctgtacttcaagcagtttttgggacttgcaccaattaaatctgtctctggcacacttttaatggcatgctttcccctgagtcaacaactgctccaaaatctgaagtcatttgtttaatttaaaagcaaaggttatggaacaaccatttcaagcttcaccagccaaactccagtggctttgaaaagggagatgaggcagaggaaaggctaataaactggatttcttatacacaaaataaattaattactgtgtttctgtaagctagtatcaaatcaagtttgttcacaccctccttgccaacctagctctccctttctcttcaaactcaccctctctgggctttcatattcacgattgaggctcaccctcttactgttgttcttgcaacacaaacatctggactggatttttgtcagctggagttgagagagaactgtaaatgatgcagtgatttttttttcgtccttattaaatttatttatagccagtctgaagccaggaaacatgctagagcctttgattggaggttctcgaggaatgtacggtggatggtattttctcctgttgttttctaaataatatcaaggatagaattacataactcccaacttgagtattttttgccctgaaggaccctttattaggacattttgcacatcagaattcttccattatatttgcttatccaatatgccttcttttctgtcagtgagagaaaaggaaatgtacatgacaggttatttctgaaaaattagaaagatggagagtgagtttctggttgtttgggacatgaaccagtggcatgagtattttcttttgccaaagggacacaacatggatcctatttctacctcttaacaacctctgcaatcttaaagctgccaaatctcaaagaatttcattcatttagtcattatttaagataataaaaggccctacaa

SEQ ID NO: 76309 - DNA, 1048 bp, Homo sapiens
ggcattttcttcttcagaaaagagactgtttagctttctgccacccaagtcagtcatcctcagcctgaacaatggagcttaatgttctccatcttcctaagagttagtgtctgttgttatgaaagtgaattgaaaccaaatgtactttctattggaaaagctgcccttgctctcagctcatggacaaaactgagagagaaggctcttacaaaacagagggaaaaatcctcgctgtcatgtcataacaccagttatttcactgttagacctatgaacatatctttgatgcaacactacactatttgatgatgtttctgtgtcacttaagatgggcgtttcatatttatctcttagaaatgttagcagatttttttcacgagttatcttgcttatggactggaaaagctattcttacagtaagacccttcattaactgagaaggcataaaagatagctcatgttctccaccaagaaaggaagctctgtttctctctgtctgatgggaagcatttgagacagagcagcttcatgaagtgtggatgtctgttacccacttcccagtttttaaagtaaaagccaagtcaatggcactggtacttgtagtgaaatgagccacagaggcatcattactcatcaccatcacgactcaaggatcagcaaatgagagtcctgaaggtaaagaatgtttattttcaggtagagaagaaagaaaaatcacggagaggtagagaaaagtgaagggcaaaggaagaatccagcagacattaagcaacactgtatcttccaagatcataaagccaaatagttcctgctagatttaacttttattattttgggagatgaaaatcactggggcatggagttctcattctgcatttaggaacttccataatattttaataataacaataatgataataatgccaatcactttaattaaatctccctaaataagcatcttttaatgcagtgttgtttgctgtaaaacatcccaactaatggtagaggctggatgtctgccaaagacatggtgagggaaccgccacag

SEQ ID NO: 76310 - DNA, 1691 bp, Homo sapiens
aatcccattcttaaatctgaagttcctcttgattagcggctccttttgtttgttgtttttaacggcatttctgtctttcatgggtagcttacagggatgtgttttagagccccttccagctgggaagccgcccaactcccaccagctgagtcgggggatggcttccctttagttccgctgctgtctgtggactacaaggactccacttccagccccagcaacagtggcccttgtctgctgtgcaaacttggctctcttctctgggttttcattctccagccatctgggcattttgggcacccctcttatcttagtaccttggcactcaggaccacatgtcatcctatcatagagatgcaaacaaaggaatccttcacctctagcttgcagttcccctggaaccatcatagattgagtgacaatcagggagatgggggcttgggcattggtcttgagtgatataaatggtttttctaatagaaggcatttggaatgggctgacaatagctaggattgttcactaccaggattcttagtgcctagcttcctcctttttctctggctatcttgaaatctaggaggaaggagctaaagaccccgtggcctctgattgccatagcctctctaggcctggaagcttcagcttagggactagaatactgctgtgtgccagagcagttcatctagcttcctattaagaattctatgtgcattacccacttttaaaattcctcctcctacttcctcaacttctggcttggggagggtttgatcagagtcattctctcttcagagaagcatctggaaagattgatccaagagtgctgatagcaagttcgctatcatcgccctgcctcgaggaaaataagcattcgataaaaggacacttccactgcccagttcactcctactccactgtgtcttctcctgtccctccccctacccctctgacccctgcactcattctgatccctcttcctgcccgaatgtctctcagtggtcaacaaggcatgagctagccaaagaaaatgcaaccaaatagtgttaatcacttccatttagacctcagtagtcaggtggggctgcaggtctttgaaaggcagacttaaaatgcttgcctcttttcagcgaatctgattttacatttggctgctgatcattcagcccctggcatttgttcatacattggaagcccaaagcttccacacagttgagtctacagagcagagtaatattaacaagacttatcttggttatgatgccaaaaccatggtgccacttcatttcacaccaaagtggatggatcttatttatttattttttaagagttgaggcagcacagagaagctcagagattcattcaggatcatccactgtgtccaagctttgatcctctggcccttatgacaggcaatgatggttcagagtacagacagagctcctgtagagcgtgcgaccaatttaactggaaccatgggttcttaattacgacttcccctccccacccactgccaccaccatccagttgccagaacccagttggttttctgtgaaacggcagctagtgacactttgcatgggttcaccagaaggcctttcagtctttgtctcattttaattgtgtatctcaaccaagaagatcaactctccacatgtaaagttaactccctttagttttcaaagtttctttc

SEQ ID NO: 76311 - DNA, 1847 bp, Homo sapiens
caaggagcctgggagcttttatgattattgaaaatcactgtcaattttaaacctaaacaaaacaatagataaagctttgaaaatagaatcaagtccagtcataccaagtgaaaggagtcctttctcatttttttatcttcttgtagccagctctggagatccaattctattgggaatggctcacctaggtctactgtagctcagagttataccttgtagatcacctggatgcttctgtgttccagctttaactcagaggatcaggtcagaatggaggctccctttgaaatctaaagtgcttagcttctttagggtagctccacaccctttttaattcttctgtaaaatgtctatctagcctagagaagtggagtctcactagacatggttctgagaataatagctatcatttactgagtgcctaatatgtgccagtgccttacctgcattacctgcctgagttcatactgccttctaacaaccctatgagacagatactgttatctccattttacagatgaggaaataaagacccagagaggtttagtaactttctgcaggtcacagagccattgaaaggcagaagtgggataagcattcaaatcaatctgactccaaaaccccttcagtaaccattgtactactgcatgtgatgcccttagattctccacttttcctctccctccccaagcccccagtttggcttgatattggaatcatccctttctctccttgttctttactggctggaattaatagagtactttcggtctgaaactggccttaaagaatctttgtccgtgtgtatcacactgcaatgcaatagacgcagaaatctgggcactagaagatgttaactttggatgcctcctgttttatatgcatatgattaaaccaatggggaaagaaagccctgaaactttattacaacatttttgtagtattaaatttgacatattaaaatgtgttatcattttaatatctttaaagagcctgaggagactctcaagccttagactgtaaatagctaacagctttgagatgagcttacataggagtcaaatgattgttccaagatggctgttctaattctgcagagctaccgtagtattcagcctactgcctgccaaaggcaaggggccttgcccctctcttcctcctccctgctttcctctttgttaagaagtaacaaaaatatactgcccaacacccactttcttttagaaccaacacatattccttctggctcactccctctataaaatgatttgtcagcattttgatctcattaaataaaaagttttacttggtcaaactgggaaagtttatgaagttagcccttccatcccatcatctgctgtggccacagttgttgactgtgaaatagctctgtgggtgtggtctaccaagtatcccaatagcatttcttacactgtgggctatggacccaaaggtctggaagagttgttttcatagggtcacactagaacactggctctttctggttaaaagcttccctagcctttctcctccaactcttaacacatctctcatgtttctttcccccctgcagaagtatagaaacctcctcttttcttttcctctgcactctcctcatctgtctccaagtccccattgtgccatgtttctcctacttcctgtttcctttaaccactaacttctcacgatttttaaaatcaagcctatccaattctaaaaggaaattgaaaccctgcccaccaaaaaagtaaaactagggggaaaaagccatagtaggaggtataatgttatgatcttctctcttagccctacacatctgtaaaaagtaatcttgctccgtactgcaa

SEQ ID NO: 76312 - DNA, 1047 bp, Homo sapiens
ttaattcatgcatgaagaactatgttcgacttctgtatggtatcttgaaggggtccaaaataaatctgactggcagtttgaaggcctataagagagcatattacataatttcactcaaggattttgacaattagtccagcttgatggatctcttctcacctgtattttggccaaactgaccaattatttcccattccaactgccatccaaatttccttccccatcccttccacatgtttcagttgcttttgctgcctttgcttcatattgactgtcaggatgtatggccctgtaatactaggtttttatttaaaaagcctttctctcattcataagcttcttttgaggagtgaggcctgcatttctgatggttgtgtatcattcccatgccttgtgcataagtggtactctatccatgtgttttgattggctgatttgagcttttgcagattaggaaatagttggcctagagctaagtggcacctgagagaatcttcccctccaggcctcacagatgcactctgtggaaaggccattgtctccttgctttgtgttggactattaggaacctaaaagctaggacaggcctgggtagagatagccacctttaagttaggggaatgttggggagtctactgggatttgactgtgaggtgaaaggagggctgcctacaagcagaaagcttaaggcattggctttgtgtaattaccaggaatgcttttagctagcaccttgaacggttggttaaaaagggacagttagatgtttgttagatgtgtggtgttaataaccttgaccagtagattcgtgactatgagaatttcaaaaggcgaagcaagaacacacacagagggaaaacatctcttgtttctaggggcagccttcccagcagcactcagcccagagctgtttttcccccaaggagaacacagggacaaaataaatatgccttcctgacccaaagacaggagcgcccagggagaccatgggatctgggagtgagagcagattgtagggaggaagtatccaggatgagactggtatta

SEQ ID NO: 76313 - DNA, 1063 bp, Homo sapiens
aggatgccatcaggaaagagatggtgcactttagtattccgaggctaattacagtggggctccattagtgcccctagattgagaaggtgagggaacaggctggtttctggaagcaaggagatagagggggctgtgtggaaaagactgcctagcaggatctgagaccttccatcaagaggcacagccagtccatagcccaacatcactctgctccttcaaatctcctaccggtgcaccccagtggcccaacccaggagagtcctgttgatgtgacacacacaggccaggtcccagggcagagagcaggtgaagaatgattgtgagtaaatctagaggggcacacaggaagatatccagcaaacatgtttcacacttgattttagaggtaagggtgtgtatcttaattttatctgttttagaaaactaaaattttaatagatttaaagtatttctgccatagttcttaaactatcaatctgatgatgtcagatatttttctcagtgtcattagtttgacctcccgccacatttttttggtggagaggggtgagggattgtgtataaatttcctccagagcacacagagaataaaaatgctattcttcagtttgtttttttttgttgtttttttttttttaacaaagagttgttccatttcccctttttctgtctactgctttctccttctacgcttaggccaagagtatattacgcttggaggcatctagctagtgtggtgcttcccaaacctttctcagccaaagactcctctgggaatccaactaaatttcctggttcccttttgcttttaatatcaatgaccatattacccaatgaggttatttttatttcttacaaatatttttataattaacttaagattcaacaaggagccaaaggtaaacagactgtaattatttcaagttctaaccattatgagtagatattaatcttcgagaaggtattattaaaaaaaagtatataatattcataaattaaagtcaacttataagtacaaaggaatatctgtgactataaaaggaaaaataaactggaatttaaa

SEQ ID NO: 76314 - DNA, 1034 bp, Homo sapiens
cttatctctcaaaactgtcctatcttcctttgtatttaacttggatgagtcttggttttacaataaagaaagcagaattcaaaaaggtaagatcatttactttcctagaatgatgtcatacatctgtggtaatgattatatttccttttcattatatttcactcaacacttattcatccctattggtatacatgggggctacccatgggagatgtgaagcaatctagttgacaaaagaaataaaggactgagtccctgggggtgttactgtccaatacatagattgctattttgatgcgctctgatcaattacaagcaaattcttcaagtttttaaacaaattacactccaaattcctacattttgacaaaagtgctttgaaccttaatataaaatgatgatagaattctacttgccaccaatgcatctattaaacagtgtaggtttctaggacccaaatcagattttctttctttgtatcagtttcttgaaactaatgctataatcctgatgtggcttttagacaccaacccattcaatggtggagaattcattcccagggtttgaaagacagctaaccatttctttgtttgtccccagtgcttttaaccaaataatgtagttcttaaaagatgcatttatataaggtagaatactctacatttcctttttatggttgtttaaaaatgtttttaacaaacattacagtaatttttctcatctacctcagaaaagttccatgttctaactgagatgaattcctttgtcaaactagtaagagggtgatttcatttgtagtttacttactaatttattccataatttgagtgttaatcttgctgtcagatgaatataatcaacttttggactcaatttcttcctgtggaggggagaatttctgtgtaccaaattcccacataattgcctcttttgcacacacccacatcttatttttgttggtgcctatcctagcccatcgcaacctgtaattgtccagctaaataatttttaaaagatttgatgctttcaggtac

SEQ ID NO: 76315 - DNA, 1063 bp, Homo sapiens
tgccaaaattcttaagccttttctcaaacaggggattcaccacttccttggcctcctgcttctttatgacagcaggagctggagccattttttctccttggctttctttcctttcagcatcttgggtggcgggaggagagacttatggttgccatatttttcatctagcattataccaaataactttgtttctaatttcagttttattgatgatattttcgcctttaaagaaggtgaaaagcaacaattttcatatatcaggggtgatttaacgttacagatgccactaagatgaacattgaatgtactgttctctctctaagcctagttcttcctcttataaatagggatcagtctaaatgttgagaaaattagagaattgggaaatctgcctctcctaagtagtaaaagttgaaaagtagtacagtaagatagcaatctaatagcacagtcattttctacaatgtatataattttaatcatcacaataaagaatgtttaaagaaattgaggtagtttaatcataggcagtgctgagatgtgaccatataatgatcttttagagagaaggctgctactttttctttgtctacacaagggttaaaaaaagaagaaatgtttttaggaggaatgtaacatagtgcctggcacatggttagtattcaatagtattttactaatagtgtttacttagaaatatttatcagaaataacttcaaggtgtctttggaccgatacaatgagttaccaaggaaagtaaatacatctttccttcttcctttttttaccattaaaggaaaccaaaatacttcaccctcaaatatacttctttgacatatttgagatggctattcagagaacctgcagacaggaatagccctgtaaaactaccttttgtgggggagatttacatctgtagagaaaatctacattgctgaaataaacagccagcctttctgtgctgtgacttgtctggatctaggacagatgggctcctgggagagagagactgagagtttgacacctctggggatctaatagaaacttactcttttggagggct

SEQ ID NO: 76316 - DNA, 1060 bp, Homo sapiens
attggtcccccacactattgcctacactgcagctaattttttttctcaatctttgtgagtctcttgagtgaaacaatatcttactgtcatttatgtttgctttactttgattactagtgagatgaagcatctttttgtatgtttattgcccacttgtatagtatttctcctattatgaaacagaataggtcctgtccaaaaactctaggaaggttatggtctggttggtccatggaatgtaggatctggactgtaaattattcttcagtcagatcgtgtgatataaaagcctatatcacacaatgtgtgatggtaaagaaattattaaaaattatttgaaaaatattttaagaatagcttgttttatgattatatcatggagtttgagtatccttaacaaaggaagaaattcaccatgcttattggagacatgtaatcctagagaaggtgggactgggccatgcccctctgctgcagtaccagcacagaatgacagaattgttggaaacctctcctaattcataccaccccacagaggagcagctgccacagtggagcacaccccacctgcttggaggtgccataggccagcctctctgagttttatgatgcatctgaaatggagttttactgcatcctcccacgaccttacgaaaaaccacgggggaggaaagaaaaacagaacccaccaagaggagcaagcagacctgtccgagggtggggaattggctactccataaggcagcaggagagtaaactacaaaagacataaagcacaccttgctttaatcccttccatccgcccagagcccccagaaagctcataaagtctccctttctgggtgattggattcctttagctcaggggcaagtagggcatttttttggttttgttttggaagagggctgggtaaaggagaatggtaatcactggggttggaggagggagaatgaaaacgggggcaatcactggggttgggggagtcccttctcttcttgcttcgaggtagtgagtgggaaacgcaaacagctgctgcctgaaatcacagcgcgtgggtac

SEQ ID NO: 76317 - DNA, 1149 bp, Homo sapiens
gccagaactgtctgtcctttttgtttgaaatagagactttagagactagtcttttcgtttactgaaagaaggagaaagaaaggaaaaaaaatttgtctactttgcctttggtctgggtactttccacttgtttgcttttaacctttctcagtgtttgcagggtgcagggaaacggccttgtcagcctgggctgggctccttaagtcttgaacaacaaacacttaaaataatcaaaatgttatatttggcagttaaaagaagaatctcctaaaactatgtctagtcttatttgtttctgaactcctggtagaggcggggagaccatgttctccattctgtggcctagccactcttccgggccttctcttgttcctcttcactccctcttccccagatgtactcctagactgagctgcttcccagctcagagcccaccacgtgcctctgcagcttctgtgcctttgcagatgccgctccctctcctggaatgccttctccccacccttccctggctgaagtcctcctggccataaaaggctaccctaagtgcactgagcttccttgctaggcacatcttatcatcgttatttctgtaattcttcctttcattggctgacatccatgacatcagggcccaaccttaggtggctagcacaatgcctgtggcagtagtggcagcagtagtcttcgtgttaccagcagcagcagtaatgactcttactgggcatgtgccatgtactaggtctttttcatactcatctctaatcctcccaacaactctacatcgtatatgatattgtctcctttttagagatgaggaaattgggacttaggtggggtggaaagatgtgatacctttcctcactcatcatgagggtcacagctgacacccctttaacaaaagacaggttgatgataaaagcataacaaatgtatttcatcaaagttttacatgacaagggagtcttcagaaatgtagacccaaaggcccagggaagatggtctgtttctatgctttggtctgaggaagaatgggcagctgtgtagaaatgtgattggacaaaaaagggtctgatctaatgatgacagactgagggggtagacagagcaaggcctgtctgttcagattcttcttggcctccctatagc

SEQ ID NO: 76318 - DNA, 1079 bp, Homo sapiens
atcctctcattatgttttagctatggggggtaaggatggagaaaggggagagtctcctggtgcttgtttcatgtatcttattcccttgacctggtccttgttcccttgaagtcttttgtttgtctgtttgtttttgagacagggtctcactctgtcacccaggctggagtatggcggcacgatctcagctcactgcaacctccatgtcccaggttcgagagattcttctgcctcagcctcccgagtagctgggattacaggcacctgccaccacattcagctaatttttgtatttttagtagagatagggttttaccatgttagccaggctggtctcaaactcctgacctcaagcgatcctcccacctcagcctcccaaagtgctaggattacaggcatgaaccactgcacctggccccttgaagtctttatagtcgccccaaagaaattaggctaaacttaagaagtcactgcttctgtagatctaaggtggctgaatatcggccacagcatacagttcaaactaatgcagtgtatctattaaaggttataagaagatacctacaaacttccctcatgggattgttgtgagaattaaatacatataatacatataaaggacctctagtgcctaacacattgtgagctctcaaaaaaatataaatgttagctcttgtcattatttttgttaatccttgactggggtactaaaattcctaaaagagagtaagccaagaaaaatatgttaattattacagcaactaatatttattactatgcatcaagccatttttgtaaggatttttcatatattaattcattattaactaattttcatagcaatctgatgatgtaagtgttagccccattttacagataagaaggtgaggacagagaggcgaagttggggagcttgggatcaagtttctggttctagaacctacgttctttcataaccatcactgctctgaaaaagagtaagcaccagacctgaaagaaacataacagaggccgggcgcagtggctcacacctgtaatcccaacactttgggaggccaaggtgggcggatcacgagatc

SEQ ID NO: 76319 - DNA, 1035 bp, Homo sapiens
agacacccgtgaaacagagggagacactagcagtcagcgggcactttgtggggagggccaatttagaggacagattgaccagggcgagcagcaggatatctagaaagacgctttgcttctaaggagcgggagcctaatcccgttacaggctggagggagactcctggggccggcaagcctccttcccgctgtgcctggagggatatcattggaggaccgccgggcgcggtggagggctccactcgccagcagccccctcccccagccccttccactctcttttcttttgcagtgacacatactgcagtgcctctgaggtcatttgtttcccacagcctcacagggcgctgtggcaacaagggggacaatgatctctcacaggaatgatgggaggccttgttttgccttaaataagccccttcaagggagcagtaaggtctgttgtgtgtgtggtttgttttttcagaaaatcctcttgcacgtagttccagtgtgaagtactctggcaacttcaattgaagacataaagaatcttatgtgtgtgtgtgagggtttaattttatttttattgctgctttgagaccaggattgtgttttcccttctgccagttacccttttcccgctcaagctccctggacctccgcattctttcaatagttttagggcaggaattggcaggtgttaggggcagagagacgcccatgtctgggtgctggcttctgactgcccttagctttggtgagggagtgaaggttagcgtggcaggaatgtagtgctcctacacatttctcatcctatcctgggtctgaggaaagcacagggcactgggtggctagggctgggattcacaacaaagtgacagtggaggctgagggagacgtactttatgggccacctcggaatagatcatcagctttaacgccagagcttcagaggcatgtgcagaaagaaaaaggcctgtaagtagaataaagaggaggcaggttctgtgtctgattcggctgtccggtgaggaaagatgtgaagtgatctct

SEQ ID NO: 76320 - DNA, 1665 bp, Homo sapiens
gtttgtcttactgctctgtcctatgttttaaagtcttcaagctgctgaaggcagtcccacctcagagcttacatgcgtaaacattattatctgtaaaggcttcctatttgatgaatcatggtgtatcatacaatctagatatttcatctggagaaactgagatgaggcagattaaagtcttttccaaaaccacatgaggaattaatttcaaagcttgagattaaaacctacatcttgtagtttcagattattaacttaccagtgtgatctacaagttctttctccatgttctaaaaaacaaattttttaaggcaatcaagacattttcattctctcatgtgagcagtatgtatcagaaaaattcatctgtataaactgtatggcagtctaaattatatttttaacctgtcttttctttttttactttttataaatcatatcttccactgtttacaaattttgttatgtctttcacatatcagactcaaaaacagttggctttatgattgggccactagaagaaatataatattttttcacttaccttttcatttcctgacttttttttagtgataatctgaatatatttgtgaaatatttaggcaggaaggtgagttttccagatgtttctgttgattattgcaaacacagagcaattcaaagactagtgtcgctttttgataaattaaaaatactttttttgataactagttattcttgactttaataaacattcctaagattaattcttcccttaacaactttagtgtaattttaatttttcacaaatcctgaagtgggagtactggaattttggagaaataaattaacatgttgccttatttctctggaccatctgttaatgcttattctcaactaaagtactgttcatcagcttcaagtaacaaacataccatagacaaatagcctatgtctgtgacggtgataagacattggccaaatcatcctctctctgaccatgacaaaagtgtaccagtcgtagctaaagcaagactgaatctatttggtattcattgtaaaggaaacaacaacaacaaaaataactaataaaggtctgagacaagatgatggatggcaaaagaaccccctatggtcataaataagctaactttggaaatgtttgacttaaggaagtacagactatgcttagtctgcctcgtgtccctggactaaagcagccttgaaggctcatctgaacatttccccaggggtttcttgcctattgacaaatcccaccacatcttccagatgcacagaagaaagttccgttaaatccaaaatggtaaccaaaaatgttgaatagcaagaaactggcaggggtggctttgggaactggtaaataaataacaggcttgttgtcccacaccctagtttaatgctctcaagaggttcttatgttgctcgcattagtgggcatgtaaatgaaacccctgttggccttggcagatattggcctcttccgtgaccttgtttgactgaaacaaaaagtcattggtggaacaaaaattcagagctctgaacttggttgaaagaaaagggcaattctctgaattgggtaattggatcaccctcccaagtgccctagggcttatatcaaacatataagaaggggattaataacttcagtgtataaatgagcttcag

SEQ ID NO: 76321 - DNA, 1536 bp, Homo sapiens
aaccctagaaaactaacagcatttgagtagaattcaaatatatgtgagagaacataatacataaataccatctgggaagttctctaatcaacattctccttccctagcactcactgttggatctgtagtacatgcatatgtgagtgaagagctctttcacaaatatgaaagaagcatagtatggatgtagggtgatgatttacttagtgtggtaagtgtctccaagcaacacagtaagggacagaaaaagctgggccagcctgcctctgggagagacatgccaagcttttctatctctgtgaatctcacaagtaaatgaaaataagtgcaagtagtactatagtaattaaatcaaactatcttctttgagagtggctttgtatgtgtgtccccattatttgctaatttactatttcccactgcttactgattaccctgagtatgttgcatttattgtcctatttaatcctctaaactctatcattgccattttacagatgaaaacatagaggccagagaggtttaaatggcttgttcaaggccacatatctaggaagtgggagagtcaagattctaagtttaatgcccatcaatgatagactggataaagaaaatgtggcacatatacactatggagtactatgcagccctaaaaaagtgagtttatgtccttttcagggacatggatgaagctggaaaccatcattctcagcaaactaacgcaggaacagaaaaccaaacactgcatgttctcagtcataagtgggatttaatgatgagaacacatggacacagggaggggaacttcatacaccggggcctgttggtgggtggggggcaagggcaaggggagcattaggacaaatacctaattcatgcagggcttaaaacctagatgatgggttgatgggtgcagcaaaccaccatggcacaagtatacctatgtaagaaacctgcacattctacacgtgtatcccataacttaaagtataataaataagaatttttaaaaaagattttaagttcagtctttgtttccaaagccagagatctttccactataccacactgcctcttatgtagtcagtgataataatagcttggtcatttgcatttgtgaagcaccttttatttgaagagctgaaactctgtaagccttatctttgtaatctggagagaggaagaaaagaaccgacatttattgggcaccttatatttgtgtgtgatgtaattttaagcactttcataccagacatgttaattatcttcattttaaagatgaggaaatgaaactcaacaaagaaattaagtaaattgcccaatatcacacaactcccatatagtcaatcctggcactttccctcagcagattctaagcaccgttggagcagagagcaagtctgtttttaatcattctgattttcctagtgcctaggacagggtctcactctggcacataataggtgctcagaaaaaaaatgattgaatgaataatgagcaaatgtgctgtaagctgaactggaatgcattgagtct

SEQ ID NO: 76322 - DNA, 1080 bp, Homo sapiens
gacattgtgcctctatagcaggatgaactcacaggcatgttttctgtacgtctgtctctttttattgcatgtgacagaaaccatactcaaagtagctgaagcagaaagtaaagttatcacaaggatactggcatatctatagaaactaaggactgggatgcagctgactcaaagaagagatggaaccagtgttaaataacattaagttagttggtctcacactcttacacacacactatctcttacacacacactctaccactacaaccactaaatagctgcactgtcgctacatagccaccacccacatgtagctactgagcacatgaaaggtgccttaagtgtaaaatatgcactgaatttcaaggacagtatgagggaaaaaaacataaaatgtcttaattttcatattgattacacgttgaaatgataatgttttggatatattgtgctaactaaatatatttgacatttattttaccaatttctatttttttcatgtgcctactggaaaattttaacttacatatgtgacttgcattgtgtgtgtgtgtgtgtgtgtgtgtatatatatatatatatttttttttttttttaattgaggcagcctctctctgtcacccaggctggagtgcagtggcacagtctcagctcactgcaacctctgcctccctggttcaagcgattctcccacctcagcctcccgagtaggtgagcttgcaggcgtgcatcatcatgcccagctaatttttgtatttttactacagacggggtttcttttgctgtgttggcccggttgatctcgaactcctgacctcaagtgatctacccaccttggcctcccaaagtgctgggattacaggcatgagccaccacactcagcctggacagtgttgttcttctagttggttttcctaaacatctacagcaacataaatcttcccatgccttagttagcctgatttagttgagaaacactgaagggacaatcagagacatatatcaccaatcaagtatatatcattctatttcatccttttctctctcctttactgtccctcataatttctacatgagccg

SEQ ID NO: 76323 - DNA, 1058 bp, Homo sapiens
cttcctcacacatattgtcaagaagtctagaagaaggactctttttggggacggggagagccatatttccatagttccatttctgaattctgaaatatggctccataaaaatgggaagagaaatacaaatttacatcattgaaggctcccgacttgtgaataacaacatcgtttgccatctcccttgacaacatggtattaatggcgactctgaaaatccaagttttcattcaacttagactcactataagggttaatcattcagcctggaccagatgcagccacgctgggaggtgcacttcccacatcagggctccattcatgaaaacaagctaaaagtggctgaggctgctagaaaggaagctctgtgagggcagggactttgtatcctcaccgcctgatgtaagacctagcatagaattggggttcagtaagtatttttgaagtgagtgaatatatacattcactttcaaaaagaagtgtgtgtgttcggctcatgtagaaattatgagggacagtaaaggagagagaaaaggatgaaatagaatgatatatacttgattggtgatatatgtctctgattgtcccttcagtgtttctcaactaaatcaggctaactaaggcatgggaagatttatgttgctgtagatgtttaggaaaaccaactagaagaacaacactgtccaggctgagtgtggtggctcatgcctgtaatcccagcactttgggaggccaaggtgggtagatcacttgaggtcaggagttcgagatcaaccgggccaacacagcaaaagaaaccccgtctgtagtaaaaatacaaaaattagctgggcatgatgatgcacgcctgcaagctcacctactcgggaggctgaggtgggagaatcgcttgaaccagggaggcagaggttgcagtgagctgagactgtgccactgcactccagcctgggtgacagagagaggctgcctcaattaaaaaaaaaaaaaaatatatatatatatatacacacacacacacacacacacacaatgcaagtcacatatgtaagttaaaattt

SEQ ID NO: 76324 - DNA, 1035 bp, Homo sapiens
gcagtccctggtaggatctaaagacgtacttgtctccaagacacctgacaagctgagagtattgattcattctttcccaacttgggattgcaatggtgaaaggaatttggcattttatctaatcagcattggaaacttggctttcttttggagaattcaaaagttcagtttaggatatgttcacaagatactttcctccagaattaggtgggagataaattattaaatttatgagacttgtctttctttctttctttctttctttctttctttctttctttctttcttctttcctttcttctttcttttcatgtagcatttctttttcacattgtttctgatgacccttaacccctgctttttaaattcagtttcatttgtgttgtcacatatatatcagttgttgagtctttagtatgcggagatgctgagcttgcccttccaagatgttggaaggtcaactcactttatggtctaggtccaggaaacaagaatatttccaactcgctggggaccatcttggccttgagcagaaatgggatctgaattattacctaagagacctttgtagattgtcacagttggcagcctcaggacttgagctaatcctggaaattctttaacttcccagaaagaaggttccacaagggcaggctgaggtcctcagagagagcagatggaatagagcttacaaccagttgcctttacaactggacttggagataaataataacattatacccattttttttttatcatgaagcctttgactttcaggggatatctattctttattccttttaccctgtatgtggaaaaaaaatgctctgtatgaaagaaaagcaagcaaacttgttgactcagttcccatggtgaatgcaaggcagaccaggccaatagaaacaactcagatattacaaaaatgtgtttctttctggcagctgcacagtcagtcctttatatccagtcactgcaatcgccccatcacacaaaaccatttccaaggtcattattctggttgcgggggctgcttcc

SEQ ID NO: 76325 - DNA, 1150 bp, Homo sapiens
gcagggaatgaggtgttggggactgatggccagtgggtgtgggatttctttttaggggtttgaaatgttctaaagttaattgtggtaatggctgaacatctctgtgaatatagaaaaagctgctgaactgtacacttgaaattggaggaggtatgatagcaaattatctcaatagagctgtttttctaaaatgcaaatatagttgctattgcccttgcagtgttgattttcttatagtagaaaatatttttctataagtctatttctatcaaaaaggggaaaatgaaaagttagactgagagggttgtgaatttcaagagaaatggtaaagactatatctcttagtgggggtgaagaagttctacatgttaatatgcaagcacttggcctctttactaatgtacattattttcctggatactgaaagcatctggtattagacaagaaaaaatgtggtcatgccccactccctaaggtccacccacaactaagaagaaagagaaaacaaaggcagaaaaaggaaaggagtaatcaacatggtaaaaggagaagcagaagaggccagtagattggatgccaaggaagggggaagctttatcaactgctgacaagaggtcaaggaggatgaggccagggaagtcaggaggtcatgggagaccatccagtgaggaggctgagagaggtgaagccagagagagatgcagaggcagctgacaaagtgctcagagtgcattgtttaggagatagtatttaatctcaggcatgaaggactactgaaggcattttaagtaggggaatgatgtgatcagatcggaacaatctagattatttgttttcacattaatttgtgcatattttgaattgtgtgcataatgaactgaggttaccccaaattttattctttcttacactaaattctctttcaatctgatatccccaggcttgttgagaccttggttattgatttccatctcattcattcctgttcctgcttgaaccaggaaatagatatatatggttggtgttatctgacccaggggttctcaacttcagcactgctgtattttgggctggataattctttgttgtaggatgctgtcctatgcattataaaatggttagcagcatcaccagcctctaccctctagat

SEQ ID NO: 76326 - DNA, 2933 bp, Homo sapiens
gttacagtgagtagagagtgtgccactgcactcaagcctgggtgacagagcaagactctgtctcaaaaaaaaaaaaaaaaaaaaaaaaaaaatcagtggttctcaaacctggctgcacttaaggctcatcacaggagcatttataccaatgccaatgccccaccctgaccagttaaatcaaaatctctgccagtagagctgagcatcagtgtttattttatttgtaaagctcccccatgtgattctaatgtgcagccaaggttgggaacctctgccttaaataatagataagattcaggtagtcagaaaggggaggtgctggggtagagtgagctgcagctgaagaacaaacaggaggataggctgcatcgtcagagggcacaggctgggttttgccttgtaacaagagcagagggtttgggcactcattcatttgacaaacctttatttaatcacctcttctctgctagtcactgtgtaactagttgcgctggagattcaagaaaacaaaaacaggtaagagatggttgataccctctggttgttcacagtctacttgaggaaacagataagcatgtaaaccggacttgcagtaagagcacagtgaatgaagtaagtctagaggagatggggggtcctggcactaaggaaggttctctagcgatgaatgaggcagagcatgaggcagagaggagtggccgaggccttcacttgggaaactcttgctattacaaagtgccttctagcgagggctggaaaagctagagtaaggctggttatacttgaaagaaggaagaaaaactcgataaaaatattcacatttatacaatttctcctcaaatcctcatgaagtctggtcttacaaactacaaatgggattatataaattttcaagtgccctagaaagagtaatgaagtaaatgaatcctgactaagcctcacacccgcttgatgaaataaatattatgactctcttatttcaacaaattggaaagaggtctttttttcatataggaggtttatttaaatgaactttctaataatattttcatttctatttaggaggcaccctgaaattatgggatgcttgaggggcgagcctgaagtacctagtaaattgttgacagaaccaatatcactcaagctgctgatccacacttgaatctgtaggcttttctcaaagtcctagttttgcatcttagaagtattgcatcttggaagtatttctttgcatcttggaaatattcaatgtttcctttctggtgataggattctcagtgtccattttatattttcgaagactcaaatatcatcactgtgaagacttccctgacaccagctgtgatccgtccctcttccctctggcccacacttgcacctggcccttgtctctattcttagacttctgagccctgaattatgagccccttgaggtctataactgaatttatctgcataccctcaaatgtaagggcagtgcttgacacttacacagtagatacatttattttgaaagagagagagaaagcaagaaaaagaaatgcactccctgtagctactcgtgaacccagtctgaaggacgaaggactgcttatttagaatcattcttccgcatagaaattgagttttacaatttaaccattcctttaaaatgttagtaattgtcggtttaaaatgttagcatcaaaccttgacaattataagcagatacttaaatagaaatactgtaagaatactgaagataggaatactttttgcagaaccagcctgctgtagtctatgggaggatgggagtcaggcttcccctggaatcttatgggatagcctttgtgtaagcaagccagaaccctaaacacagacccaggctgagggagagaagggttctgcagctgctttcagggaccagatagcatgaggagggtaggaaatctttgttgctatcttctacaagtcttaacttctcctctctgtggttggacaggcttaatgaaagactgaataaccaaagaaaagttgataaattttttttcccagataagctaaagggtagatgtggggcagcatgtcaggcttatattcatattcacccaaagaaagatatcgaggatgatgttttacctgatgtaagtcatagttgtatatctccctactcctagattcctccaaagaaggattcaggcttagttgccctaactcaaaaggaacctctctcccttggtggcatggttccaggtcgctgtacttgttctcttgttttctactccagctcacctgctgtttttaggcaaggaggattatgtgagtatgtgtgtgtgtgactagatcccgccagaggagaagttcggctgtgctgcaggggtagatgaaaactctttttaagcataaatacctatagaaatagcaaagggaacataaaatccagtcaagtacattatcttgggtataaatgtctcctccctttccagagctgctcaagtgtgaaatccaagcccctgcccacactcttgcaacagaagtgctctaacaggtattaagtggattggggaaataaataaaaggggaacccagaatggtggcattaaaagaatcccttttttcaggcaatgtattggcactaggcactaggcaaatgtattaaaatctgaggaaatcctacggaaagtgtgtggtcccagtgaatgaatacaatgagctgctactcacagtgcagggactgagaaagggcaacacagacacccaagtggtcatctcccatttccatctccacatttgagataagaatacctgtatctttcctaccacccacaaacaaacaagcaaaccatgggactccctttgaaaaaagtcaatatatccaagaaatcactatttctgaatgagctcaagtagagagaactttctcttaagagggttccgctggaaattgccagctg

SEQ ID NO: 76327 - DNA, 1010 bp, Homo sapiens
cacagtggggatggacctgtgctcacctctctcctccagtaagaacctaagggcccaggaggtatagtggtgcctcccatagatacttcccttccctcatggatgatacagaatgacatataaatgatatctatttcttcatttttttccttgcaaagtcacttttccacatactaatccatttcacggtttatctttaaatcctttctcagttgtctattcttctctgaaagtattatcccagcatcctaatgaagattccatcaatgtctagtaaaatgacaaaactctctagcagtactatgttttgtttttggttttggtttgtttgttttgtttttactggtgcctctttataataaaaagatttggtggctccagcacagcttctaacccttcaacagctgtgcctataccaagctgttctctcttatttgtaactatttatgcagtgttctctccagatatactgttccatactgacctgcattggaatgttaggctcttctttgtgactgatctctatttcctacttgtgactccgttctgacactacctttgcctttttataccatcctccctacttttctcatgtagatttgctaaaagatccccatgactccaagatccctgtaactggctctgctgagtctgtcagcatttgatccctttgacttgaggaggccagtccttctcaggaaccacctgtaatctcttttttttccttagagacagggtcttgctgtgtcgcccaggctggaatacagtggcatgatcataactcactgcagccttgaactcctgagctcaagcaattcttccaccttagcctcccaagtagcttggactacaggcacataccaccacacctggctatttttaaaattttatgtagagatggggtcttgctgtgttgcccaggctgggcttgaattcctggtttcatgtaatcctcctgcctcagtcatccaaagggctgagattacaggcatgagccacagcacctggcc

SEQ ID NO: 76328 - DNA, 1527 bp, Homo sapiens
cattcaccctgtgttccactctcccagcaaaggagtcctggttttggtttctttcgatgtttacttggcctcttgcttaagcatttgcctttcctcctcaataacagtgaaaggactgaaaaataataaaataaagaaaagaaaatcccagggctggaaacattttgtttcctacaaaaagaatattttgcggccagctctgtggttgaaagtatttttcctgtggtctagggatgagttggatcccatctcttcttggccagggtctgagaacttagcctgtggcttcccatcgagtcagcacatagcatgctattttttgaacgagtgtctgatgatgttgaatgtgttcacgagtggacgaataggtctgtttgggtgtataagaaatgtgcgcatgtgcctctgactcttccagggcagaaggaacctgggagtggttttccacatgctatacatatcaacgtagcttttaagttttcatcactcacatgatgaccaaaaaaattcagatgctgacaaatgagaggagggtgatatgtgagccttatgtggatttgcaagtaatcagaaagccagggaatctaagattccctatcacatttctttccattttcaaatggaaaatgtcacatttctttccatttttcaaatgctcaaaaccaagacatggggttggttttattatggcagggtggtctgatggtaatgcagaagatgggaattctgagagctgccccagcttgtccaccttcagcctttgggacaccaactttgcctagccttgaataagtcactttttctcaaggactgcattttcctatatgaaaacatgaatttgtgtttaaaaaaaaaaaacaaaactttctgctttcaagaataaaagcttctctagtgagggatgaattttgaatattcaaaccgaattcatggataagaaatagtagtgctaggtaccttttctttactcataaagcattatgtactcatatttgtatgcttccagtatgactttgaagtgtatattagtgcctagaacttttcagcctgttctccatggcatggccttcatgattctatctcttacattcttgtaaagaatgaagaacgggtgttctctggactctcattgcacatggttttatgttcagttacctgctgactgcctccctgtcatgccagctgcaagtcacagcacagtgcctggcacagagcagatgcccaacttgtatttgttgacttaaataaaacttctccaaagatgacaagctactgtttgtaacttcagtattctcttgtgcgaagtcctctacatagctctccattcagggacatttctagagctcaaatcatcatgacttccaggaagaaaagttgtagtcactggattagggggcattgtttgaggaaataagcaaattccacaggtggaaagaattgtgaattgtgtgtgtgtgtgtgtgtgtgtgtgtgtgttttgaggtgaaagaggtttagggaaaatttgaaaagctattggaatggaaa

SEQ ID NO: 76329 - DNA, 1226 bp, Homo sapiens
tatattatattttttagggattcagatcagcttactttatgtcccctaatttctgtagaaaaacttgggaagtaggccacatgtagacaaattaataaattcatgcctgctcaaatacagttcatttttccatcctgccattttccagcactgtattacttctacagatcttgctcttctattatgagaaggcagtttagatgccgctaaactcattctctgctctgcccgcataatcctgcaaagctgctggtgttgaggcttcagtgttccatgcagagtgattttccaagtgatgaagcagattctaatcagtctaagatccaactacagactgggagttggacctctgccacctttccctccagctctcgcaacacaatggggaattcctgtgaggatcactgggtacacttcaagctcccctgatcctatggcctcattccagtcacagatcttcctgtctggagcatttccggcccttctgtcctttggcttggagagttcagctcaacctgggaagggacagaagactttggggttatcaaaagcctgttgaattatctgatgcaagactaactggtttgtttgcctccctggctctcttcctgagcttcaaagcagctgagaaaacaacttttttctaagtcttggacaaggaggaaaaccctggcatgaaggatttctgtcgcagacacttggcatagctagaggaaaggtttgtttaacttaccaatgggttttattagcctaggactccagttgaagtgagataatagggtccctgtagaaggacatttcagtcagtgggcttcctccctaatttctcgacaggacccttgcatgcagatgaaaagcatcagacacattcaacaaggaaatccccactgaatttatcaacgaccacgtaatcttgctgatcatgagggagactgagacaggattaaaaaactagcaggacaggaaattgtgtatggatgcaaagtcatattggggagctatctacttcaattgcttcttgctgaacttctctttgctgaacgtattacattgtctctgggccccacatcttatagcagatagcagggatagaaagaaagccagtcctaccacctgtccttacaggaagaaactcttctgcttatacttttcctctgccaggtcatttcactcttcctttcacctcccaaccaatgtgagatttggggttggggtgggaaggggaa

SEQ ID NO: 76330 - DNA, 1354 bp, Homo sapiens
ggagccccaggctttctgagccacatatatctacactcattcttgctcagttacatatttctttgaaccctcagacttccaaagccaactttcacacattgcacacaggtttgagtgcgatcagaatttttcactagggccctgttgttttattaagtacctaggcctccctgcagggcaccatgtattgaagaagatagaatgatacttgaaaaccacctaagtcagacaatgattagaactccccagatttatgggatggatgaacatctgaaccagcacagcctaaattacctgctggggggttgtctgctttggaagaggatagtttatagtttgaatggcagaagggtcatggggcattaattcagatcaaaaaaagggaggaatctatatgtatccacaaagatacatggcaagcatcactttttttcctgaaatatattgggctagaaagctaatttacacttcccctcactagtatataatactatagaatcttcaggttagaaaactcaaaagcaatgtgcatcttcatatagtatatactactagcatataatattacagaatcttcaggttagaaaactcatagtgaaagcaatatacatcttaatatagtatatgctagtatataatattacagaatcttcaggttagaaaactcatagtgaaagcaatatgcatcttcacataatatgtactagtgtataatactagcatatgacagaatcttcaggttagaaaactcatagtaaaagcaatatgcatcttcacatagtatatactagtatataatattatagaatcttcaggttagaaaacccatagaaaagcaatatgaattttcactccagtcctcttaccatgatgtttgcattgaagtgtttgtggtcattgattgctttgggcctctaaccaccttcttgtttgtcattttttcttttggaatttgggccccagtccaaacacattgcatcaggcatggtttcctgggtgaggaggagagcaggactatcacctcccttgttccacatactatatctccattgatataacctgagaacttgctagatttttgaaaattacatctcacagctgactaatattgaactatagttaaccaacattccattttctgaatgctgaatctcattctggctgttccataatgaatcattggtgctctgttctcaaggacaaggcatttcatttagttcaataaaattgcatcccaaacaatgtgtaggatttgttccaacattctaaccaaattgagatttgttttgatatcatgtttatctgatctaatatatgacctctttctctaaattttttgtcttctgttaccttc

SEQ ID NO: 76331 - DNA, 1097 bp, Homo sapiens
ggctctgccctgagaggactggtgaccccgagtgggagacactgatgctctctgaagccacccagcttccctctctcatgctgccttgtcatccccagagtgttgtccacacccatttgcttggatctggttcctgccttgggaagagcgaaagagaaagtggagggcacgcagttttcttatgaaaacataatccagaatttctacctatcatttgtactcacattctgctagtcaaagcttggtcacatagccacacctacttgcaaaagaagcagagaaatgtggaaacttggggagttatttactaaagggaagaaggggaatggctgctagaggaaaattgtaggctctgccataggctcctagccaatcagtggaagagctagattccaagcctatgactaaaacctgtgatcttttcatcacattttcccaccacttctcatagttgacagcaaatatttgttgaattaagataggccaagatattatatataagccttttgatcatttgaaattgtttcttccttctctcttgcctccctgattacctacacggttcagtgttcaaactgtctttgtttctgataatgttttaatgtgtaaaacaggaaactgataattaatcttcttcagtagaaatactataataaaataatctactaattattagaggttctgtagaaccatatgagatgtgataatggcttaatgatactgatttttttaaatgatcaaataaccatctcctttaaaataagtgttgtcttaggaaaatgccattgctgaaaacattttttgatattttggctggtatatcagttaactcttgctgcacgcactaatgcttcatgactccactaccaaaatctcagaggcacacagtgatatttaacttgtgtatctgtgggtctctaggggtcaactctttagcctgagccttcctggccaactctgtttcaggtatctattgcccttcttctgagatagcagactagcatggacatatttttctctgacaatggcacaaacgttaagagaacaactagaaatacttgaggctttttgaggcctcggctgggaactggcacaac

SEQ ID NO: 76332 - DNA, 1310 bp, Homo sapiens
gcagaaaggaaagggagtttacagtgagctccaggttgacccacctctcctctggtcatgtcctttgttcccttagcaagccccgaatgttgtgccacccagaacacagctgggactcaaggccaagaataaagattctgtcattgaaagcagctgggctgtgttgctggcgctgcaggaggcctagaggaaaacccaggtcccagctctccgggagccctcctagttttcaggggctcataggcacaaacacctgcggacttggtgaaacagaacctaaggaaggggaggtccaggggaatgaagggttgatctagcacagcctccccgttactcctttcctcagggatctggggaggatttgtaaaagaaaagccaggttgtttggaacaggacagaagatagtggcttagttcctcagtaagacagaagtgtgttttttatatcatttttgcaaaatcaaagtcaggtatgacaggtttaatttggatcctggggctgtcgtctattagtgtaggtttgaatgagcgggagctggggagaccagggcaccctgagacaggtccggagaaggtgctggagatgaaattagtttcccatatctccaaccacttggcatagggtggcagaagaaaacagaaaacaaagcaacagcgatcttttttagagctggaaagctatgtgcctcatctttcttgctttgcttttgcaatcaagaacagtttgatcaccttttgaaatgtatcaggacaggcattaatctcttctgtttgttcccttgtcacaaacttgcgttaagttttcccaccccatttttttagtcactgagccagctggatgatttattgacaaaaatgtccccccaaataccaccacttgagttcatcagatttcagtttgaatcagtaacctatcaaaatgttttatgctgctggactcaaagtgacccagaagattctcaatttatttccatccaggtacagaggtatctgcatggtaaataccacctccgcacctggcacagcctggcattcttgtaggagcctgggcaaagagccctggaactcaatggagcaaagagagtgaactcctctcccagaggtcatggagaagaaggcaaagcaggcctgtcacattgtccccagcctgccaggtgccactgcagcctcggaaagtttgtctaggccaaggcgctctcctttgctgcttctgcctgcctcttagtgtgggacctcccagggagatgagaaaggagaggaaggactcgtatctgttcagttctcttctcccctgtgcacattcactttaca

SEQ ID NO: 76333 - DNA, 2517 bp, Homo sapiens
atgatagagatgtactgcttcctcctgtagtgccgaggaggaatgcagtccagagctggtttggcagcttagctctacatgtctatcgaagagcccaggccattgactttttgctctgtcacacctaggatgttgccgttaccatggtccagaatggttcagcatcatgccctccatcccagtagcaggatgtgcatgagatagagaatggtggtgggagagaaagcatcccccatcccttaaggacattaaccagaagttatacacattatttctgtttatatgatgttggccagtctgtaaatatatgatcagaaaggctaaaaatatagtcattaatctgggtggccatatacccagctaaatttcgggatttctgttatcatgagaaaagaaaatgaatattcggtgacacagccctttctgaagagcccagttgcagagattaggtgcaatagtacagacgtaagggctgggcttgttgcataatagagttatactcttaaaatgcagcataaatattgtatgtattgaaaagtgccatcaggaccctctttggttccagactctaaagtagaagagaaagggtatcacttcaccaaggatcagcacccaaaaatcttgttctgcccacccaaaacagaatctccttcaggaaggaactttagtatgtgttttgcttttatgcagtatccaggaaagaaacttcaatgagagctactattgcttatagcacaaggcagggcatgaacttgggtccaaagtcatagaccaaacacttttttttttccaaaatgttttttcctacctccacttttaaaaaaaaaatgaaacaaaatatcagttgaaataacattattgagaaaaactttattccaaggcctggactatagttagactggatttacatttctcttttagaacctggaagccacttggctatctttgcagagttaacaatttgcatttgcaaaaatggccaggtaacagtaccaaaatatgttaaatcaattcaggttgttgattttctttgaaagtctcttccaaagaacttcatgttctttctggaatatgatttaagctgcatttcagtgagttcagttcagcaaatatttgttgagcatctattgttcacaaagcatggtgctcaggggtcaagagatataaggctgaaaaaaaaaaaaaaaaggtcccttccttttagtagcccagaatctagttaggagagatgtagttaaataagtttaatcaaaagccaactgtgatacctattaccaaggttcaaacagtggaatatagaaggataaagggaatagacttattccaagtaggatgactgaggtaggttcttgagagtacgtgggacttggactggatttcagcttgtgaatactgacaaaaaccgcattccattgtctcttgacagaagccaatttcttttgctatttgaggatagattcagggacactggggaatgctgattagttccatcactaatgctgattagtagtgaatgttgagtcatgctgactaatgtgttctaaatggattgactcaacaataaaggcaacgttgagagtcaagagttcagatcctgaatttcaccgatgaagtgtaaatcatttcgccacttagtgcttaatttttttgtcaattaaaatgtgctcgtgggtgagaatccagtaagtcatcttgacccatgagggctttacaaacttcaaggataacagacagcttaacagcaactaccaggacaggcttatgcaacctcaggttattcatagctcacacagagtcagaacacccatcacatgctgctcgccagccatgcgaaacttctgtttcctcacacatgccatgagaactgacaaacagtgcactgaactcacaaaacccgacaaatagaggagcttttgaaaaatcttcctatctacctactggggtgtctgtgtctttctacaacaaatgtcgccacagaactaagggcttgcattgcagacacagctctttctctcttttgacatctccccagctagactgcttgagaacctggccttccatgtccagatgtttactgaattctgaagccctcccagagagcccaggttcttttgttgctctccaaatcatttcccacagaggctgaccagtgtcctgaaggagcccttcaatagggaggataaatgaaggcagatgaagacatgaccccctgaggcttgcccacatccactggaacaaagggtgtgaggcacaaccttgtaaggagtgttttggtcagccgcgtccctatgcgaggccaagtctcccccacagggctgctttcaatggctaccatcatagtggaagtattgggcatttgttaaggactgtggtgtgctagatatagcacaaaacatctaaatcatggtcccctgcctttgtgagggcttcctggctacagatggcagctggctttctcaggggaaacttgggggtcatagagaaagctgaagaggggtgcttgcttctgtggatgac

SEQ ID NO: 76334 - DNA, 1035 bp, Homo sapiens
cttcttatctgattgggaaaaaagtagatgctggccaagaaatgcaagtatgactatgcagtttgagaattgctaagctaggtggggagggtgcatgagacaggaagaatgaaaacgtgggtggatggatacatgaatggatggttattacatggaaagacaaatgaatgaataaatggctttggcagtgtgttgatggcaccaggacagaaattacgttctgtttctttagggtttgtcttttttttttttttttttttttcaataatacagggcttacaaactcaaatgtgcatgccagacaggtaaaaagagttgcaaaaagaggccaggtgcaataataggcagttgtagggactgacagattagagagagcctaccgtatataaaggggcaccagttactgacaaagactctcattctgaccaaacttgagtcaggctcctctgagtcctctttctgactaggccccaaccttgggctctgtccttggcttgcttagtccagttttagcaagaatcctgctaagtcaattgagtgaaaattccccaccctttgtatttgatcaccctcagtacctaatcaaattcctcagcccccacccttaataccctatcacccttgcctgccttcagtaagaatcctgccatgtcagtttagcgggaatccccctagccttggtgtttcttcttagtaatttttcatccactgacatccaccctgctctttggctacacattatcacttttccttgttgtattcggagttgagcccatctctctccaaggctgcaaaaccccattgcagtgttccttcttgaataatgtcttacttaaagtctttaacaactgtcatgaaaaatttctctttcacagtctcagctctagacaattgttatcttgtgggatgctgacctcatgttgccagaatgtcggattttacaagggaagccagaaatctgggttttcagataaattttttcactatttttattttatttatttattttttgagatggagtttcactcttgttgc

SEQ ID NO: 76335 - DNA, 1679 bp, Homo sapiens
tcaattatgataaatttcaacattcagaaaagtaaagaaaataatataatgaacacccaaatgcccttatctagatttcctaattattacatttggcagatgtgcttcacttggtgagttttcctggcagatatatgtgaatggaacatgcagagatgtggtagagaagtggggagaattgcagaataaagacagactgggaagctgagagccgtaactaccgcagcctctacttattttttaaacttgtaagatccaatcaagtgtggatggttgccttttggataggaccctggagaagggacttctgtgcagaatggtttgttatggagaatacattgttagcaccttaaagaaagtaatataaatgggataacagaaatgattttattatttatgtgattttaatttatttttaaagtatcaattcttttgcaaagagaatatattcatgtattgcttatgtcattgaaaattaaaaatttctagagagactttcaatgtggaaatgtctctgccatgaagaactcaggggttgaaacttgtggatctgagagaagtctgataaaatcagtgatttaaaaaatgttggtcactaaaattgaaaggttttaaaggcagaaacactccgattcaaagaaagtatatgctaattataagtgattcgtttctggtagattatttgaaaagattctctaagacatattgccccatttctcaacatcaactattactgcatttaaatgctaactcttctctctggaaaggatgtcttaacaacatgaaagcaactaaactttgctttaaaattctattattcagactccacattaatttaagctgacactccttctcaattggggcaaatcatcaaagctttattgtattgagaaccttgaattcagcaacaaagagcgtggggtatggagggaaaacgttgagaggggaagggtggagagctcccaaggccaaaagaagggaggggcagggaggaacactgcaggaaggacagcagagagaaagatggaccttggagaggccaaggggagagcggggagttagaaaaaggctgagataagcaatgggaggcctcctcagaggggccttacactgtcaaactgcccctggagcctctgctcattaacatggtagaagcaaaactagcctacaactttgtagtcacaaatttttctccagagttatggataaaaagggagctaggagatagagaaagggaaaacattccctttcttcctacatttggatgcctctccaatgtccttcctaaggcaccctgcccagtggccagtgcctgccagtaagcccactccacagaccctgaggcctggagccccagccctggtcatggattagtgcctggccaagttgcactccaaccccaggcccgcagccgcccttcctcctcctttctgttgtgattgactctgagatatatgatgtgggatatactaggtgcaacgcatcatgttcgttattgaggcataaggtaaggaaggatcttttgaaatgtgaggacatcatccacaaactgtcactgaccatttacgatttataactagaatgtaataagatttataagatgcactttaaagcctaaaagaaaactgagttttttcaacatgtaacaacatgtaataaatattaatttcaaaaaccaa

SEQ ID NO: 76336 - DNA, 1008 bp, Homo sapiens
gttctctcagacaggacagccatatctgccagggaacattctagggggcatctttcaggctagatccagggtgatgtgggcccctgcgagggcatcttggaaggctgtgttggttctgcctggactggtccctctgggacagcctcagcctaccctgcctggcctcacccctcctccctctgacctgaagctcctttggaggactgacacttcatggagcctgcagtttgatcttttctgaagtggagacaacaaagcaaagccacttccactgtgtgctctctcaaaagaataggaaagctcttctctcctccttgggaatggatttggagggagggtggagggcgtaatgatggggaggccttggaggtattttggtggaggagggtgtgtgtggaggaaatgagccgcccaggagcatgggagaaattgacatgagaacatttcagaagcactggtttaaccggctgacattctttccaaaatggatggacaagcctttaggagtagacagagggcctcagggaggagaaacagctgaggaggaggcatctcccttccccctcctccagaggctgatgctacagagaaggcggcaaggcctcactgagcgcctacccaccactcactagatttctatctttttattaccttaccctgggagatgaatggggttatctccattttccaggtgacaaacagagattcagagaggtgacgagaggctctccaaggacccatatggaagtgtcagctggaattcaaccctcaggcagcctggctccaaagttcacaacctttcctacttgtttcagccctgccctgcctttcagggctaagaagatgttagtagatgttccataaatatttattaaattgaactgaactcagcagctgaacacacgcaggcctcttccaccctgaccaagaggaatcctttgagggtctgcagtatggaaagaaattctctgaggcgctaaataaaatcctgctctgaggtgcaaggag

SEQ ID NO: 76337 - DNA, 1053 bp, Homo sapiens
agctggaccactcactttaggtaatgccacagcagacaatcagtgcctctgatcatgaagactggagaaatgtgtctgggctgggcccatgcatgatgcttgggagggaaactctcccagtggactctgcgactgggatgtggaagctcagacagctagagatgggaaaggaaacttaaattgcaaaggagtaatcctttttttttctttctttttttttttttttttttttttttgctagttcattttcaatcattcatttcctggcttaaaaaataattaatagtaataatcgcatatggctttttaatggctctccattgccaaatactatttaagcacaaatttcttcactagacactggagcccaatctacacacttgatggtgtggctccatctgggaccccagtctcatttcttgttcttaatttctgtacagttattcctaatttgtgaactgcagacctgcaagaggccagggcgtttcagcaaggggtccataactcttagtgccacaccaaacatgggcagcagctgaaatccatagtatgtaaaactcaggcgaatttgaaaggccgttaaattcctagcagctctttgtcattacgtgttttcttgggtacgaagtttgacaattgttacaagaaggggcctgcattgtgataacagttttcaacctgggatccaaggaaccccacggagattccctgaagtatagatggagggagcacgaggatggagcaggagcagatggggacaccccatgcccgcacacacacagctaattcatccctgtaaccagagagactgttttgatcagttttgtacactgggctttctagtaagattttatttgaagaaaggactctgccacagaggtgagtggggtagtttgcaagcaatggctgcagacaaagtacatgtatttctagccagtcccttgccacagttcagtggggcacagtgagaaatctgtcagctgcccgctctgtccagatccacacagtaagaactctgggtttgttagtgtcttagatgcattaagtcccatc

SEQ ID NO: 76338 - DNA, 1076 bp, Homo sapiens
gtgcaaagacagtatccactttgcatatgtactgctgagggaatcattagaacattcactgctgctgagggtcaggtggggaattctttatataccagcttttcttgtgggccaaaatccctagagggatagtggccacttggggtccatttttatctccttcagtttctacccaaatgtgtctttgcttatgtggctggggcctgccactcaggctttcaggacacagtgtgcccccaggcagcctgggcctagaacagttgtagtaataagaggtgacaaagcaggaccttgagacagaacttccagaaattctttagctgagcctccgtcctcccagccaggtttcagacaggatgacacataaagaaatctctgaacaatccagagcagtgcacattagcgagtgaagctcaggcaggaaatgggaaggaatgcctttgtctctgctttccaccctgccacccatagctcattctcaaaagccacctccccaacactcaggctcggggtaaatgctacaaaacgtggtggaaacctctcacgacctcctctctgttgcatgaacgcctgttagaggcgaaggaaaacaatggcaaacagacccaggcctgtcacagctgtactggggccagctggaatgtggctgtgcgtgcgcgtgcatgtgtgcgtgcacgccggtgcacacgtgggaatataaacatccttggctccccagctcctgtgtgctggatcgtgctgagtgggcgcaaagttctgcatgtgtccgaggcagggaggggcagcaccagcacacctaggcgctctcatttatacattgaaaggcgggtgggggggacaaaggagaaggtttgggaatggctggctgtgtgcccgtgtatgtatgggcacatctcattgttgatatgtcttgggggaaattgagggaaattttgtgcttgggtatgtgtgcacacatggtaggcgcccacactcaagtgtgcagagggggaagctgaaagaaagtttcgagattctgtgaacattctcagttagaaaaaaatctggcaactccccataccacaggtgggtacaca

SEQ ID NO: 76339 - DNA, 1027 bp, Homo sapiens
ctaaatctggggtctgcagctgagccaggaggggggtccagtgcccttggcagcctgctgtaaccttctgaccctctgtgtccagcccccatccccatttttacctccagccaagcttccccctatgggggttaacagggtaaatactgtccaggcccttccctcaaagaagctgcaaatctagtaagagaataatatgtgcgtatatgaaactataatttaagacactgtgatcaataacctaaagggaaaggctctgaggacatccaggggtcttgggctcaaaggctggagcgccacacacacacacacacacacacatgcacacacacacacatgcacacacacacacatcaaatcacatattagctcgtgtcttcatgagctttccagtttgcaaaccgctcacacatacagcatttcctttaaacttcacatcagccagtgaaggggctttgtaagcctgacatgtaagatctaacaaccctcccagaatgatagaattggcagaggggggaggcagagactgtcaagcaatggcaagttttctgattggctggaacacagggcaggtgaccccgtgagctaaggtgaaacaaccaggctgaaggccttgcatgctgcagtgctgggtacaaccatgtcagttcaaaccagattcaatttggttggttaatgtgcccatttcccattgctgccatacaaacttagtagcttcaacagtacaaatcaattacctgtataatcctggaggtcagaagtccaaaatggatctcactgagctaaaatcagtgtcgtcagggcagtgttcccttctggaggctgcagaaaagaaagtgttgtcttgttttttccagcttctagaggccgcccacattccttgactcatggccccctttctctgtcttcagagccagcaacatcacagctctccgaccaatcattcttccattgccacttctccctctgacttggattcctcttctgcctccctcttcttcttttaggacccttgtgattacgttgg

SEQ ID NO: 76340 - DNA, 1132 bp, Homo sapiens
agagaaaggcaaaagggcctagactttgacttccttttttttctctctctcttagagacaacattttgctctgtcacccaagctgaactgaactgggctccagaaatcctcccacctcagcctcctgagcagctaggactacagatgtgccaccatacccagctaattttttaattttttgtagaggtggggtctcattatgttgcccaagctgatctcaaactcctggcttcaagagatccacccacctcagcctcccaaagcgctaggattacaagtatgagactttgccattccaatgagaattttgtccttagcaatctcatccaatggccactggagatgtgtgtagggccacaagaatgagaaagggggcaatggagtgacaggtgacctgctcaggtgcccctccccagaccaaatgtcccaggcacacagcccatgccctccaccatggagtacattttctccctggcttgctgctgagctaaaggaccagggacgtggaaacaggaggtgaactaaggcaccccgccacccactgtggcagcttgaatttcttgaggctgagacaaactaggatccagtagcctagattttgccccagtttctccactgagtatttactcagtgctcctgagccgatgccttcccctctgcctagatgaaccacagcattttggtaaatgcctcagcatgttaggagcgctggaacgtttattctcttccctcccaattatccactctaatggagcagaacacttacatggaaaatcctaaacatggaagatgatttaaaaatgattcaccctggaatacatgcttccagttgcttctacaggtttaccttgctaaaggcatttcgcttcctttgctgttacaataagcttgcctgccttgaagaaaagaagaccagggccaaagggaaatcagtcaagggagcctgttttgtctgaaataatgcatccatgaacaaatgaattgagtataactgtctttttacatcagtgtttctgtggaattaagagaacatccaaggccactcctagcttgagtagattaaatttgtccttgtgtttggagcaagggttgtgaagtctgtctggcccatcaaatgaccaatggcttttaa

SEQ ID NO: 76341 - DNA, 1006 bp, Homo sapiens
aagggagttcttaggaggtcacaagtctaggaagagggtggtcacggaaggcctttctgaggtgatggcatttaaattaaaggcaagagtgcatttctgtcactcacttcctcacccccagagcctaacacagggctggcacatggtagatactcagttgtttcatgaatgaatgaatgaatgggcaatgaacaaatatctctacatttcctgatagcccttggtgacttacaggatttgatgctgggtctattaatgtatccatttacaaaaaaaaaaaaaaaaaaaactggatgtcacgattcctcctgagggctatttgtgttatggacgtgctatgtgctgttcattcaattttagaggtgtttatgctgggtcacagctggggaaaacgatacccctgagatcccgcagggagtcttctagactcgccccctcctgacaccctcagactgcaccatggagaactctgtaaattaattcatcaaagtgaggaaggcaggccccttgacaggtgactggattcagatctgaaagcggagacaggttaatacttcctgtgcccagatgtcctaaccacagacccaagctcacgggaggcaaggggagaatagcaccacggacctaccttctttttctcataagagggtgaagggttcttggaaattcccctaaagcattcaaatgagcaaatccagggctgtttgctgtcaggtttctgggcaggattatgggcagactgaccagctgttccctcccccaggactgccttaatttccaagccctacttctcagtcccagggaaagttggcccagctataaaatgccctgaaactctcccagaactcaaaacatacccacagtacggtgtcactcttggggaacctgtccgtaatgaacagcaacaagcatcttctttcccttccctctccaacacgcacctttccaagaagagaaatgagagctagtgacattgagtataggcaaggccaccacatatagtttc

SEQ ID NO: 76342 - DNA, 1084 bp, Homo sapiens
ttctcggtgctgttgaaactcagcgcatgcgtgggcagttcaggaaagtcagaccaatgtcatatgactcctgcgcgatcctctcaggaaacagggccccaggcaatttcgttcctaagtgagacttcttccctcatcatcccttttgttttttctaagcaaaagttacttggaccttgcagataatttcatatccagagccctcccatgcctcgtgggagtacataggataggagccggtggttccgaagcgcctgcaggtgccacacatggagctaaggggtcactttgccaggaggatcttatgaaatcctcagacaaccctgagatgaagaactgttactgttcttatttttactgataagatgctaaaggttcagagagtttaagtagcttgcacgaggtcacacagccaataagtggtggagctgggacctggactagtcccagccctagtgcccacactcataccaccttatagcatgggaattccaggtctttcacaaagttggaagactgggatataatgaggagggaaggccatagctcccctacacccatggtcagccaagctctgcccatgtcgtgagatgtgtatcggagctacaactcctccaggcattttacctgagagcagggactctgtctcccttgaacttttctgcatacgctgtgcctcaagccaggcctgattcacaaaataatgtttattggcagaatgaaggaccgcctcccaagctgccctcatcctgcttttctcctccctctctcctaagctctgagtagacactgggctcgccaggctttctatttttatttattttttatgaaacagggtctcactctgttgcccaggctgtagtgcagtggtgcaaacatagctcactgcagcctcgacctcccagacccaagccatcctccctctttggcctcccgagtagctgggcccacagaaggcagggttcctgcacaggcaccaggttctactcaagctgacctatgttcccacttctgaccctagcatgttaaacatccatgtccctagatgggcagatgggggaggtcttgaacatgtgtccttcct

SEQ ID NO: 76343 - DNA, 1032 bp, Homo sapiens
ctctttttaaactccaggcaaactggaatcaggatgcagggtttttatttttgtctgtcatggatttactctgtccagtaatcctgtacagtaatctctgtccagtttgttccctgggtgggcctcagtttaccttctggagaagtcaagtcagctgcctttacctagggcattattcgatttttgaattgtggagactgaaaaaagatagttgctagggtttatcagagggtttggagtgtctactcgaggtgttccaaatcagcggagagtcagagaggggtgaagttgaagtaggatcttataagaaatgacaaatgaacaagatgtaagagagaggaggaggaagaggaataggaaggtgaaggaggaacaagggcctccaagcaacgtaccatgaaaacatcgggcaagtggctaaactgtgcgtccagtgttcactttgctaagacggagagtgagggcataagatgatttagttacagaagaaaaggcaggcaagatggagcaggcaggtgccttttgtctgggtttgacaagagagtttcctgggtagggaaggaatgtgatcaaagttatgattctaagacctgcctggaagatgaccagggagtgggcaaacttggaagcaaaaccagcctcccaaacacctgtgtaatatcgtgtcctgggccactgtataaataacctccctcctgttcatcagtaggctttgtagttctcagcctctctcctctgttgaaagtgtgagccagccctttgcatgaagaagcattagaagggatcactgcatacttctttaattgtcaagaatgcatacatgccatgcatatgaaagatatagtggactttggggactggggagtggagcaggttgggagtggggtgagggataaaagattacaccttgggcaccgtgtacactgcttgggtgatgggagcatcaaaatcgcagaaatcaccactgaagaacttatccatgtaaccaaaaaccactcgtacccccaaaaatattaacattaaaaaaaagaa

SEQ ID NO: 76344 - DNA, 1046 bp, Homo sapiens
aggaccacatgtggttgacttgggatttgaaatcaagcatcctggctccagaactccttcctcctttggttagcaagaaacactcgaggttttattgcctgaaacccatctgctgctagcgtgtctcgaggatgaatgtttaaggagaacatgaagtactaaaggaagatattctcttagatggcctgttatgggtttgttgcagatgattcaagtggaccaaagggatttaagtaggctctgggtcttggaaccaagagcagatgaaagccaaggagtctttgctaaatcaaaaaaataattaatcaacgatacaggtcctgagaactcctctgagtgtcagagcctgagggagatggaaagctccatgcttatgctttctttgtaaggttgccagagagtatataggatccccagttaaattcaagtttcagataaacaattcttaatataagtaggttccaaatattacatggcatatactaacactatttttttgttgttctttatttgaaattcaagtttaactggaagtctggtgtttctatttgctaaatctggcaacctaatttatctgggaagacagctcataacccaggcagtgtgtccataagaagtaagataatgaggcctttcgagaaggagaagttctggatttgaacccaaggaggtaacacgatctcctgagtaacagtctttggaaggggccttgtgataggaaggcttcctggcagggctggttcctaaggatggtgggaaggatctggaagggcagaaagggcggaagactccaggcacatgtgggactagcaagcagacaatgaaatatcttgaggagacttcatgctggggaggaccggaggtggaagatcagtctggggaagagtcttgaaggttctgctcaggaatctggacaatgtcctttggacaaggatgaggggctaattttggcaggattttgggaagatgaatctggtgatggcacgtaagactggcaggaagagtgcacgaatgagtaggtgtgaggaactgagcatgaggtggtg

SEQ ID NO: 76345 - DNA, 3129 bp, Homo sapiens
gtgagccagcccccgctctgagctcgcgagacagccgcttccgagaccgctccttctcggaagggggcgagcggctgctgcccacccagaagcagcccgggggcggccaggtcaactccagccgctacaagacggagctgtgccgcccctttgaggaaaacggtgcctgtaagtacggggacaagtgccagttcgcacacggcatccacgagctccgcagcctgacccgccaccccaagtacaagacggagctgtgccgcaccttccacaccatcggcttttgcccctacgggccccgctgccacttcatccacaacgctgaagagcgccgtgccctggccggggcccgggacctctccgctgaccgtccccgcctccagcatagctttagctttgctgggtttcccagtgccgctgccaccgccgctgccaccgggctgctggacagccccacgtccatcaccccaccccctattctgagcgccgatgacctcctgggctcacctaccctgcccgatggcaccaataacccttttgccttctccagccaggagctggcaagcctctttgcccctagcatggggctgcccgggggtggctccccgaccaccttcctcttccggcccatgtccgagtcccctcacatgtttgactctccccccagccctcaggattctctctcggaccaggagggctacctgagcagctccagcagcagccacagtggctcagactccccgaccttggacaactcaagacgcctgcccatcttcagcagactttccatctcagatgactaagccagggtagggagggacctcctgcctactccagcccctaccctgcacccacatcccataccctcttctccctacccatcccattccccacaggccctacattaacaaggttaagctcaacccctttcccccagcacctcagaatgtgccctccctctccccctcataaccccacctaacataaggacaagtcaatttgtcagtagcttcttctggcttgaaaccccctccctggattttatagcccacttaccatgcataacagacaagtcccatattttgtcagtagatgcctttttttttccggcttaagccttaagtgccaaatcacaagagaaaaagcagtaacagtttacagaagcaacttagtgccttgtaatctaactttgtcactgtgactacattacctcttcagcgccagagggcacccgtgggcctcccggagcctctgcccatggcggggtggagacccggaaccagcagccccctccactggcgacacaactgcaccttccctcatttcagtctcccgcacacttattcctcctcccctcttcccggtggcacctctccacctgtacccgcccccccaccccccccacccctgccccttggaagagttgttgccagaccagggttttgggggaaacctgtcttgacattcaaaacctttttcttcccgatctgaacccctgttgactaatcttgcctgggtttgtgtaggtctgcaggaaggaaggctgaaaaagcggacgaagattttgacttaagtgggactttgtgatttaattttttcttttttttaagtggggaggaaggggaagctagatggactaggagagacttgattttggtgctaaagttccccagttcatatgtgacatctttttaaaaaaaataacaacaaaaaaaaaatgagagaaaagctaaaaaaaaaaaagtaaggggtgagcagttaatggtattcattccacatacaatatctgtgtaaaacgatttcctgtagaagtagctttaatggtttttgctctagaataccgtaggtctatccttagagcactcacgccatgctttcttccctgggttttaaacttcatataactttcagaaattggagagcaaaaattttgcttgtcactgcacatcaatataaaaaagcttatttaacttatcaaaacgtatttattgccaaactatgcttttttttgttaattttgttcatatttatcgggatgacaaatccatagaatatattcttttatgttaaattatgatcttcatattaatcttaaaattttgtgacgtgtctttttcctttttttccacagttttaatatattattcttcaacgacattttttgtaactttacacttttttggttattttattttaaaaaaatgaaaaattaatttaaaaaaatgcaaaaaactgttggattatttattttagaaattcccccctttgtgttggactgcaaattgagtttctttctctttaggcctttcacaactaggactgagaatgtatgtaaaagttctgtgacagtacagaaggaaaacaactttttatgtatagcttctaaaaggggaaaaaaaaaaaaagagaaaccctttgacttccacgtgcccatctcaagacattccactcacagatttgaggttctggattccaggtctggagttttccaatgttaatgtaaacagaactggcacacacacattaagatgaatgtaattattattcctcttgctggtcactaccgtcgctttctatttctctttctttgtgtgaatttatttaaaagaaaaaaaaactttttgtaacgactatttgcagtttaaaaatcaataaaccccgttttttcaagaaacattgatggtggagctggttttacttggttttggtttgactttgccagtaaggttctccccttgtataccttgcaagtcctgggtagggggaggcggagagagagggctgtggctgtgggtggcggcatctctcatccctataagctaagcctatagctcccttccttgatgctggcagtttgctgcgcttagaggggacggggtggaggttttctgcaaaggagcctgtacttcctgctgtattacttctgaaaagactgtgcagtgtgttagttgttggctgaatagcagcgggcccagccttgccgacacttgtgtggcctctgcggttcttctggggagccaaggctcagggccttccagtccgccccgtccagcctgtgctcttcattcctttggatggtgtttggggtgccaaaatgataaaagaggacctagcacttggcacacttgcagg

SEQ ID NO: 76346 - DNA, 1969 bp, Homo sapiens
gggcgcctgaagcgccgggtagggaagtcagccgacttgaaacttttcctcttaaagaaaaaaaaaaaaaagttgtgcgcggctcacagtggggttttttttttccgccttcttttctcgtctcccctcccccttcttccttttgaaagtttcttctcctccccctgccccccctccccgcctgaccgcatggctgattcaactccagtgtcaatcaacttctttttcctcctcttcctcatttaaataagtttaaagctcctcctccccccggcccaccaaatctgaactttataaattgggctttgcgcgccccagcccggagtcagaaaggcgaggggcgccgggaactggcgtgtgggactccagacaggagaggctgcgccttccccgcaccgggaccttcgcgacacaccagatcctcgcccctggctcgcgcgaacgcacaggatgaccaccaccctcgtgtctgccaccatcttcgacttgagcgaagttttatgcaaggtaaaggggggcggagcatttgcttttcaaaaagtctttttcttttgccttaagaaagaacccccaaaagtttgggtcttggaaggcaatggggaaagtggtgcagcgagatgattcttttctcctccggcatttctcccaagtttgaaggaatttggccccgtccttcccaccctttgagtttcaacagttgctggcggggattacatgtgaatctggaggccagggttttgaggggcgaagtttgcctggcagggcagcccgggggcttcggggggagggctgggattgggacaagttttgggcgatcctgttttacgtaacgtgctgctggatcccaggtttgctggtctgatcgggttcccagtctgcgccctaggtctgtccagcggcattacccacccgtggggttgggagtgggaggtccctcggggaagtgagtctcgggacaatgttttcctccactctttggggggagctggggatatgcgaggaagaaaggccaagttgtgattcaaaaagatgttgcagaacaagtttgcagtggggcttgagtccgccctagctccgttgggcttcttcccgcgatagccgatcgtgcagcaaactttggggtgaaagaggcattcaggttgacccgcttacctgtgttgccgaggcattgcggctcatcgattgcgggcggggttggggggggaggtggcgacaaaatgctggcttgaactcgagagtcccgcgagtaaggatttaatggggggctccttaaaacatgttgcttgtcagccagtgttgaaaaagcaagttttaaactcggaatgttccaggactgcggtttaaatgtacatagcaaaagtctatggatgttgttaaatttctttccaacctccccctcccaatttgaaagggtgaagctgctgggctactttttaattgctgaagtgttttgccttctcttaacacgtcgggtcatgttgctctgttttcccagcttgctgctcctgttggtgcagctgccaacgccccagggctgcagggttggggtgcagggacgccgaggagctgaagagtagcatttaaaaagtttgaatttttcagcttccttccctccctgcacattcccaaactccacttgccagcccggctgccagcgctccccaacatttcttccttcttttctcgactctcccgctctttgatctatttctttctttggcccccctcccccctcacgactttttaaatgaacctcattgttgggaaccagctctcgactgggttcctgtaatcctctcggtggggtggttgcagttacagattcccggtccccccctgctgatcctaagggaccaacattagaatttgcacaatgacacccacatgggctgggaactaactcctaggtccctgacctgcaccatttccaaatcttgggtacaatttgggcaggtgaccagggtcctat

SEQ ID NO: 76347 - DNA, 1034 bp, Homo sapiens
ttctttaagaggaaaagtttcaagtcggctgacttccctacccggcgcttcaggcgccccctctccggggccgcgcgggcgcagagcgggaggggcgcgccccctcctttgtcagcctcagagcgcggctgtgacgtcactcattccactccctccggggttcttgttgtcatgttgttgttttttgttgggcaggaaggcgggctcgactttctctttttgccagcgggagctgaagcccgtccttagcgcccgggccgcggtttccatcttgagctggcggtctccttgaaacttccccaagtgtctgcacaacttaccttttcccgacttctcttcgacactcggctcccttcggcaaaccgggcaggccgaggacattagaaatttgggacgcacagaatgttcaagcctaggattttatgttgctgttttttttccagcggggcgtagggtggggcgcgctgctggggggactagggaaactttttccccaggaggacatggtctggcgggggcgagcgcggcacaatttagtgcgccgcacgcgtcgacactcgcgctcgctttgcagccggcgctctccgggtgtgggcgggtggggggcgccgcaaaaaaagaccacaacccgggacgattgtttgttttaccaggcctaggcgtgccgtttcttttcacgcatccaatctttaaactttttagtcaagaaaaccctaatccttcctgaatgccccttcctcccagaaaaagcccaccgagcaactcactactttccacgcgcgctccgaattctgggcggcgccacaaccctccctcctcctccatcctccccacacacacctcaagactctagaacaatgaaaaaaggttactttggtaagaatgaaggtaaagaggtggagggaggcggcacttttaacttattgttgcttctctctcgcccccaccggagtggaacatatggcttgtcacgctgcgccgttttggcgggaggtggagagggggacatgggagccacgaaaccgaagggcccg

SEQ ID NO: 76348 - DNA, 1034 bp, Homo sapiens
ccacctcggcctcccaaagtgctgggattacaggcgtgagccactgcacctggccaaattctcatttctctagggtaaataactaggagtgagatttctgggtgatatggtaactgcatgttgaaattaatacaaaactgccaaatcattttccagagtggctatactattttgcatttccaacaacaacatatgagagtttccactagctccacatcctcaccagcacttaacagtattactgtttttttgttttagtcattctaataggtatgtggtagtctcacactgtggttttagtttgcattcctctaatggctaatgatgttgaacatcttttcatatgcttattttccatctgcatatactttttggtgaagtgtctattcaaaccttttgcctattttttagttgggtcatttagttggtcattttcttactgttgagttttgagagttctttacatattctggatatataaagttcctttgttgcttatgtgacgtgcaaatatcttctcatgtctgtaccttatcttttaactctccaagcaaaggatctttcacacagcaaaagtttttcattttaatgaagtctaatttatcagttttaccttttgtgggtcatgcttttggtgtcacagctcagaaatctttgcctaaccccaggtcattaagattttttgttaccttctgaaagtgttatatttttcatggtctgttgttaggtgcataaatgtatataactgttctatcttcttgctatattgagcattttattaatatataatgtccttgtctcttgtaaccttttttttttttttttttttttgagacggagtcttgctctggcaccaggctggagtgcagtggcgcggtctctgctcactgcaacccccacctcctgggttaaagcgattctccggcctcagcctcctcagtagctgggattacaggcatgcgccaccacacccagctaattgttctatttttagtagagacggggtttcaccatgttggccaggatggtctcga

SEQ ID NO: 76349 - DNA, 1087 bp, Homo sapiens
ttctgtttctataagtggctgaaataaatttagcgaaacaaccccacccatctgagggcctaagatttcagagcaatgggattctctatcctgaaaacccctgtttttcagagctgaaagctttttgtttaaattccttttgggaatggaatgctcttgatctgaaataattattatactgcggtcatctattcctcatagataaatgctttgacacaggatagcttgcagaaaagctgatctacaaatgctctgcagcttaagattgtcaactctatggggccaatgcctagttggatctgttggggtatttattgtaagattattcttctaatgtcgtgcatattcagccaagtccctctgttgtctgtcatacagaaccctgattgtggctggctaagttagcgaagtagagaagtactaaatcttcattttttttccacgaatacttattgagggcctactctctgctaggcactaagccaggcactgggagttgagctgagagcagagagagcctgctttgatggagcatacatcctagtgggaagggaatgttaaaaagttaaatgactacaaaaaaactggcaacgaatgttgtattttaaaatgaaagactgaatgctttccccctaaaatcaggaacaaggtcagggcatctactcttaccatgcctattcaacactgtattgcaaatcctggataaagcaataaggcaagaaaatgaaatacaatgcatacgttaggaaaggaagaaattaaattattcctatgtatagacaatatgtgcttgtctgcattaaaaacaaaaacacacctggtacaggggctcatgtctgtaatctcatcactttgggatgcccaagcaggaggattgcttgaggacaaaagttagagaccagcctgggaaacatagtgagatcctatctctacaaaaaattaaactagctggaatggtggcatgtacctatagttccagctacttaggaggctgagatgggaggactgcttgagctcaggaatttgaggctgcagtgaactatgattgcaccactgcactccagcctgggtaacaaggtgagactct

SEQ ID NO: 76350 - DNA, 1030 bp, Homo sapiens
cttcccacgcaccagcaccacgttgtataaatatttacacccccggggctggcaggaatctttctccagctgcttccctggtctctgggagagcttgtttcctcacccagcagctgcagcagatctggttgcctttggtcagacaagagcaggccctggtttgggggcccacagtaccccggggtggagggtgcagttggtgggagaaactcagcactaaagaagtcacagggctgtggcaaagacccgtcctctctcactcccccgccggctgtccacatggcaaccctccaagagctgtctgatctctgctctggctggggaggttcctgtttctcaaaagaacagctctcagggtggagttggccataccagggccttgctagggagtagtggaggataattccaaagcaaactcactgatgctaggacaaaatagtaccttggtttacctgtgaacactttacagcttactagtaagtgtgaatcccttgatttgccctgaagatgaccccacagtttagagcaagacccccctggattatctgcaaaccaggcctctccccagcatctgccccaggccaccctccctcccaccagtccctgccagtcttcccgcctcaggggtagagagaggagaggacagacgctccttctcccaccttccttggtgacccagccaaggaagaaaactggcacttgggttcccatgggctgggcactgtgcacggtacttccccatgttctcatgtagttattcaagtctcgggcacagcagatttcttagcttcctcatgcatgtctcctctttctgccagcaaacagcagcagccaggcagcagcaagcccccagatacagagcccaggctttctctagtcctgagttcagccaggaacctctgagagccagccaaggactggacatcaatactggacttcaatctcagccacttgcagtaggtgcgggtcacctgctgccacctcctgctcctgtgcctcagtttccccttacatctgtgggaggtcatta

SEQ ID NO: 76351 - DNA, 1044 bp, Homo sapiens
cttaaagatcagctccaccaggaagccttcctggatttcccctcttagtttccaacagaatccgtctcttccgttctctgcccaccttgagtagcagtagcttcagctgtagactctcctgtttttcccttacagtctttgttgctgcatcctctttcactgaattgttgatgtgagaccctagactctcttgttttttcgttacagtctttgttgctgcatcctctctcactgaattgttgaattgtgagaccctgtgagggtcggcaccctgtgatactggccaggaaagggttgttgcaaggggatcatgggattgttgaatgggttttgatctggattttgatgttggaaatcaagttcccaaatgttttcaaccttgggtaaaggaacatgtaatggtgttttttaaggctgtcatggaatccttttgtgtgtttaattgctttgttattttagtagaaatgtcagggtgtcagaggaacaaaagccatgggtctgagcccaagcaagaagacaaaccactgagcccgtgctgggtgcttcctctgcgtggcctcagggtcagggcctgtcagatggaatggcaggctgcgggtccagccccaaggtccaaccaaggaagctcctggggccttggccgagcttgaggctgtgatttcagactcctcgctggtctaggtcggtatttcagaggaggcaaaagagaaagtgccttcacagccttggagaagactgggagctaaaggagacatccttgctttttccttttaaaataataagccaaatgttctcccatgaaggactccagaaaaccccgttcatgcctcacccacagatgatttgctgaatgctcattaaggggaaaacaaagaggtggttttgtttatttatttaaaaggaaaaataaatgagctgtgacaaaacaatttgaaaccaggcccctctgagacctgggctttcacttccttgatgggaagtaaaacagagaatcaaatccccctccaaataaaagtgaagttaataatcagacagctcgagccc

SEQ ID NO: 76352 - DNA, 2084 bp, Homo sapiens
cactctggcagaggtagggcatggtgcagggcgactaccttgtgggtcagagcccccaaatgagctctcctggatcttgaagctcctaaaagaagcagcttccaagtagacctatcatgagcaaacctgggagaaggtagatacccaggctggagctgcttgcatggggcaaggcccgcatttctgcaaagctgcttaacatagcctggccatatttgggaagcagtgatgcccaaacatggatggtgttcttaatctgctggagggctcattaaaattagactgtctgtccgaggcgtccagagagctcagttgagtgcgtgtggggtctccccaggaacctatacgctccaccagagtatctgctgatactgctccagcacgcaattattgcagactagtgtgattcagaagatgattataggtgtaattggcacatggaattagattggaaagtggcttacaaagtaggtactgaagtggaaaacctgagagaattttaaaaatacatgttgtgtatgcggtatgtacatgtgtggatatttacgtccgtacatcctgtagttacaggagggaggcaaaatgcaaacggcacatgctgccttcacgccgccaggctttgcggctgtgtcgggccgcgccgctttacggctgctggactttgcggccttcctgaccactctctcctcgcagaactacattaccatggacgagctgcgccgcgagctgccacccgaccaggctgagtactgcatcgcgcggatggccccctacaccggccccgactccgtgccaggtgctctggactacatgtccttctccacggcgctgtacggcgagagtgacctctaatccaccccgcccggccgccctcgtcttgtgcgccgtgccctgccttgcacctccgccgtcgcccatctcctgcctgggttcggtttcagctcccagcctccacccgggtgagctggggcccacgtggcatcgatcctccctgcccgcgaagtgacagtttacaaaattattttctgcaaaaaagaaaaaaaagttacgttaaaaaccaaaaaactacatattttattatagaaaaagtattttttctccaccagacaaatggaaaaaaagaggaaagattaactatttgcaccgaaatgtcttgttttgttgcgacataggaaaataaccaagcacaaagttatattccatcctttttactgatttttttttcttctatctgttccatctgctgtattcatttctccaatctcatgtccattttggtgtgggagtcggggtagggggtactcttgtcaaaaggcacattggtgcatgtgtgtttgctagctcacttgtccatgaaaatattttatgatattaaagaaaatcttttgaaatggctgttttttaaggaagagaatttatgtggcttctcatttttaaatcccctcagaggtgtgactagtctctttatcagcacacacttaaaaaatttttaatattgtctattaaaaataggacaaacttggagagtatggacaactttgatattgcttggcacagatggtattaaaaaaaccacactcctatgacagctctttgcctgctccttgcttgatgttttctggaagtgtgtgtggggtcaaggatggtgtggggcacctgtatctactcctaatgtttttgaccctgctgtgttcaatcttcttacacttcagtttcttcattttaaaaaggaaaaggtaatttcttcacagtctcctatgagttggacagaaagtcatggatgtgtaaaggacttcttgatgataagccccaccttcatttttccacggcaccaaacagccctgtgacatctgcattcaccccactcgttttatttttgctgcagtgaacagcttgagttgtctcttaagagtcatctcatcccttgctattcgagatgacccacagatggcagctgttcagcatcacctgggagttcattggaaatacagaatctcaggccccacccctgaatgtcgaatactgtgtgtactgctctagcttctccagagtaaaagatagtctctataggatgccgtctgctc

SEQ ID NO: 76353 - DNA, 4806 bp, Homo sapiens
gcctgcagggatgaatgggattcaggtgggccagggcaggcatcccaggaggcggaacagcaggagcaagagcatgggtactgaggaggtgagtgaggtctgccgaggctacgaggatcctggttcagtgggtccctgagatggacaagacttgggaaagggcatttgaatggcaagcagaggagtgaatatttaggttagaactgaccctgcatcccctttctgaggctgacaggtacccgagagttggtaggtatttcatccaatgataacagtgcttgttatatacctctgtggtgctgtttccatacctaagagcacccatgctaaaagtgtcttactaattaccagtgatggcctccttagggctgggatgggaactgagaatcatttgagggcttaataagtgattttggaggccccagtccccaccctatgggagcagagtgaggtggtctgacaaggtgcttccttcccggtgagcaggagatcgggaggatctccattgagatgcatgggaccctggaggaccagctcagccacctgcggcagtatgagaagagcatcgtcaactacaagccaaagattgatcagctggagggcgaccaccagctcatccaggaggcgctcatcttcgacaacaagcacaccaactacaccatggaggtgggtggggctggccttgttcctcttcgggagcccgtggccccttctgctctttctcctgggtggggaagtctccaagggaacaggtcatagttggaggataaattaacttcacccctgaagcctcacatcttcaatttttagtaccttctgctttcccaaggaatgtgttgagaatgcacatttctaggccccatctctagaatttgcttcactaattctggggtggagttcagaataagcacttctggtggttctgggtgctggtgggctccaaacactggctcaggcatctgctttgaaaatggctacttgttttaactgtgcaagagtgtgtgtgtgtgtatgtgtgtgtgcgcgcgtggctgtggggttggaggttcggggaatcacacatttttttgtctcaatctttcctacccccaaatctgccctccttcctgacctgacccccattggcaagtcctggtttctttgctctcccaggcagaggctgccaccctgccccttggtcatctagggtccttgtcctagtaggttgtccttgtcctggttccccttcctctggtgacactcagccacacagaaggccaagtttgatggctttggccattttgatggttggggagtaggatgggcaggggccgccaggagcccaggcctgggacccctttgctgacaggccccttgccgtcctgcagcacatccgtgtgggctgggagcagctgctcaccaccatcgccaggaccatcaatgaggtagagaaccagatcctgacccgggatgccaagggcatcagccaggagcagatgaatgagttccgggcctccttcaaccactttgaccgggtgagagccccatcctgtgctttcttagtgcagcccccaacccctgccccagggccctggagggcacttccccgggacgtgggctgccatgcaagtgaggagggagagaaaggggaaactgccgtcagcctgccctgactcaatgcaccctgcaaaaccagccttggaaaacctgtgttggtgccccataagcttccctgctttccgggagagagtgttcagactgtgggtagaaagaggacctttgacccctgatccttgctctcctaccatgaggagtcaccctcagtgaaggcttgctgctccctggctgtggagacagaggagcagaagagactcctcctgccctcgctggcccctacccctaccccgacctccagtggcctctgggactctgctggggatgtcagaggccttggtcctgggttcccatcccagctctgggtcaggctgggttttagtgggctgccccttcccagtgccctggggcttgcgggcggtcccaaggcgtgggagcatgggcttgggtgctgcccaccaccccacctgcttcatggctctctaggcacctggggggaagcccctggggaagcgggggggctgggtcacttctgagggagcttctcacccttgtggctcatcacaccccactgtggtcctgctccctggagcagggctgcgtgtgctggggggagggcaccccctggagcctcgttggtgtgtctaaccgtgtgcacttttatttcccctcctcccccgcccccccaccctccctccgcatgcctgtccctgtgtctccccacacacgccaccctcccccggggcatgcccccctcacggctccacctccctgacaccgcatggctcgctgcctggcgcaccgcggccccaggatcactccggcacactgggtcccgaggagttcaaagcctgcctcatcagcttgggttatgatattggcaacgacccccaggtactcgcctcctgcatggagcacgctcaggggtggcgtctggggcaagaaataatgcgtttttcctttttctcttctctctgtctggatctcctgtccccctcctgtgggccatggggctcgtcctctcctgctgtctctgtctgccccatcactggtccaccctctgccctctgctgtctttcatggcaacctactgggtgcccgctgtcttccgtcctcgctgctcttcatcccatgggtggatttttgcatctccctgctctgtcttcctcctgtctttggacatttccaccgatgtgtgttcgcatcttctcctatgttcctttacctatcctgacccccaaaaccataaatctcatccccgttctggccatctgttcctgtcttcctggccccgggccggcccttcctcttcctgccttcccgaccctccttgtgtcttggtaccactgccccccacagaagaagacaggcatgatggacacggatgatttccgcgcctgcctgatctccatgggttacaacatggtaacgtaaaccccaccctctgtctgccctggtgagaaggcagccagctggcgggagcagccaagtcccaggagtggcaggctggaggccctcaggctaggggctgccctccctggaggagccccagggcccatgtccttggggaagatggctccctgaaagccggcccggccacgggcgtgtgtgtatccgggaggcctgacctcctcgcctcaatctctgtgccacttcatcttctggtacttctcactcccactgtggacagctgggctgaccctgaggctggcaggaaggactggtggtgtgggacatcccaggtttcgggctggcatgcgtcacctcacatggagcatggaaaccgagacttccacctctgtcctggcggtgactctggttgggcctgccgcccctctggattgtcccaggccgtcccccaccccccaaccttcctagtctgtccccccttgcacagacattctgagcagagcagtcaggtgactcctgagccatggtgccaagtgcagagcccacaggctgtccagcgcagggcatgggcatggggctaggagcagtgaacctgggagtaaatcccagccctgccgtcattagtgtgttacctcaggtgaagtgggggaaccctacaggactgttacaaggattaaatgaaggaatttaagtgtgtgcatgtatctggcatgtagaaaatacagtgtggtggggagagaacagattctagaaccagactgcctgagttcaaatcccagttctgctgcttcctggctgtgtgaccctgggcaaatcacttagcctgtctgggcttcagatttctcatctgtacaatgaagataataaaatacctatctttatggttgtagtaaggattaaatgaattgaaataaagcttttagattaatacttgatatgctacataggtgtcagccattgttaatcattgttgtcattatagttattatcaacatgattatttgctctaagaggaactcaggcatctgcagggtgtggggaaccctgagctgggtctcccctgttgggtgttgtgtccccatcatacccttaggacaacccaggttaggtcagggggatgtgcccttctcttccagccataggctgctctgagcccccagggtcttcagtccatatgagatattcccagcaggccatgggctgacaggcctgggtttggctgttccctccagggagaagcagaatttgcccgcatcatgagcattgtggaccccaaccgcctgggggtagtgacattccaggccttcattgacttcatgtcccgcgagacagccgacacagatacagcagaccaagtcatggcttccttcaagatcctggctggggacaaggtgggtgtcctatgggtgggcactgtgctggggtggcaggcactggctggactgtgatctaaaggggtgagagctggaacatgaactcctcaaccgccccttcttccagggtcctttggcctctccttgtttgccacttctactcatttctgtaatgtcttgggctcagctaaggtgtcaggacacaggattagtataagtgacccttccaggatcactgcatgccagtgagggactccatagctgggatgaaatgacgggtggcagatgagaatagagtggtgtggatgtgtgatcggactcttggagtccatctgacaatccctgggacttcacccttggtctcatcccgcgcatcggcacggactataatgggagcaggaagagggactgtgggacccaggaaggaagc

SEQ ID NO: 76354 - DNA, 1713 bp, Homo sapiens
gtgcactggacacactgaccgagggaaggggcccctgcagggctgccggcagccagtgacggtaactggggacattctaaaggcagggtactcctgaggtgcttgggttgtttttttcctggttataccagagggtgtggatggctgtgtttcccgctgtgtgtatagcgtcatgccctatgcattcccacagactcctgcatagccttcctgcgtagacactttcatggccttggaagtgctctgaggagagtgcttttccccgttgcgccggttggtggatgttctagttgcacatctgcttttgcaccctgcagatccctgcacaatgggcacctccttgagaagcacccccagaagtggagctcctggggccctgaggggtgggcggttgggaccaaggagatgcttctcactccagctcagccatgtggccctctctcaacccaggcaaagaggccatgctgcgacagaaggactatgagaccgccaccctctcggagatcaaggccctgctcaagaagcatgaggccttcgagagtgacctggctgcccaccaggaccgtgtggagcagattgccgccatcgcacaggagctcaagtaggtggccccagacacccctaccctgtggtgaggggctgaggctgggctttctcagctgctgggggaggtgggggtgtggccgtggaagatggggagggtgggtacaggtgggtgcccaggtggggagggagtcaacgcaggagacaaatatctctcctggtggggaaggagcccgggaccactgccatcctgttaaaggccaccagttctcgcctgtagctagtacaggagcagagggtgaccaagacttggttctgagctttctcgttgggcctcgagggctccctgccattggccattgaggtgaaggctggtgtcacctccagccatgactgggaaaggggtcttctttggtctcctctctgccagtctcctgaaagaggggaggggtggaaggagtgcctggaaggtctcttgaagggagcgcccctggctcttcccagcaccaccagccaccccactgacagcctcagagagagggagatgggccatgaaattaacctgggtcccctgacttccttgtctcttccctccccagtgagctggactattatgactcacccagtgtcaacgcccgttgccaaaagatctgtgaccagtgggacaatctgggggccctaactcagaagcgaagggaagctctggaggtgagaggtcccagagggagatctaggcccatatccggcagccctgtggtgccccttcctgcttcttgactctctttgctttgggctaaaagactctatggcttccccagacctcccccaaccctggcctaaatgtggaagattcactttggcacaggatttggactttgccctcatggcgatgcctcctctcttgccctcacatgtctcatcctcccagtttagtgtgctttacagcccaaccccagccatttgagaaccctcctattctacacaccagactctgggacccaggccaggtgactgtgatgtgagatggttcatacagctggcaggaagagcttgttctttctgcctgattgagtcagtgcttctagacctggggctcaccaggaggatcttgataggagtgggggatgattctggacatcactgtactaacccttaccctatttggcactc

SEQ ID NO: 76355 - DNA, 1535 bp, Homo sapiens
ggggagggtggcttgcagggtgcagccccagtgactgtccagctgggcactgttgcacaaactggaggcatggccctgtctgaaggggcgtgtgggtttgcactcagcatctgtcctcccagaattctggccggctcacccaggccggggtctctgtaggctccaggttattgcccagaggcctgagtccatgaatggatccaggacagtggggaggctgggcagctccagtgcctgcttgcctcattgcacattgttggtctgtttacctcgggggccctttgccttagcacatgtgtgacctctgtgatcggttagagtcctgcgggaaaccagtcctagtcagggagagtctggggccctttccccacagggctctgttctcaaagtcccatagctgggtgaccaatgtagatgcaggtcccatgccttgcccaggaggcctggctcctgggagcccagaaaataccagtgggagatgggaggtatggtggggcagcctggctagggtggatatggggcagagatagggaagaggctcttcctggaaggcatggggcaccttcaggggtctagggggctaggggacctgaagcctaggcccaagccagaccctgaccctgtacctcccatccccacaggacatcaacaatgcctggggctgcctggagcaggtggagaagggctatgaggagtggttgctgaatgagatccggaggctggagcgactggaccacctggcagagaagttccggcagaaggcctccatccacgaggcctggactgacggtgaggccagcccagcctcctgcctccccccagggcttcacttccctactcttcagcccagccagcagccactatgctattctttgcttttcatttgtttcatttggtctcttactagttccatggctttaggcaagttcattagccttctggtcgcctcagcttcctcatctgtaaagtgggaataataatagtaccaacctcacaggcttgtaagaattgaatcagttaatacataacgaagttctgaggagagttcctgcatagtgcagtgctgtgtgagtgttcactttgcagtcaaatcctctaccccgagtgttcactttgttttttagttttatgggggtttttttttgagatggaattgtgttcttgttgccaggatcgaatgcaatggtgaaatctcagctcactgcaacctccacttcgtgggttcaagtgattctcctgccctagcctccctagtagctgggactacaggtgcctgccaccattcccagctgatttttgtatttttagtttcaccatgttggtcgggctggttttgaactcctgatctcaggtgatccatctgcttctgcctcctgaagtgttgggattacaggcgtgagccactgtgcccagccgtataatgtcatcttaaggaattatgtctgcaaagagcctgtttccaaataaggttctatcttgaggttctgggttgacatgagttttatgggggaccccattcaacctaattcagtctc

SEQ ID NO: 76356 - DNA, 1056 bp, Homo sapiens
acccacattctagattcttaggaagtcagatggcaagaacttctggaaatagctgttaaccccctccatggtatagatgaggaaactgaggcccagccagttagaacctggtactaaaacccaggcttccttcctgccttttagttgcactaacttcacaccaggtctatgggtcttcccttagcaaagcagggaggttgagtgacgtgactgtgagtcgatgtaccctagtagccaggcttcacgaagcctgtggttctcagagggaacaccctggaagctgacttcatggcctgggaatgtcagtggttgggaaggagtgtgctattaggagagaccccttccccatgtgggagggctgttgggaggaaagggaggctggccctagcacactccctccccgcctcctcacctcctgcccccaccgccttcccaccctagctgttggagtggatccgccgcacaatcccgtggctggagaaccgggtgcccgagaacaccatgcatgccatgcaacagaagctggaggacttccgggactaccggcgcctgcacaagccgcccaaggtgcaggagaagtgccagctggagatcaacttcaacacgctgcagaccaagctgcggctcagcaaccggcctgccttcatgccctctgagggcaggatggtctcggtgagcactgggggtgagcctgggcccccagactggactgcctccacctctgagctgctcctagttgtggtcaaattcagctttatgggggtgcggatgggcgtgtttgcttctacctacatacactgctccagaagtcacttcccccttccagttaccacccaggctcaatcccaaactcggccatgtggggcagccccctctgcccagaccattctgggtcaggcttgcccttccagacccctgagcatctactccagacctccctctcacaaaaaatcatccctatgaacacaatgcttttgacaccctgaaccaaacagggcataattgaatcgcagtcaagttgatttctacttccatggaatcttaagtagttaaaaa

SEQ ID NO: 76357 - DNA, 2401 bp, Homo sapiens
tgaaaatcacagccgcagttgcttcgtgccagttatgagtagctgccaaggggtttcagctgtttgagtggcacatctctggcatagtcttccggggtggcacatcctcacaaaaacatcagcctggaggaggacacgcgggtctctctgcagccccctgccccagccttgaagggaagtagtctggggcttccggcaagctgctccccagtcagtcccatgaggctgctggcctggttcccatggccccacttgctttctggggctccaggtctcctagacaggctccaggaaaagcatttccctcttcgttgcttcttgggattccccgtgggtgcttgttggttctcgagagagatggcgatcagtcaggagttgtgggtgagaagcagtcatggcatctccaggacagggttgagttggggtcagggggtgagggcctaaggatgtgactccctgtctcagtttcttgaggcccaggactcaaagtccccacctcaggggactcttagaccaccctctggccattcccaccttctccttattggttctcccaacccattctgacaccttgctctgcaggtcatgcctcccttgacctccttgactgtgtttctgacaaggcctttaggatgatctcattctgccccttaccccctgccccacacaccccagcatagtcatccatccacaaagcacatgatttggtgggcggattcgagaagttcttcaaggaaaaaacatttccgtcttccatcttagtcattccttccaattctaagcacgttcattctcaggaagctcttccttacaaccagcctcagttcatcttgctgcagttgaaacctgttttgtcttgttcatcaaccagttgtgaggtcctgtctttcaacctgttaatccagggatcatttttcatctgcagggcacccttctccagggtctcaggatgcatgtctgtcttctcacagatatcatcttctcccacccccaggctgtcttcctttctaccctctggcccccaaaaggctttgagttcacttcccccttggtgtagggttggaatgtatgcaagaacacagctggattttaaaaccacctatttgaagtggactcaggaatgctgggtccctgctggtgttaggggtacagtagcccccacagctgcagaaggcgctctcccactaaggtttcttagtctttgcctgggattgccattcagtcccctttccttccctttgctgctgaggccatcttgggtccctgctagcccagcacgcagcgcatgatgtgtgcttagctgtctggaagaggcctgtgctgggtttgctgggcattgagcccatacttggttgatccggaagtctggacttgggtgcagtagaatgtccgtcagttttctctaaagtgcttcaggctttgggccaagagccttgggagattctgcagggatcccaagaggtcccatgatttctcagtcagcactttatcccaggactcccggatttgaattcccacatctccaagaccctggaaaatccagccagaggtcctaagccttgcagttccagtgcctccacttggaattccaggatgggcatgaattttctcacctctccacctgacctgagtattttgattatatcagtcattggattagtttcttcccaacctgcaggttgggccttaaactcaggctgttctccaggggcccagttcagccaccaagacctctgtccaggctcacttgacccatgggacctggccatgggctggcaaggaggatggtaaggagagaggaggaatgtgacctcacagccttcttaactcccttccaaccacagggagctgcagggatgggaggggctttgtcagcacaggtgtgtaccaggtgcccctgctgctggggctggctggtcgtgactctctctgtcttgttgccaggcggagacagcagccaatcgcatctgcaaggtgttggccgtcaaccaggagaacgagcagcttatggaagactacgagaagctggccagtgatgtgggtacccccgggttcacctggcctgactctagcaagagtcagtcccctagaacgtgtacctccaagtctttccttggagcatagtctcaggcttgtatagtctctgatcccaatactgctagtccagggcagcctgagctctgttgtggctctcccagaaagtagtgaggtgggggcagaggccagtccctgagttatcatgagcctaggatatccctttgcctctcagagtcttcttgtttttttcacttgtcaagtgagagttgagccaggggatgtcaaagcctttccagcctagtgtactcttagtctgtgagttttgcttcagtgagaaaaggagcacatctggttctaagagggt

SEQ ID NO: 76358 - DNA, 1405 bp, Homo sapiens
tttccctcattagatgaggaccaactgctgtttgacaggtgggttttggttctaattctttctctgcttccctctcccctcctcttcccttacagggacttagaatggatggagagcattaagattttgtttatgtagcttgtgttttagagttcatggtctgctgtttctgagaaagaacacttgaaggcttggactcgatctgagagaaattcatgagccatctgggaaaacctaaaaaaaggagccggcagtggctgcggtctgaccagtgccctgctctgccccagatctgagcagggcaggtgcagtcacaagactgccggccaccaaggttttcttgagcagcagaaacttgaacatgaggtctgtggggggaaggcttagcaaggccttgggaaggggcagacagtgttgtggagggaggtgaccacagcttgtgcaagaagcttcggggtatgcaggcggagcctgcagtaggagaggaagctggcaaggtgtgggctgcctgaggaaaggggccagtttccctctgcctggtcacccaccctggcccactcaccgtgaggaagctcggatgcctggtctgagatctctgctgatctggggctctcttagtaggaaccctgggcttggtggctgactccggacagagggaaagactgggcagtggacagctgtgggaagaagaaaaaagcaggtccagctagatttgggaacattttggctacagatgacatagatgagatcctcgtggcattcatgtgaatctgtgggttgtgggtggtggagccacagcacatcatctggccacgtttgggtgttttgatgtcaccttgaggacagttcctctctagactgtgcctgtatcaggcaattggatgctgattattagggtagcagtttggcttgggatagctaagtactccagggataataatagttcatatcttttaaaaaataactccagggataataatagttcatatcttttaaaaaataactcttgaatatacaacaaagtgtatatgttaagttgtataatagcgcagcttaaagtaggtcataaaaaaacatgaaaattcaggttgggcgcagaggctcacacctgtaatcccagcactttgggagttgaggctggtggatcacctgaggtcaggaatttgagaccagcttggccaacaccgtgaaatcccatctctactgaaaatacagaaattagccagacatagtggcgcatgcacctgtaatcccagctactcgggaggctgaggcaggaggatggcttgaaccttggaggcagaggttgcagtgagccgagattgtgccatcgcactccagcctgggtgacagagcaagattctgtctcaaaaaacaaaaaaacaaacaaaacaaccatgaaaat

SEQ ID NO: 76359 - DNA, 1005 bp, Homo sapiens
agcccccaaatttcatgaaatgtgagcaccagaggggctcctgctccgaatcttgactagtctagagtttagagctccctaccccaactcttgagttatggatggagaagctgaggtcaggttagctacccacgagtcccactggttgagggcagagctgaaaccagaagccaggatggatggtgactaggccagtgccctgcccttggcacacgtttcttaggaactccttcctacccccgactcaggctgcagactacttcgccccattttcctgacaatctgaagcttgaagggggaaagagaatgctttaaacctccaaccagtgagccccagtggtgagaccagccttccacatctggagctgtcccctgaggatcgagctggggctgggagaaagtcgctctgctccccagtttgggtggccacccaattgggagtagccagtgacttgtggtggctctcactttatcatcccttcctccttttctccctctaggatgatccactcacaaatctgaatacggcttttgacgtggcagagaagtacctggacatccccaagatgctggatgccgaaggtgaaaggcgctttccttctgtgtctcttgcccatcgcccacctgccactcagcggctaagaaggggtggaccccagcagtccggggctggacgggaggaggcctggtcttctgggaccgcatttgaggagcatggggatcacagcctcttggggattcttccatcgttctttgagctttggagagagaggtgttagttgattctgcaaaggtcttaggggctgttcttgcatcgactgcctgaggatggttcttgtctttgccttggagtcaggatagcgggtgctggggtgtggggaaatgtgcccttgttgtccggcacagtttgggatgggaagtttcccttgctgagaggtgcactgtcctcaccctctgagccctgggtggtctctggacagctgagcttagcatctcctctatgcc

SEQ ID NO: 76360 - DNA, 2191 bp, Homo sapiens
ctgtcaagggaatagacttgatggccagggctcctccttcagtagctgcagggttggcatcaaagggtcacagtggggcctcctgtgagccggcatccctccctccaccgagtcagccctctgacctcgctgcccatccccttccccatagagacttcagccaaggaagggctgctcctgtggtgtcagagaaagacagccccttacaaaaatgtcaacatccagaacttccacataaggtgagtgctggggtctgaggggctctcacagaaccaggctgcctcccccgggagctcccagacccccttggctgggtcagtctcagctttagaacaaagtggagacctctgggggaagaagtagctttccttgggaaggggatgtcgccatcgctctgaatccccccgtctctctccctgcagtgtcttagatggggctgctgcctgatataactttggttgatgcttttgctactgggagcgcccccaaggaaattgtccaggaagtcccagcccagggctctggaacagcagactagggccataggccttggtcgggggtagggctggatatggcaggtttatctgaacttgtcaacccccccacaaagtcttgaccctagtgcctgggatttgtggcaggaagaaatgtcccttcccatcctgtcttctaactcctaccccagaaagctctatgtgttcatctctctggtgtctaggaggcccctgctttgccctggttgcccgtttgttcagcctcatttaccagcctgctccttcttctctctccccgggcagctggaaggatggcctcggcttctgtgctttgatccaccgacaccggcccgagctgattgactacgggaagctgcggaaggtatgtgtgcccacctgaccacccgctttgggtccctggcaggtggggtgggaaaagagcaggactaggacccttgttgtgacagtccatggtccagcctgagcagtgttggcctcttagaatagccagacagagccccaactgaaagtgaagagaaaacaccttccctgttagggcaacttcattacccttgtgcgtggtgtgtgtgtacttgcacacatacacagcccatcaggaaaatatcacagctgtgacagcagctttgtcagagggatggaatgatacatggtgtttctcccttctgtttttccgggatttgtaaagaggagacactattttcatcattgaaaacagtgcatattctaagggacagttcatccccgccttgtcctttgacctgctgtgcggtcctgggcagcttatcccacccatggatttggtttcctttattgctcaagtttggctgggggattttcttttggtttcactcccgccttcagcatgaagctgcagtgatttttcttgagtgggtgtgtggagtggggacagatgcaggagtgggagctgtgtttctagcctcatggtggttctcaatgtctgagctggttggacgacactgccctggaccttggagaagcctgtcctggaccctctgaccacactctccaggttccctcctggaccctctgaccacactctccaggttccctcttggtccatcttggtgccaagaggccacatggcatggccatccaaggaaagacccttcccacgccccaagttggtgacctggagttggggttggaatgtcgcctatctgtgctcagatctcttggcaagggaggcttcaaggagcggctggacttgtgtgtctctacttcaccttgatgctggagaacacagtgttcagtgtagctcttgccttgcctgggcctccaggaagggcgtcttgcttctcagtggccaggagaggtttaatatcactggggcaggagctgctgtgcaactcatggtggtggcaggccctttgtttcgggcgggtggatagcaagctgccaaaaaggatcttgagggaggaaaggagcagatgcctacccgcttccctgcaccgtgccccgccccacccccaccccatacacactgccccgtcacctgaagcttgaggctgaggcctctgcccactggaagggcccatctgctgaaggagaggagccacagcaggggccagcccttcgccagctaacctcctgggggaagaggatccttggcccacctcctcagctgctttgcaaggaaaaaaaaaaaaagagaacct

SEQ ID NO: 76361 - DNA, 1050 bp, Homo sapiens
tctcttccagcacctgtcacagtttattgcattaactttaagaaacatccaggccaggcatggtagctcatgcctgtaattccagcactttgggaggctaaggtgggaggatcgtttgaacccaggagtttgagaccagcctgggcaatatcgtaagaccctgtctctacaaaaaatgaaaaaattagccgggtgtggtggcctatctgtagtcccagctacccaggaaggtgagatgggaggatcgcttgagcccaggatttggaggctgcagtgagccatgattgcaccactgcacgctagcttgggtgacagagcgaaaaccctgtctcaaaaacaagcaaaaatcctgtttccctctagaagtagagctctggagtcttttgattcctagcgtggggcatggagtgctgtgggtgctgagggagtgttaattctgtccccgctgaggccctttctgatgtgtgctgctgctgtttctgtagaaatcgtggatgggaatgtgaagatgaccctgggcatgatctggaccatcatcctgcgctttgccatccaggacatctccgtggaaggtgggtttctgctttgttccatcccgccatcaccatctcgtctccctccctgggcttagcctggagaactcccatacccagggcaacggacgttgatcaggggccatgtcctgggcttcttgctcatttattgggcatcagccttctcctccagtcaatgtagaaaaaagaactgtttgccattctgattctcataggcatgttggcctcagggaaactccccactttgggaaagcccaaggctgccatggggaagtatattggaaaacccacctggctcttgggttgttaatctgaaagggtggggaaatagcggctgggaggaaggaccaggaggggcgctaaccccgtcctccactttgctcccctagcaccctctagtggccatttcacagatctgcaagggccgccatggtctggagaggtgatctctacgcttgattccacactcgggcagtttttgagctttatgtctgct

SEQ ID NO: 76362 - DNA, 1004 bp, Homo sapiens
tgatctgtcccaccttggcctcccaaagtgctgggatttcaggtgtgagccactgcgtctggcctcatcatctgtttgtcgtacttcgtcccaggcctgggccctgccctggaagagactgaggtccattgtgttctcagggggccaatggcaggcctgtgttagctctgcccattcccccacttgtggttagtgtttgttcactcattcgttcactcagcagatgctgatgggggctttgcctgtgccaggcttcatactgaactctaagcagtgatgcaaaacaggaagtattcttaccctcaaggggcttacattctagaggggaaagagagaaaatacacatgtacacctgtcagatggagaaaaccaaagcagggaggaacttgggtggtcaagggaggtgtccatgagaaggggacgtgtgagtgaaactggcaggaggcagggacaggccacgtgggtatctagggaaggggagctgcagggaggcccgagcaggggggacggggaggaggaggaggagaaggaggggaagaaggagcagggggaggagggggaacaagaggcccaggcggccagaccacgagggcctctctggccactggctttgactctcagggaggtgggaagctgtggaggttttttagcagagggtgatatggggtctggggatttacttggtcattctgtgtactgtgtacctttgcgaggtttctaagtacggggtgtgataaatagccttgcagcaagtgcattcattcaggaaccttactctgcatttcctttcattggctagggatagattcctggagataaaattatactgccaaaaagctgagcaactgtaaaatgcgtgctccttgtggccaaattatttcccagattaattgattaatttcccagaaattattattattgttttttaaaccaatttacacttctagtgtggtggccttgctgacatcaaggcgtgtggttttcaactttgggtttttttgttt

SEQ ID NO: 76363 - DNA, 1221 bp, Homo sapiens
gactagagtgcaatggcacgatcttggctcactgcaacctccacctcccaggctcaagtgattcttaatctgcttcagccttccaagtagctgggattacaggtttgtgccaccacgcctggctaatttttgtatttttagtacagatggggtttcactatgttggccaggctggtcttgaactactgacttcaaatgatccgccagcctcagcctcccaaagtgctgggattacaggcgcaagccaccacgccccgacgaaaagttcctttaaagtgagacgttctttaccttctccctgccctgaggagccagtgttttcagctgtggcttccaggagtgaaatcatccactcccatcaggctgagcaccaagattatgccacaatggccgctctgctgagccaagaaactagatgaggcagcaaatggcgttttgtgggcttttaaaagtgaaatggagtttattgatgtcgattataaaataaaaggcgatgggcagatggcatagaatgagctctcctggaaggggagcgggggaacgttgcaggttgtccatcctgggctgctgaaggctgtgactgtggagaccaggcccagcagggacacccctcaccccccaccaaagtctttgaaggattatcatgcagtgcaaggactaagacctctggctgactccgaagggcagaaccaggcccagaataggtaccctgtaggtaggtggactctgggagccttgggaaatggagccggggctctgggagggttatgagttccctgtccctgaaggtgtgcacatgaaggctggagacaaggagcttccacacataaaggggaggttagagcagatccttaaggtctcccctacgatatttggttctagaatgcatagacttcatggaattggcctgggtgagtggttggaatgtagttaaccaggggagagaactcaaaaaggattttgtattttaaggtctttgggcaggtggagcctgagggtttgggtgctgtgagcatggaggtgggctcagtgaggtagcatgtatctttaggatggagggggcggtgggtgccataccacagcattggtctgggaggtggtggcccctggggttctagtttctgtcacatggaatttctgcagcattcattctgccgtctgaatactgaacagatgacggtgtccctggagagagaaggagggagaaacatgttcccagta

SEQ ID NO: 76364 - DNA, 1111 bp, Homo sapiens
tttagagtgggcagaaaatgttctatccaggccccttcagtcctgtgaccatggatttagcaagtatttatggggcacctgctgcgtgatgtcagagacctaaagatgaacgaatctcactcattcaagacacatcgtggctgtgagaatggattgctcactctgtggcatatacttaatcctcacaacaaccctatgaggtagctctaagaattaattatcctgattttgccataagaaaacagatgcttaaagagattacgtgacttcctcaaggttccgccatcagtaagtggcaaagccagaactcaaacgcaggtcttcgtgacaccagaggaatgccctgagagtggccttcccttggagggggcaggggtcttgctcctgggaagtccataggagcagatctcttctctggttgaagcttacagtcccctctcttctagaaatggagggatatttatcaaatggagaactttaacacaggctcagcaaactgcagtgcatggggtcgagtccggctgatttggatttttggaaatattggaacacagcacaccggtgttaatgtatcatcagtggctttgtgctgcaatgacagagttgagtagttgctacagagcttatatggatcatagagccagaaacatttcttatcaggccctctacagaaaaagtttgctcacctctgccttatctggaattcaggccagtgcccaaggtggtcacgcaaggtgccttatggattccagcatctcccccaccagctgtgagcttctcaaaggcagaaaccttggtttctacatcctgtggccccagttcctagcagcatgatgcacacagtaggtgctcaatacatgttaaaaggatttacatatagcagtataatctgctttgtgatgaggaagatgttctctgccttataataagaaaagaacagtttgctttattagggagcaattcaagacttggcagaaaaagttataactaagcaggcgtgggaagccaaagaaagtcacccaggtggttagtgcaggctcggatgcccctggggcagggaagtgtagagaatttgtgaagtggttcaggggtcagtggcaggggtgggtag

SEQ ID NO: 76365 - DNA, 1030 bp, Homo sapiens
tggctgcaaagactcagacctttcctgaccactcctcagttcctccttcctcttcctcctcctcttttgaagagcatggatctttctttgtatttgttcattgtatatatttatttgtgtttctctatttaaggtctgtctctcctactggactgtaattacataaaggcaagaaactgttttgttcacccccctattcctagcacccagccaaatccctggcatgcggtaggggctcgataaataaatgttgagtggatgcaagcagatttcgacctgagaagcagaagaaagaagaggcagggtagattctccctctcattccctgccagggtgacattctccagcccctgagcagcgtgtgagcacacacacacgtgcacacatgcacatgcttctgcctagctaagctgtgctttggatgagggtgtagtggtagtagctctggcccctggctcatagcgtctcaccttcctcttcctccctcttgatccaaacaggtgaacgcttggccaagccagagcgaggcaagatgagagtgcacaagatctccaacgtcaacaaggccctggatttcatagccagcaaaggcgtcaaactggtgtccatcggagccgaaggtaaggcctacctctggtggccccaaggagcctgattttctttgtccccctggttctcttggccttttttgtgctgcctcctgggcccatgcatcacttgggggcattgggcagtgggtccccagcacctccatctggtcgcctgtggaggctttgtattgcaacagcgcttttcttctagtctcagccctgcccaaaaccaaggacttagacccctgttcccatgcctgcacctgcttagccacgtccttgctctgtggagtcctgtgtgtgtggcatgccacctcccccatccagaggcctgactgcacggtgttgcctggagcagaggatttgtgtatgggctggaaagggtgtgcagacacaggctggtggaggctggaggctgccccgagactccccggggccct

SEQ ID NO: 76366 - DNA, 1086 bp, Homo sapiens
ttagctggctgccaagtgagaaaggatttaatatactaatttaccctaaggtatcaacagggcttaatatgttccttcggggttactctgtcttaaaactgtgaagattgaaactaagtcttataacttaagaggtaacttgtaagaatggaattgtggcattttcaaatgtgggtgggcatgagtctttgagagagggctgggaggcggatgttaagggaatttgctgcttcatgtatcctgcttgctcccacccatgtagcaggctctgtgtagggtccctcagctgctgccctgtgggtagctcagtgcttggttgatgcagtgaatgagaccatggtggggcaactgtgttgagaggctctgctgagtaggtgtccacctcccaccccctggcaccattaaatggcttgtccaatgagggtgacaacaccagccccctgaccacttgcccttcttgtctctgcccagacattcacggcatggtgtaactcccacctccggaaggcggggacacagatcgagaacatcgaagaggacttccgggatggcctgaagctcatgctgctgctggaggtcatctcaggtgaggcggaacctggcccaggacgagatactgtctattggtgctgcctgacaccttggcatctgctctgcctatgagcgcagctggttttggtctcttgaaacaagttggggatgacatgtatgaattcatcctaggagcgtgggtctgagttctggttctgctgccagccatccaggtgccttggacatttgtttcagcatccttgtttgttttaaaaaaaaaaaaaaaaaaaaaaagggtttgaaggaactgaggttccttctcctccccagtgccaggattctgtggccaagaatgttaaccatgggtgactgtctccaaatcttggctccattactacttatctacctgtatccaggtgacccaggccattccccagcccctggtttgtccagatgtctggagggacagctctactggaacacacatctcatcctgcttatgaatgcctttctgccaccatcccttaaggggtgggagtcctgtgagtctagcct

SEQ ID NO: 76367 - DNA, 1008 bp, Homo sapiens
taatcttccctgaaactttctgtccttcattctaagaatagtagctcccatttttggagcctgtgtgtgggtgattctgcttagcattttccacgtgctactgcaacgatcttccccaccctgtgaggtggttctattaccatccccattttacagatgtggagatggaggcttggagaagtcaagtcacatgcacaaggtcactcagtggatccaggtccatcttgccgtagaatccacattcctcaccattcctcaccactggcctattctgcctggtctgtacccagcaagtttactcactcattcatggaaggatctttagatatttgcagtgaatccctcagccatctcatctctcctcctggtcatagagccccagttcccaaagttcccctcaaagggctgtctggtctgcttaccatctgtaatgatctctcttgcctcttgacaacacctgtctgtccctgggctctgcctctgtctgccaggctgccccagaggggctgcccatcttctgccaactctgctgatgttccatcaactcagactctctgtgccaatgctggctgcggtcccctggatttcatctggttggtgttttcacttcacagtgacccattttcagtgataccctatgagattcagcttacctgtttgaccattgagaatctcagccttggttctgctgttcccttccagcacccacccatgcctgcacctgaaatccacgtcattcgggtggagcagaaagtgtgaggggctggaggagtcaggaggttgagttgtgaatataatccagccgtgtggactggggaaagcctctcaccctctcttttttgtgtccttagtcgtaaagtcaaggtttgacttggatggtgcctaacacctcttctagctctaacattcttttatgaggtgtgttaacagcataaacttataataattatacccccaattgtggtggcaatagtaacaatagataattattgcagttgctataatttt

SEQ ID NO: 76368 - DNA, 1042 bp, Homo sapiens
tgccctgtggctctcctccccagtccactgggctcagggactgcctgggcacagctgagtgggtgcccgtgtggcttgagactgagcagggactggtgcaggctggtgggcagagctggatgagtccccatcattccccagcctgaacggagtctgaaggctggcctggaagagtttagcctcccagcagagtggagcaggctcaggctttgaccgacctagttcacacctcagttctgcctcttgccagctgtgtgactgtggggaactggcccttggtgtcctgttcctttgttcctttaacctagaattgttgagtggacttgctgagatggcgcatgcctcgtgggtgatgataacagtgagtgagcactcactgagggttataatggtagccaacatctttgagcaaccctaggatatgattccctctccttccctcacctccccttggggctccctgaagtccacgttgccatcagtgtccccatcttgaaactgaggatggaacgctgatctttcctttcaaggttggggggagggggctggggagccgaaagcaccccagggctgcccttgctgcagtgtctgaagtgaagcctaggagccccggtgctggtgggcaacagcaggcgtggatctctctgatctttgaagaggactgtgaatacactgaccacaggcggaagccccttgtcccgtcctgccctgcactacccagaggtccctgggcttctcagcagaggtggacagatctgcttgcagctgcccttcttcccacgcttctggaaatggaagttcccacagacacattcctgttcctcagcttgctgctccctgcttgctgataccttgccgccctgtccctcaaaccgggctggccataccaaggtgttggcgagctgctcagcctgctgagctgttgacaccccagaccaccgccggcctagtggacaggccaggaaggcagtgatggcactgggtcacattgtcctgggcctgggtgagggtttctgtgctgctttttaatgtgctgatctgt

SEQ ID NO: 76369 - DNA, 2538 bp, Homo sapiens
tcaagccattctcctgcctcagcctcccaagtagctgggattacaggcgctcgccaccatgcccggctaatttttgtatttttagtagagacgggggttccaccatgttggtcaggctggtcttggactcctgacctcaggtgatccacccaccttggccttccaaagtgctgggattataggcgtgagcccaccgcacccagccagaaaaccctacttcttaataagcttgttgtgaagagtaaatggggtcattgttataaagtgcgtaggtaagtgtcagtgaatgtcagcttttgtcaccgttgtgcctctgctaagtggaagggcctgggggggactccctgcagaaggccaacttcctaggacctctgtgtgctttctgtccatccaagccctactcccctgggagaggctgcgtgtgaggttgtctggttgggtggcagcagcttcccctgcagaaggaaactgcttcctccccagggagatgggagttgctaaactctggcttgggccggctgtgtgctctaagcagggattatgtgcgtgtgtgatgagggcggtgccttgggcttcattccagatacaccgtgttctctgacctcgcactcccttccttggagcccctcactccagcaccaggcattgtggctcagaactcccactgctccggattgctatttgacagtttcataggtgggtcctacttccctttttagatgataggctccaggacctccatattcctcatatttggggacagaaaataagagcttctctttccatgcagtaggatgcccctttctcctgtgggatgattgggaccggcctgtccaggcttgggggagggaataggaacgggaaccctgcttggagctgcattctgtgttcggcccctccctgcagaagacttcaccttgcagagactgcagagtgttagggagaacccagctttggagccagcagcactggtgtggaggcaagctctgctgtctgacttgctgtgtccttgagctggtccttattctgagcctcagtttcttcctctgtaaaaagacaatctgtcttgcagagttgttgccgagactaaatgagatgatggatgtaaaccacccaagctggcatcccatacctggtaggctccctaagtgtgttgttattttgtgtgtggatgggccaaggggtgcttttagcgaaccattcttctccacacagaggtgtggtgagacagacttcctatatacatttctgtagcccagagttgcccaaacttgcctgattataggattcacatggagtacttgttacttgttaaaataccaatctgtgagtcccatcccagaactcctgaaccagaatggtggttgttggggtgaggggtctctacttttaaccttttttataatcgggccagtctgggaaatgccgtttccctcagattgctctgccagttgctgtgtcattccatcttcacgggggcccattggaatgagacaagtatggccccttggaaagtgggagactttgcaggtgagactgaagcttgaaggggctggcctgaggccctgagctccttgtggtggaagcagatttagaactgagatctcccagtgatgtgtgtccattgtgcctgcaaacattccactaaagcatggaaaaggtgaaggtggggatggagagagatggagtgacaggaaggaggtgagggctgagggcctccatgatggccttgggaacctgcagagactaagtgggggatggatggtgggacagagccctgagccccactaggatgcttccccaggtgtgccttctgaaaaccagggccccagtgagcatgtggggccttgggcttcttagaaccactgggaatccacaggtgtcagagcgtaggcgcggtcttaggcagcatggacccagcgggaggggctgggactcctcctcagggctgctggtggagtcctggaagtcctgtgggtaggacttctgccacttctcccctcttcctctgccttttttattgggctgggaagttttctagaagcacaggcagggctggctcccttgttcagatagggaagttgaggaataggtatttccagggtcagctgatgatgccaggaactggggtcccactgccttgtctgcttcctccttctcaaagttggcctggtccattagagaaaaccccttttaggtccttactatgtcatcctttccagtttacccttaagaggcccttaaggaggatttcaacctctgctgggccccacccccagagggtgacttgattggtggtggtgaggtgggctggtgggctggtgggctgtgagcggaggggccctgttacggacagttgtgagagtgtggccggggcacggtgacctgctgccaggccctggggagagtcacgctgactgagcctgtggttgaaagtgtgtgactgccaccgcgggtggaattctggctcctgcatctactgttcgctgtgaccttgagtggctgtgagctcttggcctcggttttctcatctgtaaa

SEQ ID NO: 76370 - DNA, 1964 bp, Homo sapiens
tttgccaggctgaagctgtattctttgtgccccagaactccctgccgttggccgcctgtcacttcgacctgtctgcagcccgcagggtcccgggtgggtcattgctgctgcggagtccaagctggggcctgtcagaagctgcccagggctggcctccagcaggcctccctctggcgatcccaggattgagaagttgagtcaatccctaggatgtctagactaccagcgctggaaggtcccacagaaaccagagccagccccctctgtcagataaagaaactgaggcccggaaagctggagactgaaccagacctccctcagctctcagcttggctcactgctcttttgccagcttcatgtggcttcccttttggctactgtttgttttgctcttccatgctctactcccttaaagggccggccctggggacagggagtagggtgaaagatcttcagacccaatgggaagttcacaaggctgcgcttgttcactgctgtttgccagcattagtatagtacctggcacagggtaagagtttagaaaatcttgaatgaatgaacgaacgaatgaatgagtgaatgaatgatggggttacttggcctgagggtggggacactggtgctgcacttagagccattacttctgggaggggtaccaggcacgagtctccacacccaaagctctccctgttccaagaccacgtccagtcttctccaggccttcctcagtcccagcccatcacccggcttttacaggagcctggagtttcagagctgaaaggggccttggatatcaaatgttgcatcaccttcacgttagagttggggaaacggagtcaagggcacacagctagtcagcgggaacgtcaggaccagagcccaagtctgtggggttgcagagcttccatgcatccctccttgggcatttatgttgggagttgaggttagaaagagaaggccctgtcttgtccattgtgcctccccttttctgtatcttcctctgtgggatgagctgtttcctctttctctccctcctcactctggcttcctctcctgtagtggaggacggtggggtggtttctccataacagtctgagtaaaaaggctgggcccctgggattgggccaagtcattcccttgtgtcttcctagaaagggaaaaagagagtcggctggctcacttccttccggggaaaccagcgcctgagtcaccctggagtcagggcccagggaggagcctgcccgtcaccccgttgcctctggccatgggtggcgcttccctgccactgtttctcaaagggcggggggccagggaaggcctgtgctatccagctgccctgccgttcgtctgccttcgtcgcttcttgggagagtttcttggccttctgcaggcaggctggtgctggtggcaaggagggcaggcaggtgataacattgcccccctctaactggaggtcttaaacaccctcctgaatcacaatttgaaatgtttttgatttacaagtcttcaatatctgttttgttttatgataaaagtttgacatgcttagggccggacgtggtggctcatgcctgtaatcccagcactttgggaggccaaggcagccagatcacaaggtcagtagatccagaccatcctggctaacacagtgaaaccatgtctctactaaaaatacaaaaaattagccaggcgtggtggcgggtgcttgtagtcccagctacttgggaggctgaggcaggagaatggtgtgaaccagggaggcggagcttgcagtgagccgagatcataccactgcattccagactgggcgacagagtgagactccgtctcaaaaaaaaaaaaaagtttgacatgcttgtggtaaaataaaaaacaactccccacaggtaacactgttatttttctataccacagattttatatgtttgatttatatatatatatatacacacacgcatatatat

SEQ ID NO: 76371 - DNA, 1094 bp, Homo sapiens
atcttggtttggggatgtttccttggggcagagaagggggaagccactggaatgtctcagctgctgtttgtgttgtttgggtgaagagctccctgttgggatctcgtgatgcctccagcttgtggccatgtggatgggctgggattgatttgttctgtctggtttgttagacactctacccgctttgtctctccccacccagaaaaccacaatgaactctaaaggctggtccaactaagattcatggtaactgggagagagagagagagggacttgaggagacaagagtgacttgtgctttggtctgtgaaggagaggttcctttgcgatgaggattggaggtgggtcatgcaatgaggggcctcctgcctaagctgtattcagtgatcattcgctgcaggtgaccacaacttccttgtagatattctagctcccctgggtatgtccaccctctgctacccaagtggagaggttcactccaaggctatattccttataggatggcccgtggaccacctaggtttgtgtaaaactgtagcttcctgggccttttccagacctcctgaaccaaatgctctgttagagcccagaaatctgcatttccagcaagcgccctacttaatttttagataaagctagataaccctatgaaggattatctggaggaatattattgcttcagtctgaatggaaagagtttagctaaatgaactcaattcctttacattttttccccctttaatgtttttcactttttatgaaaatggagacagggtctcaccatgttgcccaggtgggtctcaaactcctggacttaagcgatccccctccctctgcttcccagagtgctaggaatacagaagtaacccactgtgcagcctctttttttttgtttttgagacagggtcttcatcgttctgtaacccaggctggagtacagtggcatgatcatagctcacgacagccttggacccctggtctcaagcagtcttcctgcttcagactcttcagtagctgggactatagtgtgtgcgccactgtgcctggctccagctgcttcactcttatttactcttcctccaggaccttcttaa

SEQ ID NO: 76372 - DNA, 1108 bp, Homo sapiens
agacagcagtagctgtcctccttcttctcctcctcctcagcctactcaatgtggagacaaccaggatgaaaactttcatgatgatccacttccacttactgaatagcaaatatagtttctcttccttatgattttcttaataacatttttttctgtagcttaccttattttaagaatgcagtatgtaacatacaacatggatgtcgatgtgtttttaatcaaatgtttatgttataggtaaggcttatagtcaacactgggctacaacagttaagtttttggggagtcagttatatgtggattttctactgcatagtgggagtgtgagggtcgttgcctcttacccacatgttctggggactcaactgtaggattattagaaatagtaactatcctgatggaaggtttgtaccctttgaccaacatttccccatttcgttcaacccccctggctctagtaaccaccattctactctctgcttctatgagtttgatttttttagattccatgtacaagttagattatgcagtatttgctatgtcttgcttatttcgcctagcctaatattaaaagaggttagtttttgtaagtcaaccctgaccctggttctgagcttcctggcagccgaagcaaaaagagaacttggaagtatcaagtgtttatttcttagtaaaagaaagtataccagttcacgagaaaggggcactttttgtaagcactaaaagctgagttttaccattttaggagagtggtgcagtaaacagtgctgtcagtattagtttcatggaacacacagaaactttttgtatacttgtttcttaaatcagctcccattgaaagccacaggtatggtgttaaatcacacttgtaggaaggcatttctgtggggagctgaggcaatgaactcgagctccactgtttccagaggtttaacctcagagaggcacaagtcctttgagatactcttgagcacttcttggagactctgtcgtggcagttgtttgacaggagctggagagcaggctgtgtggactcctggctctgagttcagaggttttctgaggtcttcacagaaaagagagctaataggttggtgcaaaagtaatc

SEQ ID NO: 76373 - DNA, 1073 bp, Homo sapiens
ctgatctggtgctggagggatgaggagcaactagtttgcccaccaagtcctaggcatctgaggccagccagggtcatggctcctgcctcctccttctgtgcccctccccagatgcccagttgtgagggagtgatcagaacatgtcgggggtattgcaagaatctcaaacagctgtgacttgagtgtacaagccatttttatccaagaccctgtgaaatccatggcaccacccactgggggctggtccctcaggatccacatagggcctatagcccacccccgtgcccccgcgccctgtgccccgtgtggcggcctgtgagatgcatcagaacacccaggggaacactgcgtttctagcctctgcttgccttacttgcttcacccacatgggcctctgtttccatttgagaagatagataagttaggggagaaaaatgaccatcttagaccctttctcctaaacataaccatttatattttcagaaacctatttttatttttaatcttcatgcctgcattattctgatagcggtaatcatagtgtacataaaaattagctctgcttttttatttccccacttggcattttatcaaaaacactttttcttatatagttacacagcctttatgttccttgcctggagaaagtgagatccaagtatagagattgtttcataaatacatgtttatttgtactttcctgcctctttccaaaaagcatttgaggtggatatattaaaagtctcgtgtataacagggttttttgttatttcgttttagagacagggtctcactctgttacccaggctggcgtgcagtggtgctgtcatagctcactgcagcctcaaacttttgggctcaagggatcctcccacctaagcctcctctgagtagctgggactacaggtgcatgccaccatgcctggctaatttttacattcttttgtagggtcttgctatgttgatcaggctggtttcgaactcctggtctcaagaagtcatctgacctcggccttccaaagtgccaggattaccaatgtgagccaccacacccccttccttcagaagttttt

SEQ ID NO: 76374 - DNA, 1432 bp, Homo sapiens
gtggatcatctttttttaaagttgacatttcaaacataagaaaaagcattgagaatcataaaatgaatatctacctgcttgccacccagacttaacaaacataaagcagacattctttccagatgagggacagatgcatggtctctgtctctaaggaggcctgtgagtgagagacccagggacgggcaatttccttgtcatatacaaagatatcacatctggtatagagaatggagttccaaggaaggctccagcccatcctggaggagacaggtaggacttcctggaggaggtgatcatgtgagctaaaaatcaaatctggaatatgtgagtcaggccaagcgggtgcgggggcagggtcaaggggaggtgggcctgcaaagggtgtaaccaaaggtaagaaaaagggagtgcaaagttctggggagggaggggcaggaggtgagtgaggagtgggctgggtgcagctggagtgaaagatatttgggagtgggcaacagtgaggactggtgaatcagtgagggacaagctctgggcatctttagggcagtagcaggcaccaggcttgtcctgagacctgctcagtgcgtggctgcctgaattagactccacacattgagaggattatagaccaatataatcccatgcaaagaaacccacacagcgggtgcggaagggcagaaactgtatcaggactatttgattgacctgggctgcttagagcaggctccaggctgtcatttgaaagaggggatgtgttgggttgacccaatggggagaagtaggacttggtgagagttgtgtggacatggaatctggctcagaatagaatttctaacagccttccaaagaagggatgcatggttgggcgagagtttcatggtcttaaatgtgttgaagtagtctcaggttggaagcaggcagggctggggtgtggagggaggagggctctgcattgcctggccttcaaggcctctccttactctgagttctgagatttaggctggggagggtgggtaagtgacctgtgggcacaggcaaatggtgctcctgggaaggcggctgtggaggaggtgctggcccgttgccatgggaaccatcactgccgtgggtttccagttccaaggatgccctggaagggaatgagctcactccacctgcgagctggtgagtcagccctgcctctcctgcttgctcgccaaggctaggcgggaatttgagcagtggaccctgcctctaccccctcctcagaccacccaggcgcccgtgccctggatgtgggctcttgtcgtaaaagatgcagggcaataaaggcagctgccagccattctggcatcagtggggatcctgactcggggaagctgctagcctagttggctaaaccttggctgtgttgcagagggtgagccattctctctgccggccactcagc

SEQ ID NO: 76375 - DNA, 1052 bp, Homo sapiens
tgcccagttagtacctgggctaggagagtcagaaaggacagatatgtggcagcctgcctgccttcattacactttcttggggcactgttgtgaaactcctctctaaagacatttagaggattctcaggggatgtcactgatctgtaactgatctgaggctccttggatgatcaaaggtggatttgtggagtctcctggggtccccctagtaatggactttcaggagctccctgatgagctcatcccagcaccccaaagagcaggtaagcacgaatcaagcttgcacatactaggtattcaccgagtatccagtgttgatgaacagtggtggtgagggcctttggacaggagtgtggcagctgtagtcctgcaggagacaactgacagatgctgagggcctgggtggtggtagtctgagtcaccaaggaccaccccagagatgaggttgattgctgggaccagggcagaggcccagttggctcctcaggactaagaggtgtgtcctggaatcagaaggaggacaggggccagggaagctggccttgtcattgggatggggtcatagcctaggatgacctcagcccctgccatgctgctcagcgcccctctctgagctggtgcgtccaatggtaggctggttggaactggcacagacctcccagctccctaccagccagcctagctgcgttttttctttggctaacagcccatcagattccaaggtgctggccatactgacatgtccctcttcatcctgccccttcctctctggagggtggggttattgcatttggctgagccctgcttcagaaaatcacagggaatttctggtccttttgtgtgggtttgtggaccttaaaggaagtaaaacctgggtcttggttttccttctccttccagtccctctgctgagggttctctctggagtgttggacgtcagcagcccactgtctttagccacagtatcccgaggggtgtggatctagataactgtggggcctcagcaaagctttcacctgcctcctgctccctttctgttgggactttgggag

SEQ ID NO: 76376 - DNA, 1915 bp, Homo sapiens
cccctgaacctggaggcctccccagtcccacgttcctggtggcctcttctggtgctgaccccagcttttgggagctagcttcccctgctttaagattcagcagcaccctccccttctctcttgttttggttccttcagtttcacctgttctgtctgtccttccctttgtttagagagtctcttcctttgtggtcaccacgggaaccaaacaggctttgaaccaggcagccgaggctcaggtttattttgattttaaaagcctgtgcacgtgaaacccgtaacgtttgaggttcttgtttaagccttgagacgatttagaaagttgatgagggagtgggggacttaggttggcttttggtgttacagggctggggagtttttgtgccaggtcagagatcagcaccaagtggggggcagtgccatttcctgacccccagctttgaaccttccaggcctaaatcagaggccccaaatgttcagctccaggccaaagagcagtcggctgggggaagggagcctcctctctgttaccttgtttttcctgtttcttggtggtgggtgatcgtggggctgttgaaagcatggtcacaaggcctgtgatttgaggccaggccagggcttgtaggggagcatttttatgggcctgaagatttattttttaaaagccatctgcaaagctgattataattgatgggagtgagacagcatctgagctctattttcaaatcatctgtaggtgaaatgacgggaggggaggcaacttcaaggtgggtgggctccttcaggccggtcccctaatggaacttggctttccaggctggaagaggcaccaagccttgcatgtgggtgggaggggttcttaaaatcagactctatcttttctccttatgtctgatgtggagatgtccaacgcataacagcctgtagtttggggatagagaagtggagcttttaattcttctgagtcaagtctcgacacccccaatatggggtcttggtccaggaaaaagagggcagcctccaccgaggtcctctgtcttaacacttgtgtctgtcgggtctgtgagcaggggtgcctgtctgtcagcgtttggctgcatgtgtctctctggctccaagaagcccctctgttgtttttggccacctccttgaccttggcagaggagtggctcccttttaaactccgcagacatcctccagataatagataatggcgctttccagtcgagttcccgatattttgtaagggcctttctttccaggaacccaaagtgcttttccagacttggccctgggagctgggagatgcaggaggtggcttatgaattgtgttttcctggaggcagggaaatggggccagacccctggtttcctgtccttcatctcggatactggtggctggggctgcatggaggtgtttttgcatgcatgaagtcctgaggcctcttattagaaatctgcatattttcccaactttagctccaaatgaagttttgctttgtagctttctttttctcttcttctttttcctctttctctcttttcttatatttagaggttcattgtgtatagtttctttaaggaatgccacattggggtctcagttatatagtgggcccgtgtgccaccccctcactgagtctgcttggcatgggcaaggaggccacagtagcacccaaaggtgcctggctggggggcctgtacctgatgccttttccccagaagccactggttcggaagcaagctcagcataggcccacattgctggccctgggactgttctgggaatatggagctgagcatccctgcgtcccgctgccctgcccccagcagcagccagccctggtactgtgctttgggccaggcacatgtctaagtgctttgcagctattaatgtaatcctcacaatacccat

SEQ ID NO: 76377 - DNA, 1571 bp, Homo sapiens
gctcccccttctctgcctctcctgctttccctcctttcatgtcgtaccagggggttatctggcgggcaagtctggttatctgggcatggtgagtctggtctagtgatgggcaggccccaaagctgtgtgtggcaacgttcatgaccccaactggccccttccgcatgcaccattctgccataaagttaacaagattccttttctcataataattatagtggctcgccctttttgagcacatggtaattatcagcaattgtcctaaggactctacatgcatgagcacatctaaccctgtgagatgggtcctcctgttatcccattttgcagatgagagagctggctcggagcagctgcggaactcctccaggcccacgcagccagcaaatggtggagctgggatctgaagccaggcagtcgggctccagcatttgcactccttctcaactttgctctgccgcttatacaacaaatgcttgcgtgggtagaacatttaacccaagacaaacatatacaaacaaaaccccggtgatggaaatgttctggaattggatagtagtggtggtttcacaacctcacaaatatacgtgaaaccactagattgtacattttaaaatggtgactttatggcatggaattttatctcaatttttaaaaacctaagaaattattaactaatataaagaagaaaatgacaattgcctgtcatcccacctcccagaggtaaacaagcattcacaggatttctgatggcttctgccatccttgtccctcttcccctgtttgtgtgtccccttctctgtcatgcccactttttagagctggggtccaggtttatgatgagtgagaggagtttagaagaggaagataagggcgggagcttttgtagaaagcgggatgaaggatgtggctctttccttggaaactgaccaggaatagatcatagatatgcacaggcaaacagaagactgggtgggttggggagagggtggccttcattttccaagtctcagtccttggggaaaatttctccctaacctctgtctataaaccctcttggcctgggattgcttctctccgtgtgctctccccagggttggcagggtgggagtccaagtgaggcagctttccttagggttgtaggcaggggaaggggagggcagggccagggtgccccccaaaggaggcagctgtaccactcttggaggttgcctagcaatcgtggggaaaggtgacctagcccactacagaagcgggaggagaataaaaggcagccaaagatggaaatcgggcgtacattgcagaggaggctgttcccctggaaactgcctccttggtccttggctacagcaggctacttctggggtggggatctgttctccattaagagggagtggggtcttccctaggcctgccacccacaggtcagggctgggggacctagggaaacccttcttgcacatggagtgtatgtcagatgcgtttgtcagtggcttcatttaacgttgacaacagccttgtaagatatgtgggatgatgacacttcatagatgaagatcctgagtttagag

SEQ ID NO: 76378 - DNA, 3351 bp, Homo sapiens
ccagccccgacccgctctgcctgccgggctctcggctccgggctctgaaccggttccgggcgcgcacgggagggggcgggggcggtgcggccgttgcgaggtggggtgttgggttacaggcgcctggcggaagcgggagcgcccctgccccggagcccgggaacgccgggccggagcgcggggaggtggcgccgctggcgggcaggtctccttgggggtccgtggtccaggccaccctgcggctgttgcaaccatccccgcgtgggctgtgctcgggggcggtggtcttcaggctggggctgagaccccggctcggggctgcttgctccggatcgattttcccttttcttccgcccctggccacctctccatatggcgtgcggtggcagcgccgcttcctgggccgccctgggttcaacctgagcggcgggcctcccgggaccctgctgccccttaggcggaggggagagcgccggagagatcggcggccgcctccggatctgcctggagaaggaccagctggagtgcggctggggacgagaaaactggggggcgtacgcgggctcccccgcgggccctgtgggggcggggtcaggacagcagaccgttttattgcttaactcagtgggttggaagctgtaaccccgacatgggcttgcgctacgtcctgcccctccgacccccgggaaaggtgggcagctcggttcgagttgaggggctgcagaacgagggtcagtcttaggggatatttggggccagtcactggggatccctacttagccacggagctgcatcccaggcaggcgcggtgtgccgggtgcgcgccccgccacgggagctgggctcggagctggcgatgggacccgggcacagtggccagtggcaggaagaggtcagaaaccactcgtggtggtggggggagggcgcctcaaccctaccgctgcttcctgcctgcgcggtgagcctgtgcccccaggcggccacgtaccctgaatacccctttccctccccctcctcccggctgcccacttccatccggtccctccccgtttcataccctccccacccccaggctgatctgggaatggggttttgggtgggggggggacaggatggcgcgtccctttggatagtgcggttagggctgggcttgagggagaacgctcatgtccaaaaatggtaacattcattcccttttttaaacttaaaaggggggtagtttatagagccgactgaagttttttttttcagccaaaggcatcctgtattagctcactcaggaatcctaggccctgaaacggagcccttttactcacttcatcagacaggcagaggtaatctaaaacacacacaatgggcttcctcaaagcaggatgacctgggccgcggtgcccaaggcctatgcagggctgggccctatacagcgacatcggtcatctacatcggacatgggaaggtcccctgacttcgaactgacttctttgtaatgtgccagttgcttaaactccccctcttcctgtcatcttcctagtaagagctgaagactgggggctgcagacagtcccccactcacttggcttatttcctgggaccatgggtgctgtgggtggaactgaaaagtgagtgagtaatttggagatccctatggggcaccaggcagaaggctctttaataatttcagggtgaagccttcttgagaatggattttaaattagaagtgagattagggtggtggattggggtcttccctgggggttagaatcgaaggagaaatccctgcttagggagcacctgctttgtgcctgggaggggcaggagtaacagagctgcctaggaactaggcccctgaaaggactgtgagaccaagttcctaggggacagacactgagcaccggcctgaacatcgtatttaatatttctgaatgaatgaatatattaaacgcagtggggagaagaatatagattcccagggctctgacctgggtggcagtgggtgtgccccaggcctttgggcagccaggtaggaagaggtggtctgggaaactgggttatcctggaggcaaactcaacagtgccaagaactggcatttgctgatatgtgccaggcacgaacaaggactaggaaaccagggccagagaggggaagtaaccagctccaagtccagactgtgtttggtggggctgggatgcagccatgtttgggactggcagcttcccctcacttgtccctccttggcaagggaggcaggaaagctgggcctcgcagccagagccagagcatctgggaaccaggagagccgacacgtgctttgggcggggttgatggaggggccatggcagaaggagctctgggcctgactctgaagattcagatccacattttttgtttgtttgtttcctgttaattctctagattatctttcgtgggcctcagtctgcagaatttctggcctgcctagttctcagtagggtgatattaaggaggtggtattacaggtgagggataagacgtaaggtaaacgtgttgcttttgacactctttctactgactgggaggcggggtttgtgtgggaccagagtccacaagtggacagaggctgatggttccagagggaggcaggggagtgagtgtgaggaggggaagaggaggacacagtgtagagggatacaaaggtcacccggtagaaggcagaagaccctctttttagctttggtgcagccatagctatttctgagactttgggcaagtctttccatttcatcgagcttttattaggtcattcagcaaatactttgtgagcactcattctgggtcagacacagttccaggtattagggatggggcactgagcaagacagaccaagttcccgttcttgtggcatttccattaggtttcctcctctgtaaatgggacacatttctgcccgtggagccctcaggactcttctggggaatcaggttaaatgatgcattgagaagtgcttccttggtgaaagtatggcctgatgtggaggcagggagaagtctgtgcaggcaggaggcatgactcaagaagctgcactggcttggccgaggcttgtccctctttcaaagaatgcttcggtacggagttcatgggctggtcgccatgcctccagacacaaaatgcagttatcttccagacagagcacgtggattagaggcatttcctctacttttccaggtttcataaccttcctgatctttgaggctgggctctgaagtcacttttcctaggagttgctgttattttcagggtgactgcagcccccagttttctcccttatgtaatttcgctcacattcttaggtgtatgtgtgtacccagtcaag

SEQ ID NO: 76379 - DNA, 1078 bp, Homo sapiens
ttggctcccatgatcgatcgaggcatagtgaaagaagggcaaagacagctttccagagctttgtgctcaggctactaaagtagttgttataggtgtgttaacgaagaagcttagtgaggagcagaatgtggtactatattcatttaactcaacccagaaccattggtcagaattggtgggactggcatcttccctcagacttgcagttgatagaggctgtggtgttctcactagactttgcagagcagtaggcatctcaaggtaacagattcttattgagtaggtctattaggagtcagaaggtgttggggaggagtctctggcttatgactcctggttcccattagtcttaagtcttctggttcccataaaagactcagttttattgaggtagatacaggtttagaagagaaaagagcaacagattttcagcgttgcagtcactcggttatctatgaagggttgtgcaaaacaggaaggtctgggaatgaccagatatcttgttggcataaatgttatgaaaaggcagaatactggcaagaaatgaggaagagagagaaaaacaatataactttcttgagtgcaaaggtgctagacaactaggagcccagctgggattggtgtagggagggccgaacgctgactagtgtggcctcactgccccaggcttcctttcagaggaaggcctgtcctgctggaactggagccaaggggaggctgcctatgaaggcagaagatgtggatgaattcaggcactgggggtgggggggttatttataaacacaaggtggttggtttaagccaaaaggagataccatcctgataagctctgtgaaagagaagatgtgcctggtgtgtgtaatgcggctggggtatgaaaacactgagaaggagatgaaggagtgtgtgtagcatgggggtgtgtacaacttaacacctggacttttactgggggagtgggaaagtgattctgtaaccaacattagaattactttggatttgtaatcagattggttctatgatttgtctttgactattcacagataattgtaaatgctggttttataagcccaagtca

SEQ ID NO: 76380 - DNA, 1050 bp, Homo sapiens
ttcatttgggaaaagtggtacctctctgtgcacagcttcagtcttctgaaagtctttaacaccttgggaaatcttcaagtcatcctctattctccaggattattattataatgtccaactactaatagatgaaactaaaagggaggaagattctggtggagaaagtatgtgattaccctgggccaagagacaggacttaggtaggtctcttgacactaggctaatactgtgttctagaccatgcatttccccacatctgattctaaaaacctcagttttcatacataacccacatgatccagtctggtaaagaacttatttttaagttggttagcaagtcctagttaaattacagggagagtctggggaagttctgccttggtgttctttatcaccaccagtgaaagaatactttccagttactccttgttgcttttgtttttcattttctgttcagatctggagcccatacaagcagccaggatgtactggagacctcgacggtcggattgaggacgattcccgctgcctctatacccatgaagagtacatcagccttgtgctgaacagtgggagtggcctgtcgcatgactacgccaaccagtcggtccaggaagacccccggatgatggccttctttgactcactggtacgccgagagatcgagggctggagctctgactcagacagtgacctcagtgagagtactatcctccaactgcacgctggggtcagcgagcgctcaggctacactgactcagagtcttcggcctcattgcctcgctccccgcctcccacagtagatgagtctgccgacaacgccttccacctggggcccctgcgggtcaccaccacaaacacagtagcctcaactccaccaacacccacgtgtgaggatgcagcctctcgccagcagcgtctgtctgctctgcggcgctaccaagacaaacgcctcctggccctttccaatgagtccgattctgaggagaatgtctgtgaggtggaactagacacagatctctttccccggccacggtcacccagccccga

SEQ ID NO: 76381 - DNA, 1071 bp, Homo sapiens
tttctgagatgactgtttatagcttttagagtttcaaaaaggtccaggattcaaaaagagttataaatggctgatttaataaagttatattccggaactgagtagctgtactgtctggccccgtggtctagacactgcttggacaggatgtctcacctgctgatgaaactcctacgcaagaagatcaagaagtggaacctcaaactgcggcagtggaacctaaagttgcagggggcctcaaatctgaccctgtccgaaactcaaaatacagatgtgtctgaagaaacaacgggaggtggaaaggttaaaaaatcaaaacattctatgaatgtgggcttatcagatgctcaaaatggagatgtgtctcaagaagcagtggaaaatataaaagttaaaaaatctccccagaaatccaccgtattaaccaatggagaagcagcaatgcagtctcctaattcagaatcaaaaaagaagagaaaaatggtgaatgatgctgagtctgatacaaaaaaagcaaaaactgaaaacaaaggggaatctgaagaagaaagtgccaagtctcctaaagaaacagaaaataatgttgagaagccagatgatgaagatgacagtgagatgcccagcctgcccctgggactgacaggagcttttgaggatacttcatttgcttcttatgtaatcttgtcaatgaaaacactctgaaggcaataaaagaaatgggttttacaaacgtgactgaaattcagcataaaagtatcagaccacctctggaaggcagggatcttcttgcagctacaaaaaccgtcagtggtaaaaccccagcttttctcatcctgcagctgaactcattgttaagttaaatttcatgcccaggaatggaacaggggtccttattctctcacctactagagaactagccatgcaaacttttggtgttcttaaggagctaatgagtcaccacgtgcatacctatgggttgataatgggtggcagtaatagatctgctgaagcacagaaacttgctaatgggatcaacatcactgtggtcacaccaggctgtctgctggacca

SEQ ID NO: 76382 - DNA, 1047 bp, Homo sapiens
tgcagattcaggaacactattgtgtacagatgtggcagcaagagaactggacattactgaagtcaactggattgttcagtatgaccctccggatgaccctaaggaataatattcatcgtgtgggtagaacagccagagacctaaatgggagaaggcatgccttgctcattttgcacccagaagaattgggttttcttcactacctgaaatgatccaaggttccattaagtgaatttgacttttcctggtctaaaatttctgacattcagtctcagcttgagaaattgattcaaaagaactacttttttcataagtcagctcaggaagcatataaatcatacatacaaacctacgattcccattctctgaaacagatctttaatgtttaataacttaaatttgcctcaagttgctgtcattggtttcaaggtgcctccctttgttgatctgaacgtcaacagcaatgaaggcaagcagaaaaagcgagtaggcagtggtggatttggctaccagaaaaccaagaaagttgagaagtccaaaatctttaaacatattagcaagcaaacatccaaccgcaggcagttctctcactgaagacatgcctttctttcatcttgaataactttgtcctaaaatgattcttttcctcccttgatttaacaggatttttgtagcctttagaatttggacttatctaacaagagtataaattgaattcggttgcaagcactgaacactgttacttctatcaagtctctcttatttttgggatataaaacaggctttaattttcttggttgcccaagggcaaagtaaggaatatctcatctttcttgtgatgatataatattttaattttaaatatccctccctcatacatacaaatgtatgttactgttttaattatttttgtacctttaaaaaaaagttatattccctctaccttctctttacaaaacagaaagtctgcccccttcctcaaaaaaagtttcctaaaacattcacgctctaaaaaagacatacaaggaattcctctgccacgacatt

SEQ ID NO: 76383 - DNA, 1023 bp, Homo sapiens
agcctatctcatgcctgattcctgtgccttgtgccttccagttctctcctgcgctatggtggaaacctgtccctccaaagtgccatgagtgtacgattcaacagcaacgggacccagctcctggccctgaggcgacgcctgccccctgtgctctatgacatccattcccgcctgcctgtgtttcagtttgacaatcagggttacttcaactcatgcaccatgaaaagctgctgttttgcaggagatcgtgaccaggtaaatgctgtctgcctcctgcatctcacacttatgcttttctttctgattgttctttctatactggtctttatttctcattaccattatgtcaggtagaaacaattaaggggaaacagtgagtgcctggagatgttctgacttaataatagtgagtttctttatcaaggctgtcaatgggtaaatacaaggcacacaccataaaccaaggctggccacgatatggttctgagccacctagctctgccaagtttgtgaacagattttaagattctaagaatgtgccatttcagaagaaaggagagggaatccatggaaaattagcctgctggtgagagagacattaaaaaaaagaaaccaataaaacacaatgatgaatgaaacaccctaagtaccatccaagagacatgtatcttgaatggcctcttgggatgccatctttttcttggatgaaatggggtaagcagctttgtttgagagggagccagatgctgactctttttctttttactgccagcatcacaactggaaatggagagcccaagctgtgagtttccagccttttctgagtctcaccaggaatggagatgctgatgttgacttaaagctggcagtttaagaatatacttggccttcttgcacctttctgtcttaaccatagaagttctgaagtgtcagtgaccagttgggctaatctgggtcaccaagccgaggaaagacaaatgggaagaaagacaaatctaaggaaagactgatcaaataaacaaa

SEQ ID NO: 76384 - DNA, 1020 bp, Homo sapiens
gggcagactgcttccaagctttgccttcccggcaaaccagatcatccttatcattctcagcaggagtggccagctgtagacccctgctgataaattacagttaatgtaacttactttctggatttcaggtgtcatttcatccctctggaaggaatagaattttgtgacaaaacatgaagttttcagtgttggtggctgctgctctttaaatagcacccctaagcattctaggagtgagattcctttgtactttctttgtgtgagaggtcagagttccctgcccagaagcataggcaagagaaaagttagttactatcctggagcccacaaccaaattcctatagtgtgatcagactgcagatggtgggtcagggagcttgggtggggttgggatggcccacatgcctgtcctgggcagactcctctacaggcctgactagaatgggcagaggaagttcctgttaacagatggaaagggtgtttgccagaggccctagctttcctctcaaggatgcctgagctgctgcaaacccctgctgctatgggtggtgaggctggccaagtctctttctgttgactcttgtttccaacccccaactcctagtcagtcctacaaatgctggtttatttgcacactccatactgatgttggattgaaagcctctcattgtttttgagttcagtgtttagataacaccacatgcctgtcgcagccacagcaccctgtaaaggaaatgcctggtctctaacaatcctgtcattcattttctgtatgcaagagagtgtggcctgtgtttaggaccattataagggcatttctctgcagggattactacttggggcctgcagggataccaggcccctccttgatgtctggaattctagggagggttttctaagtcttccctctttactttcattccaatcctaaaaggattacaggttgttttgcccaaggcttgtttccacacatagctgcactaccagagcattccttcctttggtgagaagactgctttg

SEQ ID NO: 76385 - DNA, 1048 bp, Homo sapiens
attgttatttcaccagcttttgggtagagggcgtttttgaataagccaggccatctgataaactcaaatgactaaatgttgagtcccttattttgtggaaagtcatgataataaatctgttattatactgcctcttaatttgctttgagatcttgattggttctgtggggcttttggaacctgtgggccaaaaaagttgaagcgttctgggctctagaacacatccactctgggcatgttcctgttctggaagataatgattagaaacactgcagtgcccgccatccatatgtgcttcatgaaagggctggatatgccatttgattatataaagatttctttacagaaatttagtcaagcctttctgccaacttcagtcaaacttaaatttatggagattcaaaaagtatactgaattcatctgtatatcaagccagagaaatgtggcagtgaatcatgttctggggaaaataaatgtgttcattcacagatcgcaatgtgtcttccttgggttggttgtccgacagttctggttccctctggaggtttcagtcttgggactgaggagtgcattaggaaaacaaaagagaaagcccaggttcttcatctcccttccaactcacataaaataaatggttaatggattatcgggactctaaacatacttgaatgcgaccagtgtggactgtgactccctgaacttgctgactttttacctagttctagtatcttctaggatttgtcatattctgtgggttgtattataggaaatacaaaacatcccatattccttatagatcatcctgccttaaatcagaaactgtgatggggagagactttctcccatagaaaggaccttgcttttctctctctacttgggatacgacaccagctctgatgtctgtgagttaggatagtagtgcctcgaccccaagcattccaccggtcttatagagctttcacgtggaaacaatgaggaaattcatgccagtggtctttggaaaatcttgttggtaccaccaggtgtatcagatggattagttaatca

SEQ ID NO: 76386 - DNA, 1029 bp, Homo sapiens
tacccaataagcatttgaaaagtactgaactttatcactcatgagagcagtgcaaattaaaaccacaatgagtgtcagtatacacctagagtgtttaaaattaaaaagacttatagtattaggtgttaacaagggtatggaccaactgaaacactcatacattttaggtgagtacaaattggtacaaccattagggaaatctatttgtcagtatctactaaagctaaacaccataactccatgacccagcaatctcactcttaagtatatctaagagaaatgagtacctatttccaccaaagacatgtacaggaacatttacagctgctttatttataatagccacaagctaggaacaacctaaatatccatcaaaagaaaatggaaaatggataaataaactgtggaatagccatacaatagaatattacacaaacataaataaacaacaaactataaatatacacattgacatggatgaatctcacggtcataatattgaataaaagaattcaaatacaaaagaatctctgtgattccatttgcatgatgctcaagaacaggcaagttatggaagtcagaatagtggttacctctgggtaaggtattgactaaggaaggcatgagggaaacttctggggttctatatcttgatctgggtggcaatttcatggttgtatacctatataaatttttattgagcaatgcccttagaattagtgcatgttatcatattatgttgtatctttttttttttttttgaggcagagttttgctctgtctcccaggctagagtggcgcgatctcaactcactgcaagctctgcctcccgggttcacaccattctcctgactcagccttctgagtagttgggactacaggcgcccgccaccacgcccggctaatttctttttgtatgtttagtagatatggggtttcaccttgttagccaggatggtctcaatctcctgacctcatgatccacccgcctcagcctcccaaagtgctgggattacaggtgtgagccac

SEQ ID NO: 76387 - DNA, 1026 bp, Homo sapiens
agagatattttggtctacctgatatactagagtttgaaaaattacaaagtaaaattgtagtttcttacatctcttgaaaaagacaaaagatctgatattgtcggacctttattctcatatggcaatagtcagccaaaacctttatgatgttagttaagggtcccaccacttcttgatgtcttaatacaggtgtatccctcatttacattacttgcctgaccctgtagacactggagttggaaagttctgctttagggattttagtggtgatgagtggtcactggggaggagaggcttgagtgtaggtgactggataaaaaaacatttcacacttacaagtgtacattgcatgttctgacaaggtttcatttatttcatttagatgatttctgctgttttcacaggtaacctcctttctcactgccagtgtcccagttatatctatcttgggctgttgcagtgccctctgaacacttttcagaactgagatcctctaatgtctagagaattcaggaaaagcaaaagtttcccctgctctcactctacttgtctcatccttttcattgccggttttagctgtctgcttactcactacctctctcccttccaatctctttattttctgtcaggaactgttagttctatgacagataacagtgtcttgctttgacaaggataataaagagagtggttttttccccactcaataataaaactggggcaagccgagaatccctataaagacttatcttataagacggtgctttcacttgtgtaaatgacacatctgaaaatgggcaatgagagcaagttcctactatcgggaaattgctcttaggttctctctgggtttggggacctctcagttaactgtctgttttttggggcctgggccaatcctacttctatagagaccagattaaatgaaactctgccttctgaacaagccagacaatctctgccacattgcatttgagggttgctcataccattataggaaaataaagcccaggggcttaatgtcaa

SEQ ID NO: 76388 - DNA, 1015 bp, Homo sapiens
cctataactgcaggtaaaattgtatggcttgtgtatctgagtgaacacatgtcatattttttctagggatggtagaaagtttttaccaagttctcatagagacccttgactccaaaaggataagagttgcttggtgttctgattaccctaggttttaaacctgttgtggttccttatcaggtttttaaatgacttctagcttgtaattgcacaggcatgtgggtgaattcagggcctgctgtcctagaaacagataatctccttggagcagtgatgaaggtctcaccctgaacaccttctccttcctggcttaacctatgtattagtcaatgcttgaatgatttccctgtcttaccccaagcctacactatacctctccacttggtagcctgaaggtataggaggagagtcatttttgtcccactgctgccctgaaataagctgattagagggctggctggcagaaaaaaaaaatgtcagctctaaagaagacttgaattataatatgatcagacttcctcattgtacagattaagaataagaaactagcccagtgaggtaaggggaggaagaagagcttgatggtttagtgtaggaagtataggctctgaagccatacttcttggttacagatccaggtagtacaccttaataggcatgtgatcttgaataagttacttcacctctcagtgtctcataataataaataataactaacatttattaagcattacgtgccatcggagtattgaccatcatatgaataattacctcatttaatccttatgataaccctatgaggtagcttctattattcttattttaagaaaatcaaggcacagagaggtgaaataacttgtgtgttatttgtgtgtgtgtgtgtgtgtgtgtgtgtgtgtgtgtatacatatatatcatccttcccctttcccctgtttttttcttttttttagtttttatttttagagacaggatctcactatgttgcctaggcctcagcctcccgagtagatgg

SEQ ID NO: 76389 - DNA, 1694 bp, Homo sapiens
gtggaggtggagatttgccaaacttgttgctgctgagtcagggattcttaagcctaggttggaggggatccctaagagggcttaaaaaatactgaactgccaaaattatatgaaaattatatattgtatattcaaataagtgcattttctgtttatcaaaaggactaatgacctttatagtgacaacaacaaaaggttaagagccattgcactgtggtgttcaggacctcatgtgtttctccacatggcactatgaaaagagcatacttaagacaaacctgaatgatggcatgaatcactaatgggggaatctcaggcatcattaaaggatgtgggaatgggggtgagtagcaggctcttttatgttccttaagtcccatgggggagggactactttttatggcacctgtacataaagttggccatgctgtattaaaaaacttccgtgtattgctagctagctcctctggaaattctgcatagatgtaatttcccacttcataaagcagtgttgcagaagaatatcatggaaactaagtgatgttataatttatttcacgggcctcagatgaaaggagtagttaagtacagaagattatcttccttgatgatttttactcctaggtgattctctccatggggcagtaagagatggttggaactattgtagcagatcggtgtagcccagaggtgtgtccctgtcattgagcaaggctccctaagcttcctcagggcagcagagatttctcctgccccttctgttgcgtaggcacctggctcttgcttttacagtctattgaaatgtgtgtagtggcaggacccctgatgtgcctttgcactatgaactttaggaggcttgctgtctgccaagaagacaactgtgttcatctgcagtgttctctgctacttcaggctctttaggaacaactgttctgcctcatccgtattacaaaaggcaggatttggacaaactgcaccagccttctctcaacctactatctctcctacttataattgcaatgaatagctggcaactggagtggggcactgagctgtttatctccagtggaaagcttgagcaattcatggtgtctgcagtgtcttgagagaggaggggagtgtggatattttaattctcccaattctctcccattctcttccaccagtttcttaccgtgcattatatgggccctcccccactttccacttgtctcctcactaataaatatagtttctttcttgttaaaagaattgaaagtgatgatgattattgtatttttacagtgacatttattggtttgggggttttatgcagaaaaaaataaaaacaaaaaaacaagttccatctccagattatctctgttacttgtatgtttttaaaatgtttgtctatcagtacagttctgcttctttctagtgtctgtagtcactccagaggtaactacagtgaacagtttcttatctttccagaacttaatgtaatgtatatacgactatgcatatgcatcctttaaaaaaattgagacagaaggaagcacgtagtaatactcactgttctcgatttcttttttaaattaacaatatgttttggagccttttttcataccaacactaacagatctagccccttcttttaatgactatatggcattcaatttatatgatgtacccaacaaccagggcttcttgtttcc

SEQ ID NO: 76390 - DNA, 1129 bp, Homo sapiens
ttgatttgtcaatgatcatttagtgtttttcttgatggccacagttttgttttgtgttgtttcccccctactttttttttttttttgagacagtctctctctgttgcccaggctggagtgcgatcgtagctcactgcagccttgaactcctgacctcaagcgattcttccacctcagcctccttagtagctgggacttcaagggtgtgccaccagttggctaatttttttatttttattttcatagagatggagtctaactatgttgcccaggttgtagccacagttgttttttttttttacatcatccactggataatacacattgggaactgttactgtgttatacttggatgccattattttttaaaaattctctgtaagaatgtcctatccttcttaaattatttctataaatcttttttccagttaacacttctaatttgtattagcattggctttgttcatattttttccctgaaaacttaaaaatactaaattgtaatgtggacagggaccaccttgcacgaatgatcagatgtctgcttttttcttttgcaggcaatgatgagcaagttatcctccatgatgttgaaaggtaaatagattggtggtgtgtgaaggtgattgactttgtttttcatatatgaagaggcaaatatctctttagactaaaatagtttttgttttttgaaaaaaacaacatgaaaccagctgttcttttctaaaaaaattcctacaatagtttgaaataaataaagttttgatttaaaaaggaaaaagggatttgaaagttttgaaagttggtatgagagtgtactttttaggtgaaaatttaaaacaagagtttagaagagaaggaaccataatatttaagaacagtaatagctaatattgattgagttcttactatgtgccagacaccattgtaaatgctttgtacatattcattcatttaatcctcacactcattttctgaggagatactattgtcatctccgttctagatcaggaaacggagtcacagacatgttagataacagaaggtcaggtggtactaaaacctgaacttaggctatctggcctcagagccatgctcttcatcaccatgccagattgctaggagaccc

SEQ ID NO: 76391 - DNA, 1067 bp, Homo sapiens
agtaaacaaaggagcaaagaggtaaaatgatttgctcagtaggttacaactagtgagtagtacaatcaggattaaactctgggtcttctgaccttttccctcaatagggaaagtcatgaggttctgcatttaaaaaggacttgctcaagtaaagtgttaaactcctaagtggcttactctgccagtacattgtatctgcagtttcattgcccctgaacatggttttgattaaattggtgatgccctattattttacagatgagtaggtagagattttccagggtggaggccaactgtcactctggttgagtctccagttttaattcttagcctgctgagctatacttccgtactttggaaagtctttgtttccttccaagaacattactcaggaggaggaattctttgcaaatccagatgcctgtcaaaatcttgttacacaacttcccccatgctgaatttccattcaagtcttgtatctaaattccagttgtatcttggtgttacaagttaaagctaagtgactaattggaacctttgaggattgctatgttccttttttttttttaaataggtgtcttgactatgttgatggcttagcacagatacctcatttatatcacttgctgccacagatgactcaagtgtgtgctttgccttagacatacagtagtcccccctcatctgtgggggatgagtttcaagccccgcagtggatgcctgcaactgcagatggtactgaaccctatgtatactatgttttgtcttatgtatacatacctatggtaaaatttaatttataagttaggcacagtaatacattaacaacaatagtaataaagtagaacaattataatattatactgtaataaaagttatgtgaatgtggtctctgtctctcaaaatatcttgactgtaatattttcggaccctggttgactaatggtaactgaaactagaaagtgaaatcatgggcaaaggggcttactgtactggcaagaaacaagtgaagtttgagtgtttggcagctagcccctgatttagtctcagggttgacatctctgttt

SEQ ID NO: 76392 - DNA, 1150 bp, Homo sapiens
tttatatgtttgtttaaagtttttttttttttttttttgcgaagaaaatgaacatcttttagggctctgattggatgaccaatcagaatgtatctctatgtgcatttgacttggattgttactccgcctttttatatgttgtaaagggcttgtgcaagtcatcttagcagtaaacaaaaacaaagatttggctctttggaatgagagtggctatattatttcccctgaatcgaagtttaaggcattggaacttatagagctagcagaataacccataagtatgaagttttgagttatagtgagagattattatcttttttgtgtgcttatgactaaatataggaaaagtacctttagaagtttttcaaatagcatgagcaactatgatgtttcaaagtattaattatgtaggagttgtgaatggggagagtcatttagttgcttggtcataatacttataaatggggataactatttagcctatttctagttcaaatgggtctctgaccatattgatcattataaggagccataatctatatagagagattgtagagtatgaactctgaagtcagactgcctggggtgaacaccaacccagctgcttggtacctgggttgcttttgacaggtcacttatcctctcttgtctgtttcctcacccatgtaataaggataataataccctacagggttgtggtaaggattgaatgaaataacatttgtaaaattcttagcacaagggcctaacccatgctgttgctactgctgctgcaactgttgttgttgtttcccttgaatgtcacaaaaggctttcaggagattgataccttcaacatctaacatatactgcacatggcacagtacaccatgaaatattgagaaagatctccatgaggtgaactgttcaaaatactttgtgaataagcttaaccagtactgtcatcaaagagtatttttaagcattgaataatagctattattacacctatatgcttaatttgaacctattaattaatggtcatttcctgtttcccagtcactagtttatatcacgttttatgaaatcagttttttgtagataaattagtctaaaagcacattatctgcaggtaagtcgtttggctttagccagttaaataaagcctgac

SEQ ID NO: 76393 - DNA, 1037 bp, Homo sapiens
ttgggagggatgaagggggaacccagcgctggacgtggcgcttagcttcacccaggtcggtccctgaatgtctttctaatttgtgtccgtgagcagctcgccagaaacttctgggatcttggcaaagcatccgtcttcgcgagtaaccttcggaagtgacatggggcgtacagtccaatttgggggtagcaaagagaaaggtcttctgtgatcattttatgataaaccttctggggtctgtccagaactgacttgacttttgtaccccagatcgttttctctttgactaggtagattttggccctagatcatcctctgaagaaacctgatctttcagacaaaagcctccttcccccacagcaccgtataaaattttatcaaataaatttgaagagcaaaaatgggggaagacctcttctttatagacctagctcccagtttccctgctgttgttttttatgtattcataaaactcccgatgtattacaacagagaagttcccagacacaagtaaactttacctaccgagtgagggagtttgggggtactcttttagagacaactgaactaatcatgttaacggaattgtaagtagtcacacgttgcccagcttgacacacctttatttacgtatttatttgagacagggtatcactctgttgcccaggctggagtgcagtgggctatcactcactgctcactgcagccttgatctcccaggctcaagctaacctcccacctcagcctcccaagtagctgggactacaggcaggtgctatcatgcccaggtaatttaaactttttttttttttgtagaggtggagtctccctatgttgcccaggctagtcttgaactcttggccttaagtaatcctcctgcctcaccccgtaaagtgctgagattgcaagcataagccaccatgcctagctcacactttaaaaaaaataacaaatttattgagataatttccatgccacataatttatctatttgaagttacatttttaaaagcacgaaatgttctttaccagttatt

SEQ ID NO: 76394 - DNA, 1442 bp, Homo sapiens
aaaaaagtctccctaccaactgactgatgattacaattttttttaaattgagaagcagttttccttcaactgttaggtgatcaaaggtttaaaatacaaaatactttgaagaagatccattaactaaaaaattcattcattaatcagcagttagaggtgagagtctagcttattgtttttttttcttcctagatcacacttcattgtgtacatagcctgttgttttgactgatatgattttatatcattaagagagccatggggaactgtcagagggcagggagatttcctggggtgaggatggagatagagatggaatacagagattataaagatgaagaaattaaaccattgctactatttcacatggaaatttatagcagttgttttagtttgtgggcacagagattataaatggggcattttttagaggaaaacttgtttatgtaaaggtttatattctgtatataaatatatttttgccatttgttttgcagattgtgggattagtgatatgcttttctaaagagtagaaaagtcgaagatgtctagacagaacttagtggctttgacagtgactacccttctgggtgtggctgtaggggggtttgtcctctggaaaggcatccagcgccgccgaaggagtaaaacgagtcctgtgacccaacagccacagcagaaagtgctgggcagtagagagctgccccctccagaagatgatcagctgcactccagtgcccccagatcctcgtggaaggaacggatccttaaagcaaaggtggtgacggtgtctcaggaggcagagtgggatcaaatcgagcccttgcttagaagtgaattagaagattttccagtacttggaattgactgtgagtgggtaagttaaaaagcaaaagttaaaaaaaaaaaaaaaaaacaacttctgcttttccaactgggaccttggacagtcaagtagaaaataaggttaaaggagaatgaattagcttgttctcaacttgcttataagcagattttagcagaagaagaagctgctgttcctctcaggatggcggagtgcttacaattatggattacaattatgtcaaacctatatgaattgtattttccccacttatcattccgtgaacttggacaagctatttagcctctctaagtctttgtttgtttggttgtttgtaataggaacgtcatggtacctacctccagtggcttttctaaggattcaaatagatcacccccataaaggattcagcacagtgtgaacatatagtagtaagtgttcatgaaatattagccactgttaatatttgtagtagcattttcataaggatgccgtggagaaaatagctaaggaattctatttaaatggaaattattacttaggattttaaaagataacagttaacatttgaaacatcatttactctaagccatgtact

SEQ ID NO: 76395 - DNA, 1033 bp, Homo sapiens
tcaaactggcatgctttcgtgtgaggatacgaaaatagctctcactgataaagcagtgcctaagaaggaagcgtaagtcttttgtgagttagatcatggttttactccgccttagaaaagaagttgagggctagagggccgggcatggtatctcacgcctgtaatcacagcactttgggaggctgagatgggcggatcatttgaggtcaggagtttgagaccagcctggccaacatggtgaaaccctgtctctactaaaaatacaaaaattagctgggtgtggtggcaggcgcctataatcccagctactcgggaggctgaggcaggagaatcgcttgaacccgggagggagaggttgcagtgagctgagattgcactactgtactccagcctaggcaacagagcgagacttggaaaaaaagttgagggccagagccctcccagtttttttttttttttttttaacagcagttcttttgtgatcttgactatttcctctgtgtgattttggtcacttcaattatgcaatgtacctcctctgattaattgtgacactttgcttgaaacattcctttggcatttaccatgtcattttctgtgtgtgtgagcttgtgtttatgtgtatccctcctactcctcctgtaagattataaattccttaaatcagcacgctctcttccattactttgtatgcaactgtggcactgcaggcccagcaggcagctagtacagtagcaagaggaccacattgccctagagcagagtttctcagcctccccgctattgacattttgggcagatgattcttttttgtacattgtaggatgtttagcagccttctggcctttacttactagatgcctatgtacttcctccccacttgtgacaaccaaaaatttttccagatattgccaaatgtctcttggggtacaaaattaccctcagttgagaactactattctagggactgggaaatttaggtgatagtgtgatagccctagctttgccatgatctcaccatacttggtcaaac

SEQ ID NO: 76396 - DNA, 1627 bp, Homo sapiens
ggtcccactggctaaattatggctgcaaagggtttttggttttcttttttcccatatgatatttttgggaatttttgtttaaatcaagaatatttaatgtaaaaatctgtatttctggcttctcttgaaattaggtaatctgactacactgagtctacagttctagatggcagcatttggctgggtagcatatgtgccctttagatgagcgtgctctgttcagtttgccagagtccccaccactcccattgtaaccctggctcctcctaataagcctttgagtttgtagagcctgctttaggccaaaaatgatggtagaccagcccttatctgggaggaagagagatttcctttagaattttattcctatggaaatttgatttcagcttgtctttttggggcggggagtcgtaattacctcctcatgtttatgtatgggtcctcatttataacaacgtggactgaaacagcctcttgccctgcctgaagtgacacagtcactaaaagtttggagatttggtaaactaaaagaaggcctgattaaaatctgtacttatcacaattttttagtataaaatgaaattttattttagtttgttagtttggcttatataaagatcttataagtgaagtataattttttaaagtaatacattaagatattgctgtgaaaattaaaactctgcgaaagtctatggagtataacagtaaaagccccccttcatcaggccctcctttctttggcaccagctccccagaatgccactgtcactgtgtgctgttagaggcagtgtggatagaggctaaaagctgactcgggagcacactgcatgggtaggagtctcagtgctgccacttgccagctgtatgacctttggcacagtactaagcctctctgttcctcagtttcctcatctgtaaagtagagttgataatgtagccacctcacagggttggtgtgagtattaaatgagttaaactacagaaaggatttataaagtgtttcacaaatagataacaaattatcattttcttcgatttctagtgagattcagtatgttatctctgtttattggccatttatatgtcttttttgattttcttgtccatgtcctttgcccgtttttgatgcatggttttctttgtttcttttagaaacaatttgctctgtaatgggcttagcctgaagtccctcgctgagactgttttgaactttccccttgacaagtcccttctacttcgttgcagcaactgggatgctgagactctcacagaggaccaggtacttcttatcagagtagttgaagaatggaaagtcattgtttctgaagtataactgtttataaaattcgaattctcaaatatagtataagtattggatggagatgccttaaaatagattcattctctggtgatactccagctaactggtctacaataatcacttaaataaaggataagagtcctgcttttgttttatttttgagatggagtctcactctgttgcccaagctggagtgcagtggtacggtcttggctcactgcaacctctgcctcctgggttcaagcaattctcctgcctcagcctcctgagtagctgagattacagatgtgcaccaccatgcct

SEQ ID NO: 76397 - DNA, 1054 bp, Homo sapiens
acctccaggtgtgagctaccgagcctggccaagagtcctgattttttttgagcatttactatatgttgggcatttcagaaaaagggattttttttatgaatacaaatgtataatttaaaaaaaatatagtgttataagtgtgtaggagttataacttattttaagaagcagtaagtagttccctgcattacctttccccattcctaatccttcttccttcttctcctcagaggcaaccactttcatttctttctggtaattatcattatacttctaaattacatgcatgcgttattctttcttatttatttatattatcttttgacatcatactgtgggagatacggtttagtactcttgcagctcccctgtccccggacaaatacttctcttccccatcctcccaatttaggtaaatcatcatttttatcaggttaatatacagtatttatattatttatagctgagtcacatagtaaactgcagttacttttatttcccaggattaataattagtattttgtttgcatagtgttccatgtacctattatttccaccccagactccttatcagaactatggatctcctctgggctggttcagacacacgtcaggtcacttacttgtttcattttcccttggagccttctctcctagagccctctatcatctggctcctcccaggacggagtgcactctaggcctgctgcccaactctcatcctggaatttgcatttaccatcagcctggaattcccttcacctttctctttcatagtagatcctctgttttttaaattccatgtcttcttcctttcttgccttggtggagtacattcataacagtttcttgagaaagggagcatgagcagtaaaaaaaaaaaaaaaaaaaaaaaaaaagtcagtaactgtcttttctctcaggtgacttagtttctccacagatgaatcttctagtattctattcaagaagtgtaagtcccactgcctatattccagtcactgagtgggggaaaggtgccagtggttttaacattcaatgtgtaatctctccc

SEQ ID NO: 76398 - DNA, 1033 bp, Homo sapiens
gtggaaatgaggaaagcttagcttagttctgtcattgaccctgatgtgaccttaggccttaacttctccaactgtaaatggggatataattatcattccttccttgtttcaggctagctgtggaaaataaataacatgtagtgcctcatacttttcaggagaaatgcatcatctgatttcttgttcatatgttatttgattatttagaatgacatccagctccaagaaaatgttactctctagccaatgaaaaatgtcctgtataacttattcctctattgtaggaagatgactaataagtactttggagcataaatttggtccctgtagcaaagtgcctttaggaattaattggatgattaaattgaaggaagtgttactgcatgtgagttagaagtaaatccacatggccctcattactttggcttgaactttaaaatttttaatgtactttgtttaatccagtgatttggcagttttcttgttgcttggttcttttttgcattcacagcagagctgtgtgtaaaccacttgacacactccctaatgtcctagtccataagtgtaaaaactagaggcataaactcattcatttttagttctgtttcctagcccagtgcaggtgaggattaaacatggtttctcactctgttttttccatagtggtgtgtttgaccttagtgttgagaatagttttgagtcactcagaagagagcatgggaaggcaacagacattttgacccacagttagcttccggtttgagatttctctttcctttccctgcagaaaatcacctctttatgataactgctttctccatgctcctgatggacagcccctctgcacttgtgatagaagaaaagctcagtggtacctggacaaaggcattggtggtatgagattcagctgtccttgtttatctctaattaggtgcattggatgctggcaggagtggggagtgagataaggaagagggagggatagaagaaggcagagagaccgtgagatgcatgggactgggtaggcacaacc

SEQ ID NO: 76399 - DNA, 1108 bp, Homo sapiens
caacaccatactcagtaatggtctgtcatggggacagtggttcccttttgctcatgaaagactgaagaccagttccttcagaagctgtgtccctctcatcctctcttgactggctgaccagctttttgagccatggttttattcatggagtatccagatgtcctgaagcctgctctgtgttgtaatactgtttcacatcagggcccctgcactgtgagggtgaggctgccgactacgtctgagtgcccagacacttgggctttctccctggcttctgtggagtcactcactttcctcctttctcccctgcaaagtgagacaaagtcattgctgccaagagtttttcctgagagcttagttctccttagaaaataatgatgaacctggtgaaccagggaaatagattaaggtattcctcagatgaaggaaattggctttttcaggttcctaggccttcttgagagagttgttttccagttgtcaaaggccattagagtatcttttcagttctctgagactttcccttctgggagcacagccttctcagaggttgttattaacctgtcactatgctggcccaccactgaagcccacagcaggtggtctgtacttacttgcaggagagaggaagctaagacacagatgggctgagagtggaataggtgatactgcctttctgtgatctgtgttgggcggtggtgcccaaggcttctcagtcatggttaggccccagttagaaccccagtagcctgtctgctgtcttcccatgtgctctgtcatacacttatgagcgctgctttccggctgggcttgttccaggaagaacgtgattccacatgagtaccggaagcacttccccatcgagatgaaggaccacaactcccacgatgtgctgctgctctgcacctcctgccatgccatttccaactactatgacaaccatctgaagcagcagctggccaaggagttccaggcccccatcggctctgaggagggcttgcgcctgctggaagatcctgagcgccggcaggtgcgttctggggccagggccctgctcaacgcggagagcctgcctactcagcgaaaggaggagctgctgcaagcactc

SEQ ID NO: 76400 - DNA, 1743 bp, Homo sapiens
tgaaggtggtgcagtgtcacagccagggtggcctgcgctccctcatgcagctggagagccgctggcgtcagcacttcctggactccatgcagcccaagcacctgccccagcagtggtcagtggaccacaaccatcagaagctgctccggaaattcggggaagatcttcccatccagctgtcttgatagctgctttcctcccagttaggacaagtgggaagctggagccaaggttgaagagtcacctcttcccattttagtacatcattaattgtcaaagcctgtgtgacacaactcagaatactaacctagactaatcccaggatgcttctgctggagcaaagatattgtttgaaggagagtttatggttttggattttaaacgggcagggtcttttttcctctcatttttgtggacaagagaggccttcgcctttatttttactctccctcttctgctgtccctgtgcagaggaaaaatgaagaattctcccagaagtgacttgtcaagacttaaaaaaaatgtttttaatgcatttcttccttgtctagtgcctcggtttatctctaacaggggctgtccagtatatcggtcctgttaggaggggagaaaaagttcttccaaaggctggagaagtgaacaaggagtcaaatttattttcccaattcaacttcataattatcatttctttggcttcatgctctcccgtaactcatgtggttgggatccatcccatctgggtcacttcagtctacttcacgtacttgaaaaggctttcctttacacttccaggaccaaacagcaacttcctgccacacacttccaccctatcactgggagaaatccttttctggacatgagcctttgacctgggtggggcagaaagaaccacaaactccatctcccaatagaactttgaaattcactcagcttttcctttcatgctgtttgttgcctgcttgttgcactcctcctgccccagaactgcaagatttttagcttcacccctttctgagagtaatgttatcttttatcagaatcagtatcagttcccctgtattctgtgcttcatcgaatttgcaagactgacctcttttaagcatttaattcactcccagagtcatctggtcaggttgcaatatgaggacttctctgtctcctctgaagcctgggacactgagcttacttaatacattagatgttcaaaagaggagcgttgtttcatctttcaaaatgttaggccattactttgagtataaaatcgacttattaatgattagtaatttttctaaagtattgggaaaactttcttattttataagatcttaacaagcttaaaaaagaattttatgaccagaatccaacaagagctctattttggaattgtgcccaagttggtgatgtttactctaaaattaataataaaactacttgtaagcacaaggctcactggatgtaaatgtaaaacttcgcgactttataaaactggcattcctaggggaggggctatttatcctacaggtccctgcctcctggcagtgccatggtatgtgtgcatggatataccagacacagtcaccatcggccatcagtagcagcccatgaacccacgtgcacatcctgcatcttgctcttctgacccttcattcccacttgtcttcaggcaggcatttctgggatctaaactagaaatccttgaaaacaaatagtaccagccactttgaggaatgtgcattcactgta

SEQ ID NO: 76401 - DNA, 1403 bp, Homo sapiens
tgtcacggatagagatcagatgacaaaatgtgttctgttgaaataaagccattttaatcatgcattttagactcttaagaatccagcaggcagaaagaggttttgttcaccttcctattcgcctattagtttggggccctaacatttgactgtaagttaagttcttagtttaccctgcctctcaatttttcattcatttatttatcctttcttcctttttttccccttccttatgtctcagccttataagaagtatcattttttcttttaaaggagatattttctcagtttgctagtttactaattattatgtattttaaatggatctttctttctggtcttttatgtttcctattataagatggttattttttgagagtacctaatccccttagggatacactgagaatcagtttctgttggaagagataaactaaaagagggtataagaatgattcttgttttgattaactgttgattgatatgaataacataaaaataatacataatctccccagtactttttttttttttttttttttgacatggtctcactccagactggagtgcagtggtgcagtcatggctcactgctgcttcaacctccagggctcaggcaatcctcccatctcagcttcccaagtagctgggactacagccttgtggcaccatgcctggctaattttttaatttttttgtagagatagagtcatgctttgttgcacaagctggtctcaaactcctggcctcaagccgtcctctcaccttagctcccaaagtactgggattacaggtatgagccactgtgctcagtcccccaaatacttttgttttggaattcaggtataattttcaggcattcaccaagataccccttgtgcaagagcccagcaccttctgcctgtcccagtcctggagtagttttgcatcaggcaatggagtagggatgacgtgcagccacacagcccatgtgttcaaaagtaccgattccaccagcctgctaggagacgtattagtcactccctttgcttgaggaagcaaggccttgcttaaatgctagcatgttatttagaaaggtgggaagtacattagaccattttttttttaaccagctttatctgtggccaactctggttgaaggcccctagaaactgggtaactggaccaaatggttaatcatttgagagataatcaagaactgcctttgcagaggaacagagttgtcaaaggacctagttcatgcatcctgggttgtacccccttctgatgtggtgcaggctgcctcaaaggtcattttgtgttgtgactgaatggagataatgtcataccctccagactgaactcaaagcatttgctttttgctatttgttattcttgaatttttctctcttgctggatgggta

SEQ ID NO: 76402 - DNA, 1052 bp, Homo sapiens
cctggcagcttaggtgggggtgggggatgtaagtgtgggtcattcaggatggagcagggatcttccccatcctgaatggtctcagccatgtcatccatgcagggtcctgatgctggaatccttccctctccctcagccttcggctccagccttttctgggcagggaaacagaatgaggcaaaatgcctggtgtgttttaaatagattcttcttgtggcagccaatgagtccaacagcttggaaggtgagtgacccttcccgagagacttatgttgtgccatttctcttgtccctagcccctggaatactgaccacctcgacccctcctgctgtcctccccttcgacctaaactccagtgatgttagccatcctcctgctgctccctagatggactgtcttcaggcttttctggttttagtatttattacacttcccacttggctttttctgtccccaaagctgattttcctcgtgctatttgtccactccacccagtgcacatccccatctgctgctgcttgtctgactgtcatggcttcccgatgatcttcttgcctccaccttcccgtggcctgcttggggacagcccagccccacctgggcctgtgtgcagctggggaggcaggagaggctgctcattgcagtggcaaacactggggcctgcaatgtgaggtcagcagtcagtgctccagcacagccaggacaccccagattgagcatgggcagcgtgcagagccattttcaaaagagtatcttttagcaaagagagttaggacttcagaagaccaatgtggcctcttcccaccctatccacggagaccacttacaagacctaagcatcatgatctctggattcccagtaaggggtcatacaaaggaaggacatgaatattttttacttgctaaggggagattggctgtgttgattctggaaagatgtagggtatggggtatgtgaatggacggtagaggctcctacctcgaacaatctcggttgtggggcaagtgagagctccagactaggaagcagacctcagtgatgatggctatt

SEQ ID NO: 76403 - DNA, 1012 bp, Homo sapiens
tgatgttatatgcctcctgcattaacagctttttcttcccgttcaattattttgactggtaagggagtagaaattacacttcaaaatatatcgatggatattttcagccttgctgagagcttcaaaatatgtaccaatcctgggaacattgctttaatttctacttcccagtttcacaaggaaaatggagatatcaattataagcaccattaaactgaaggaaatgcaggaccaggactatggatctctcttcaaattctctttggtcttgtcacctgacctttttgatatggagacaaattttattcaaaccctaggtcaaggggtccatcctgggtttcccgataaagcaatgagtattcctaagagactgggtccagggacttgaattaaggcatctgacagaggcagaaaaaaatgccagttttctgtctctccatcttcacacgaggcatccagaagccctcatctctgacaacatggcctttctgccatgcctaggtgctgggtacataggcagccacccagcaacatgttcaccccagttgtgtttctggctttctcatctctacctgactggcgacgtccactctccctgagctccatatctggatttatagatgccttcctggaccgaccacagacaactcaagttcactgaacacacctcccaaattggctcctcctcctatattccccatttcagttaatggttacattacaccaaagcactagtctcctaatcaagaaacttaacacgctattctcaaatcctttctctcacatccacctcaaactgaccaccaaatcctaccctctttctctcctgcttcagtgttactgctctaatctgtgcttctgtggagctctattatatcatcttgtgatttttttttcctctgaggcagggtcttgctctgtcacccaggctggagtgcagtggcatgatcatagctcactgcaacctcaaactcctaggctcaagctattctccccactaaccctcatgaat

SEQ ID NO: 76404 - DNA, 1045 bp, Homo sapiens
agcagccaaactgggaggcagggctgacacagccggccttgagtcttcagtcctcacagttggcgagaacatttgtggttgttttggtttgggacttaggttttccatatgccagttcactaacaggcatgggtgggaggctaaggtgttatatggaatttcactttacattttttaaaaagactactcattttcggtataggtgcactcatttgtgtcaacagtctcctatttagaactgtgaaagatttaggcaagaatttcttaaaccggagtttcttagcctgaaattgggatactactgaatgaccatggacacaatacttaacatctctggaccttggttattttgtcggctgaaattgagttaaatgatttgcaaggtttgttgatcctgagataagcagatgatagctccatttctagatgtaaatacatggctttaagggggagttctcctgaaaggtgttgtgaagtttctgcttatggaggaacatgctcctgtcagtggaaggtcccacaggaacccttgaggcctcgcaggaagcccccacttacctagcagaaggggatgcaaatgatggcttttctggtagtgttctcagagagcggatgctttaataagatctaaaataatttatattttatttataatgtgtgcattttggaactgtgggaatatgatttgcctaaatataataacagaaagtgattttgtatttaattggtttaggtaccacacttgagaaagagagtgaggaggaagaagcacaaacacccacaattccctttgtcaaaatgttcagatttttttcttttctttcttttctttttttattttctcttttctttttctttctttttttttttggacacagggtctcactctgtcacccaggctggagtgcagtggcacagtcatgattcactgcaaccttcacctcctgggctcaagcgattcccctgcctcagcatcctgaatagctaggactacaagtgtgtgccaccacacctggttgatttttatatatttttgtagagacag

SEQ ID NO: 76405 - DNA, 1037 bp, Homo sapiens
cggcccatctgaggtgtgtcctctgaggttcgatggctccctcagtgcccaggtgactggtatgacacagtgtcgtgtgtctctggcaagctgcaggcaccttttttctgtggtttaggtcacacacaattccaatcccctggcagtcgtgccctgtgagatgcttcttgtcaaagttcagattttcatcccttcatcttctcacagcagctctgcctgtagcttctttaaacaaactgtatgggagggcttctgatatttcaaggtctttcatgtcaagggaagctggccttgggctgccacagcccactggggcaacccgagttgccttccaaagttgctggatcagcggtccgttccagggggcttcacttctgacgcctcacacatctgtgacctgattatttccttggaagtcatcttttcctctccctgtggaagttctcactggatagggagatgcggggcatgtggcaggcttggggcattatcccagggatgaggggaagtgcagcctggggctcagggagaaagaacacgtgatcgcctagtgatgtcttgctggggatctggtggtttgaaggggcgaagcagttaggactgagcacagcccccacaaataccgcaccaacctagaggccggatgaaggagaaccaaaggtcagggcaaacacaccgcagggaccagggaaggcaagggagcagcaggccaaagcacttctccaagtggaaagcagaggctacccacggtgatgtgtgagtgcagtcttggtggtgccttgcgggggcatgaacatggcaagggccttctcccaaaacaacaacgggacatggctcatcgctggatgcaccccggaattgccaactccagttgttttttgtatagcagagaacacagcgtcacccaactacctcttccagacaatgcagcatccctgaaccacaccggggccggggctctggaactgggactcacagcggggtgaggatgggctagctcaagacctatggaacttgggagatcagaaggccagcgc

SEQ ID NO: 76406 - DNA, 1035 bp, Homo sapiens
tactactatgaggcccggccctcggccatcgggaaggccttcggcaggtgggcccccccagctccactgtctgactccctctacccacattagcacaaccccagcaaaatacgaagtggtatgtacgccagggaaccacccgccacctccccagccactgaggtcccactctaatgggcttctttgggtcctgggagggaatgcaaccgcagagacaagaccttaggctttgaggagcgtgaaatctcatgggagagaaggctcgcttatgaaaaagagctgcctgtccacagctgcctgcagaagaacaggcatctgtggaactgcttaggagggggctgcctgcagaaagcatttggggttctgcctccactccctgttcaaaattgagatctgttagcctattttcctgtcatggactgttaggactatggtctagttaagcattttcaaaatgcagatgggttgtgaaatcaatttagtgggtcgtgaccagcatttaaaaagagagagagagaagtagaaccctatagattagattagtacagagcaggatagaaaataagagttgattgcagttaagggttagtattgtccttatgaaactcttatttccgttgtgggtgcatgtgtgtgcatgcatgtacctacacatgtacagttgcccctctgcatctgcaggggatttgttccaggaccccccacggataccagaatccacacagatgctcaagtccctgatataaaatagtgtagtatttgcataccctatgcacaacctcctgaatattttaaatcatctctagattacttataatacctaatacaatgcctacacatcacgtcatttgcatggattcaatgtggtactcgatgcgtggcgaattcaagtttggctttggaaccttgtggaatttttttttttttttctagatggagtctcattctgtcacccaggctggagtgcagtggcacaatctaggctcactgcaacctccatctcctgggttcaagcgattctcctgcctcgtcctc

SEQ ID NO: 76407 - DNA, 1028 bp, Homo sapiens
cacatttctgccaggaccatcagcaaatacccaccatgacacacgttctccaaagcttgttctaggagggcgcaggcgggcacgccccgatgccctcagtgctgtcctggccttgccccgggagaggagatggtcagggtgctggactgttgctgggtagagactgagtaggtgcccctggccctttgtcctctcccttggcgcttcttggggctgggacaatagtgtgtggtctctcccttgttgcccggagaaagcaaggacagaagcccacacaggggtcttttgggtcatgaggcccagctgtgcaggcaggcagggccaggggaaattgggcagcatggatggagaggctgaaggctgggaagagggaaggggagaggggcagcctgcaggggtagctgaagaacaggaaggaggtgagaagcccggtgacctgtcagagatgccaagcccagggtggcactgggttgggtggggacggatggtgtcttggcagcaaaggatgggtaatttgcaaatgaacatggatagaagagcagcaaagcaccaaaagaacaaggtctcttacccaggacacagtcccttccacactttaccagccccagggtctgagcccgacgctgcctcttccggtcctgtgcctgtgggtgcccacattcttagcaagaggctgcagagggatctttaggggaagattcgggcgtagtttattaaacagactccacttctatttggccatgtgtcaggctgagacctctctctcgggcattaatgaacagctagtgccctgtccctgccgccaggacccactgaaaggacgggtagccacacacatccctgagtagtcccagcctcatttgtcatttttgactcctgctttctcaaaggtttttgcctctgtcaatacagcatcatgggtggttggaaagaagggaacttcccttctggaccaagaacagcccctaagtcattagggttcaacctcacccttattcccctccccgctacaggagcccctaagtcat

SEQ ID NO: 76408 - DNA, 1434 bp, Homo sapiens
gtgatcacccgcctcagcctcccaaagtgctgggattacaggcatgagccactgcacccagccaatttttttgttgttgttttttaatcactaaaggaaccataaaaatagaaactatgtaggaggaagaacacatggtttctggtcatactctgtcaagaagtagatatgtaacatattgggcatttaacttaaaaattctaagtcatgttttctttttccactataagattgtactaggtgatataaagttcatgtcacttaaaattcaacgactgtgtaagtagctctttcagcttttcattaagttcatttttggaaatgtgcacatctatgccatcattgggcagttataatttggggatttaaacacctggcagtgattgaccactgtgactttgcttattccctttctctcctcagttaccgagctgatacccagacataccagccttataacaaagactggattaaagagaagatctacgtgctccttcgtcggcaggcccaacaggctgggaaataattgtgttggaagcactgggggggttggggtgggcttggaacacaggtgtgtacagcgtgctgtagtggaagttttgtatcatagtaatcctgtttccactttgttatactctagccaagattgactgtattagatgaaatgtgaggatcttgttcaatcggaaacccccgttacctcctctttttctttctctttctttttttttttttacttaaacatttttatgatgatttagatggaagttgttcttcgtcacttaatgttggttccagtccttcaactgttcatatctactttataacattcacatactaacccttcttcaagatggggtggggggtggaaatgcagtttagccatgtcctcaagataaagtcttggtaaaaataaataaatgtcctttagttatattttctccctgagtgctttttttttttttgtctttgaacattgaattttcttgcaaagcattttttcattttaagtttaaaaaccaatagctgctacacaaagaatttgaagaaagtttaagtagtgcgcaacacattttgctgtgaagctaataacacttttacctcacttttccagcataattaaatgaatcttaattatagctccaaggtttgtacctactattgacgcaaacgttataaatgactttctggtgataaagcttgtccgcagcagcagcagcagacagatgaacttcttagtgttgatcagatgaagtactctttctaggaggtctttgtgcccttttcagagccttcagttggatactagttacccactactgtagggaagctataagggcaagggaaaaaccacaaaaaagtgtaagatagtcttgtctcttttttgttgttgtttttttgagacagtctcactctgtacccaagctggagtgt

SEQ ID NO: 76409 - DNA, 1067 bp, Homo sapiens
tgtcgccagggttcaagcgattctcctgcctcagcctcccgagtagctgggactacaggtgcgcgccaccacgcccagctaatttttgtattttttttttttggtggagacggggtttcacaatgttggtcaggatggtcttgatctcttgacattgtggcccgcctgcctcagcctcccaaagtgctgggattacaggcatgagccactggcacctggcctactatttgatgagttggaaaattgcatgcaagttgatggattccttaatgttcacaaaccagagtgatttttgttggggggaatggtataaacaaagcctgtcccacccagatatgataattgtgagaaattttgttcctttttaagttattttccagtgttaatataaatgttatagtctcttctgctacattttgcagtagactagcttagagcttatttaattaggaagcatggacaaagagttttcagaaaaaattaaattttagaatttttaaatttggttaagcatttttaaaaatgggaatcttgtacatttttaataaaccagattgtgaccttactgttcagaggaagaatatgatgttaattgtataaagcattcctactttggaatttatttcccttgccaaaaattgtagtttaggtttctaacttagtgattaacagtgaggactctggagtcaggagtatttaaaatctatctccagtccagcattacctagctaataacttgcttcactttttaaagccttggtttctcatttatgaaaaaggaggccaggtgcggtggctcacgcctgtaatcccagcactttgggcggccgaggcggctggatcacttgagggtcaggagttcaagaccaacctggccaacatagtgaaacctggtctctactaaaaatacaaaacattagctggacgtggtggcacacacctatagtcttacctactcaggaggctgaggcaggagaatcatgtgaacccaggtggcagaggttgcagtgagccaagatggcaccactgcactccagactgagttacagagtgagattctgtctcaa

SEQ ID NO: 76410 - DNA, 3799 bp, Homo sapiens
gaatccgtagatcatctgagggagtattggcatcaggtcttccaactcatgaacatgggatgtctttccatttattaagcatggtgtggtggctttactttctgcatggcgtggtggctcacacctgttatcccaggactttgggaggccaaggtgagcggattgcttgagcccaggagtttgagactagcctgggcaacatgatgaaacccctgctctccaaaaagtacaaaaattagctgggcatggtggcgcgtacctgtagtcacagatccttgggaggatcacttgaacttaagaggtcaaggctgcagtgagctgcaattgggccactgcactccagcctgggcaacagaatgagactgtgtctcaagggaaagaaaagagtccttccatgacattttatagtgtagggtgtacacgttttgtactacttttgtttcgtttatttctaagaattttattcttttttacgctgttataaatggagttttcttaattttattttcagacttgttgttaaggcatagaaataaaatttattttcatataccaatcctatatcctgcaaccttgctgtactcatttcttagttctaatagatttttattgtttccttaggattttatatctgtaagataatgtcatctgcaaataatgatggctgtacttcttcctttccaatctgaaggcctgttatctctttttcttgcctaattgccctggctagaacttctagtacaatgttgaatacaagtagcgcaataaatattctggtattcttcctaatcttaacagaaaagcatcccgtctttaaccattaagtataatggaggccgggcatggtggcttatgcctgtaatcccagcactttgggaggccgacgcgggtggatcacctgaggtcaagagttcaagaccagcctggccaaaatcgcaaaaccccgtctctactaaaaatacaaaaattagccgggtgtggtggcacacacctgtaatctcagctactcgggaggctgagcctgaggcaagagaatcgcttgaatccgggaggcagaggttgcagtgagccgagattgtgccaatgcactccagcctgggcaacaagagcaaaaaatccatctcaaaaaaaaaaagtataactgtgggtcaatgcctttttaacatatacgaatttattttcctagtttttattttctttccattcattaactcatgggtgatattctgtgatcacaatgtagtatgccagtagcaataaaaagccctaagatagttgtttaatagttctgtggttgaatagtgtttttattaggaaatttataaagttaatttggagctaataaaaggcttatgtatacagtataggacatgttttttctagataactagcatttatgtcacttagccattcatcatagtagtcttaaaatagttgacagcgggaatagactgaaaaggtgtattctccttttgtgggaataagaaaggagagtatcaggccgggcacgatggctcaagcctgtaatcccagccctttgggaggctgaggcacgctgatcacctgaggtcaggagttcaagatcagcctggccaacatggtaaaaccccgtctctactaaaaatacaaaaagttagctgggtgtggtggcgggtgcctgtaatcccagctacttggggggctgaggcaggagaatcgcttgaacccaggaggcggaggttgcagtgagccaagatctcatcattgcattccagcctgggcaacaagagcaaaactccatctcaaagaaaaaaaaaaggagagtattattgaataaaaactaaatagataatatactctatagctaattataattagtaatgtgggcttgctattaatgattttgctcattatcttttttattatatttaagtacttatatccttgttcatgtgctaatgctttatgtgtattatttcaaataaacctcacaattctatgaagaggcactcttaactctgtttgacaggtgtggttcagggaatggcgtcgtttgtcctcggtttgacaggggcagagttggaactaaagtctgtctgaatccatagtctaggattttttgtttgtttgtttgtttgagacagagtcttgctctgtcacccgggctggagtgcagtggccgatctcggctcactgcaatctccacctcccaggttcatgccattctcctgcttcagcctcccgagtagctggggctacaggtgcctgccaccatgcctggctaattttttgtatttttttagtagagacagggtttcactgtgttggccaggatggtctctatctcctgacctcgtgatccgcccgccttggcctcccaaagtgctgggattacaggcgtgagccactgtgcccggcctagtctaggatcttaaatatacattaggataatctctttccttgttgccaattttttttttttttttgctctgtggctttaggaagaattactgaaaaacctgttaagacccacagtgttatttgtttgagccatcagatggcaagtctttaaagccccttagctccagtggtttgaagtaatcattttattattaagacacaaaatagttacatcaacattgtggtgaatttctcagctgcccagactggagtgcagtgatgcaatcacggctcactgcagccaagtgattctcccacctcagcttcccaggtagctgggaccacaagcacacgccatcacgcctggctaattttttaatttttgtagagatgaggtctccctgtgttgcccaggcaggctggtcttaaactgtggggctcaagtgatgctcctgcctcagcctcccaaagagctgggattacaggcgtaagccactacacctgacctggtgaatttataaaataaaaaagtatttgctagtggcaataatcaaaagccatcaatctatcatcttttccccagcccaactttattaaagtaaatatgatatcaacatatagcacagctcataagcactgctcatatctagaagtgtatgcgattgtaagattttgctttttttcctatcctttcttaggtgtttgtaaaatgtatgaagaacatctgaaaagaatgaatcccaacagtccctctatcacatatgacatcagtcagttgtttgatttcatcgatgatctggcagacctcagctgcctggtgtaagtattagccaacatgtcttttatcttgtattttctattgcttttctgtctgtttgaggtgatttatggtattgggagctaattatgtgcctgatactgatctttgcatttgcatagtgtatagtaattaatatttctcttacagaaataagagattggcaacataaagccaaaggcacagaaaaaaataactttgctaattgatatagttagtatccagaaaggatcctaattcagaagttccatgtgcctcttctttgttccttatacctaattttttttttcctttacagtctttgtcttaaagccattggttttggattaaaactaagattatctttttttcatgacatttcaaaaacttaaatatgcgtatagctgaaatttaatttcaatcctacgctgtgtaagtacgtatattttggtatgttagagtgagattttttaacatatttgttatagtttgtattgataatctgcttctgacaattactaacaaggagcataaagtgttactgtagacttacctaatcttttttacattagcgaacagaaattgagtgtaaatacagctcatttaaccgaggaaaatggaagc

SEQ ID NO: 76411 - DNA, 1580 bp, Homo sapiens
aactttcccttacctttttgcctttatcgaagatggctgaaacagagtcagtagctgctctagctgccggaagtgactgtgcctctatgatccaaaaggctcttttgcgttgcactttcgacgacttccggcggctcctctcgcgaggattggctgttagcggcgttgtagttaagctcgtgtaacggcggcggtgtcggcagctgctgtagcgaagagagtttggcgcgatggtgagaaaggcctccgcggctacccgagtccgagtccccggcctccagagcgaccccagccccatacgttttcccctccccacgagccccatgcagcgccgcgtgatgctccccgccactctagtcggtggattgacccttcttcccgccgcagggacgccaggcctgactctaggcctcggagccccggtccgccctgcggttgcgcgcccgcctgctcgctcgggtccggcgtgccttgggcctgaggatgaactctctcccgattgttactcggtagagggagacgtgggggaggtgttttgttttttgagatagagagtctcactctatcgcccaggctggagtgcagtggcgggatctcagacccctgcaacctctgcctcctgggttgaagcaattctcctgtctcagcctccctagtagctgggattacaggcgcccgccacctcgctcggctaatttttttattttagcagagacggcgtttcaccatgttggccaggctggtctcgaactcctgacctcaagcaatccacccgcctcggcatcccaaagtgctgggattacaggcgtgagccaccgggccctgccggatatggtatttttccctccaaatgctctagcctgctgtaggaacaatgggccagggttgtctaactattctcgaagctgacagatccagctatacccagcatgtgggccaggagaggacgtatttgctttgcagtgttttttcagctttcgttttcctgtgctctgccttttttttttttttcctgtttttgagacctctaggtattgcgtgtggcgcgtccctcagccctcgatcctgtacttatctgtatttatatcctcttggggctggaggctgaaaagtaggctcagctcagagaccagctctattagaacccaaccgggatgatcagtaagctccaattcgaagaaagtgaccaaaactggcttgagaggtggtataatctgtaaagaatttgagcaggaaagcattgccatttaaaaatgataaccacttgaccacagtttttaaaatgtatcatgttatgttcttagtgatttttaatccttgtctttgggcagtaagtactgaaaatagtaaactttgcccggtgttcattttaagactagatataaaaagcaacatgctgtatagctttttccattcttaccctttcaaattagtcctttaatttgcattagaattggaatacaattattatagtagcagttgagatagctagtgtatagggcaacctctgttgcaagaatgcacgtggtttctacaaaattattttttcttaaatgactcgttgaaactttttgagtagc

SEQ ID NO: 76412 - DNA, 1087 bp, Homo sapiens
caaaagagccttttggatcatagaggcacagtcacttccggcagctagagcagctactgactctgtttcagccatcttcgataaaggcaaaaaggtaagggaaagtttccaagctttaggaagaattattttttttcaagacgctgtcttccgtactttcgttattaaacatacggctcaagtgatcaccggtatagacagtgacatcagacatctttcattagccctactcaaaaatggcggcaacgtaagtatcctgggccggaggtcggttgtaacccggaagtgcctttgtaaaggagggggtggttagacaatccggaagtggatggaatgaagagatgccacttggcggccatggcagctgtagtatcggcgactccgggtcaaggcccggtcgagtgcagtaccatgggcagcaccgggtatagggcagagacagctttgtgtcaactttgctgctgaacccctaggacccatcgttagagacctgcaggactcctttcctcatcccaggctcggaggagagtttgctgggactggtgggctggtttcctgctctggggggcggatcaccttcggggccgcctcttggagacaggggcgcctagggaacgaacaggttcgcttgagtcacttacccgccgccgcctaagacattgtgccaccctcaatccgacaatcgaagaaatcgatcattcgcacattttccccattgacttttcccatctctgttaacccacgagaatctaatgactggcatctgagaacccagagcctgggaccttagattgctgtaagctttctctggtgctaatatcagcaaaaagggtctgttgccgggtacgttcaagaggaaggtgcctcgtgaacacatctgctggtgggaaggcctaaagaactggaaagcccactctcttggaaccaccacacctgtttaaagaacctaagcaccatttaaagccactggaaatttgttgtctagtggttgtgggtgaataaaggagggcagaatggatgatttcatctccattagcctgctgtctctggctatgttggtgggatgttacgtggccggaatcattcc

SEQ ID NO: 76413 - DNA, 1014 bp, Homo sapiens
ttatactatttttcttagtatttaactctcttttcttcattatacttactctcattttaagctttgttttgttctttcgtgttttaaagttttgtgtctgtattagtccattcttacactgctaataaagacatttctgagactgggtaatttataaacgaaagaggtttgattgactcacaattcagcatagctggggaggcctaaggaaacttacaatcatggcagaagaggaggcaaacacatccttcttcatggggcggcaggatggagaagtgctgagcaaaagggggaaagccccttataaaaccatcagatctcgtgagaactcactgtcacaagaacagcaagaactcactatcacaagaacagcatgacctcccaccaggtccctcgcatgggaactacaactcaagatgagatttgggtggggacacaaccaaaccatatcagtgtctgattataataactgactcattcataataagtatctttaggggtttgagttacccgcaaatcaaaggtttattgtgtctgaagaacagatttattcagtatgcttctgcctctacaataggttctctttgaagtagatttaacaatgttacatttttaaggacttttatattgtctggtacattgctcttaccctcttatggtaatacaagagattttatacctgtttggaatttcatttgtaaattctaagatttgagccgggcatggtggcttatacctgtaatcccagtgctttaggaggctgaagctggaagtttgcttgaggccaggagtttgagaccaacctgggcaacaagtgagaccctgtctcagatgaatgaacgtaaattataaaattttaaactttgcaatctcagtaaatttatccatatctggaaagaaatcatcagcttgtcttttctcagattgaactacagattattgtttcataaggatccttgataaaactaagtttggatcaaataaaatccggttgcaatatgattcaatattatt

SEQ ID NO: 76414 - DNA, 1098 bp, Homo sapiens
caaatcattgttaacctggtcatttaaaaaatttcatctcagtcaggcacagtggctcacgcttgtaatctcagcactctgggagaccgaagcgggcggatcacctgaggtcaggagttggagaccagcctgggcaacatggtgaaaccccgtctctactgaaaatacaaaaattagccagatgtggtggtgcacgcctgtaatcccagctacccgggaggctgaggcaggataatcgctggaacttgggaggcgaaggctgcagtgagccgagaccacgccactgcctcaagcctgagcgacagagcaagattctgtctcaaaaaaaaaaaaaaaaaaattcatctctttgttttacttggcattactcatgcaattgatcatttttcatcttcgctgtctattgtagatgttggtctcacaaatgagcagctcacagtcttgattacagatacttgagaaactttttcccattaattaatcaaagtttgcaattatttcttttgctttctccccaggaacgactgaagctggtgactgttttgggtgctggccttctctgtggaactgctctggcagtcatcgtgcctgaaggagtacatgccctttatgaagatattcttgagggtgagaaagggaagagcattatttgagatatgttattgacttggagggttagcaggatgaagcttagtggtatgttttctgagcacagttcatgtttaccatagagttctaccctgagaagatttgttgagagatatcttgatatctttgatattgacacatccttagcagtttgtcaactgaatgtcccaattcatgaataccacttaatgtttatttgccacagtgcatgaatgagtcattttaagttatgacagttcttttttaatgcttactcaaacacttcccaaatcccacatgatagtggctgcattttttgtttaatttaaaaatatatagatataaatatttaaatttaaggaccctttacagtaaactttatagataattgatgaggacccatgcagtaaaggataactgaaaaaattaaagaggcctttcctgaccctaatagcaacaagcagagggaac

SEQ ID NO: 76415 - DNA, 1319 bp, Homo sapiens
tgtctcaccttgcgcatctctacatgtattcctagagtccagaggggaggtgaggttaaaacctgagtaatggaaaagcttttagagtagaaacacatttacgttgcagttagctatagacatcccattgtgttatcttttaaaaggcccttgacattttgcgttttaatatttctcttaaccctattctcagggaagatggaatttagttttaaggaaaagaggagaacttcatactcacaatgaaatagtgattatgaaaatacagtgttctgtaattaagctatgtctctttcttcttagtttagaggctctgctactttatccattgatttttaacatggttcccaccatgtaagactggtgctttagcatctatgccacatgcgttgatggaaggtcatagcacccactcacttagatgctaaaggtgattctagttaatctgggattagggtcaggaaaatgatagcaagacacattgaaagctctctttatactcaaaagagatatccattgaaaagggatgtctagagggatttaaacagctcctttggcacgtgcctctctgaatccagcctgccattccatcaaatggagcaggagaggtgggaggagcttctaaagaggtgactggtattttgtagcattccttgtcaagttctcctttgcagaatacctgtctccacattcctagagaggagccaagttctagtagtttcagttctaggctttccttcaagaacagtcagatcacaaagtgtctttggaaattaagggatattaaattttaagtgatttttggatggttattgatatctttgtagtagctttttttaaaagactaccaaaatgtatggttgtcctttttttttgttttttttttttttaattatttctcttagcagatcagcaatccctctagggacctaaatactaggtcagctttggcgacactgtgtcttctcacataaccacctgtagcaagatggatcataaatgagaagtgtttgcctattgatttaaagcttattggaatcatgtctcttgtctcttcgtcttttctttgcttttcttctaacttttccctctagcctctcctcgccacaatttgctgcttactgctggtgttaatatttgtgtgggatgaattcttatcaggacaaccacttctcgaactgtaataatgaagataataatatctttattctttatcccccttcaaagaaattacctttgtgtcaaatgccgctttgttgagcccttaaaataccacctcctcatgtgtaaattgacacaatcactaatctggtaattta

SEQ ID NO: 76416 - DNA, 1078 bp, Homo sapiens
gacagctgtgtgctcctggggtggcagcagcatgtgtggtgggtaccacagcagtcatggggaggtgggctcctagtagtgcacaaacagcagcagcaagaactcaggggcagctgcagcattctcatccaacagcttctgcagcacttcttagatatggttcctggaagctttgcctcaggcctggctccctggctctcccaatatccttttagtacattcatttcttttctgctgagtcaggtcagttgcagcttatggctgctggtgatgaggactagtggtgagtttgtgagccatgtgggccagagaaaggcaggatacctgcaatcattcaaaagaagtcctgcacggtagggcccagtgagcccagataatcctggggaaggctgattccttcaataagagaagtgaagcacaggtttcttcaatgacaaagagcaaccaatctttacctattccctctgcatacaggacgtatgaatagacctcagataatagcagttaaggctgggtgaaaggaaggctctgaggcaaacagctggagtttgatcaaccactagatacttgagtggtttctgttccccttgactaaccagcccagactgcaccaggtcagccttgggagaagctgtttctgcttccattgtgttctctacctcagctggtaggcgtgctgaaatcctggctgagttctacagaagacagaacaagccaggtgccaatcctgtgcgctagaccaagtgggtcagggccgcccaatcttgccaggaagtaagtgagaccagtcaggggtgaaaactcaggatccctaagtgccctacactgctcagacacagagctgatgttctaatacattatttacaacagacacatttcatttaatttttactatagacctatgaggtacatacatattatttttagttttccagatgagaaaaataaagttcaaaagcgttgtctacgtaagtcacatagctagtaatttcccagaacatgatataggtcctaaatatgtgttgaatgagggaaagtgacaagctgaagtttggcctgagtccttagcccttcccct

SEQ ID NO: 76417 - DNA, 1088 bp, Homo sapiens
aaaatacatacatatatatatatatatatatacacatacacacacatgtatatatttcttctttttttttttttttttgagacggagccttgctctgtcgcccaggctggagtacagtggcacgaactcggctcactgcaagctccgcctcccgggttcacgcgtctcctgtctcagcctcctgagtaactgggactacaggcacctgccacaacgcctggctaatttttgtatttctttagaagagacggggtttcaccatgttagtcaggatggtctcgatctcctgacctcgtgatccgcccacttcggcctccccaagtgctgggattacaggcgtgagccaccgtgcccggccacacatgtatatatttataagtgtaatataatatatgccagtagtgttaaatatgttcacattttgtgcaaccactctccagaactttttcatcttgtaaaactcaaactctgtatctattagacactccccattctcctaacccccagcccctggcaatcaccattctactttctgtctctatgatttttgactactgtatataccttatataagtggaattatacagcattggtctttttctgtgcctggcttgtttcacttacgataacgtcctcaagattcatccatgttgtagcgtatgtcagaatctccttcctttttaaagttggataatgtcctatcagttttcaggagaaaacctgattgaaatctcattcttctgacaaattgttggccaatggggagggccctggatgtcttaaaggacaagagagtcacagccaaaggaaactggatccctaccctttccttttccaggtttctccctccccactgtggcctggtgttagggatgctttggtgttcacgtctatcttcttcccagcagatggcagcatgctccgagctggcttgcaaattccaatgggaaagtgagctgagcctctgggagacggcgggggtggaggggttttggtgacaatctgctgcagttttgcactattggtgttgagtctcacccttgttctcccctttaaggtatgaaacaaaggactctgctttgtccatc

SEQ ID NO: 76418 - DNA, 1039 bp, Homo sapiens
catttggagatgacagcacaatctgcccacatccacccttgatggctcccgcaccgacccttgccaaacttccctatgtgtctcttgggctggaatagagaagcttgggggaaaggggctgatcaggactggtgagagggccccccaggagagggcagaggtggttgtccccaccccttctgcagcagttgccccaggcacctgttcgacattggtgtctgagacagtgttgctactgctgagggaacatcaccctggctcacctccatctttcaaaatatggcaagctgcacaaatcgcggaggcctcccagagaaacacagctcctccaaggtgtcaagccacgcccaaatgatccaaaaagcagttgattttttagaccttttaatcggccacctgagcaaattctcaccagttttgatagttttccagtttagtcccttgggttttctagttagacagtcatctgcagataatgttcaatttttgtcctttgccccctccctcattctaccaagtggcacaggaaattggttggtttggtgatgctgtttagctttaatagaaacccccagcccctggaggggctggattcctttgggagcagtgttccattccattaagcttccttgcagggtggggcccactccatgaagacagcagtcatgccttaagaagcagagctaccttacgtgcctgcccaggctgttcctgcctaaatctccagccctgcatgccgtctcaagggtgggccccagagagtttggagtgtaggattccctctgtgaaggaatcatctctacttctctgaggacaattagggtatccttggctgctttactgtggtggccgaagagctggaattgcctttgttgagagttgtgttcactatcagtggtcgtgtaccttctccacctgcccccaggaaaaagagtctcccccttaaatttcctggtaccccctcacctatgcctgaaagcatttcaccctctcaatgcctcacctttcccattcgccagatggaaccatcagtattcct

SEQ ID NO: 76419 - DNA, 5984 bp, Homo sapiens
aggcacgtacatacagactttccttttttcgcttggttttgagaccccagctatgagtgtggatctgactctccctcatgggagtcgtggctggggagctgctgaagtggagaaaagttaccctggacgaatttaggagcaggagggggaggtggttatggggacagcaagacccaggagcaaagaggcgtcaaaataaagtcttgggctggttaaagggaagttggcgtctgggcaaggaggcctaaagctgttgttcccacagaattttctttcagtggcaggcgacatgctgggctttgttgctctcgctaactgggctcctgtgtgctcttccagaggtgcagtaagattactcagttcaattaggcctagggatttactcccttttttgatctacagagatgggaagtatgtctttccttcacagtagttaattcatttcttgctgttttcgttcctctggtgtaaaaacatacataggagttacgcacacacaccttttctgttttgggaattccacacccaaactgtcaccatctagtggaggctagtagagacatgtgcttggcactgacttctgagttctctgggttttgtgtttttagctagaagcatattcaaccagaaattaaaattttcctggagttgggggaggtatgtctacatctcaggaaagaaggtatttaagcagcaataatatggaaaggttcttgaggacttactgagtaccaacctttgtgctaagggctttacttttttgaactcatttaataacagacttttgatgtagatattattatccccattcttctagttgagacccaaaccaaacaagttaaataactcgcccatgtcacataggtatctcatggtggagcccacagtctgaactactagattatactgctagtttctggtttgtttaccttttgataaaattgaacctggagtctttctaaaaccttctgaaagcactgctgcttcaggctgtttctcagatcatgagcattctaaactctttctcctgggtacacacttacggtatgtttgcataagattcatttgttcattctttcattcagtactcccaagtagttatgtgataccgaatgtatgccaggcactgtgctaggtattgcaggtactgcattgaataagtcagaatccagctctcatggactcacagcctttaagtccatttgttttggtttatgttgttagctttcattgctggccatttgctgctgaaggaacttctgcccagcgagttaaacagaggacagtattggtatgagtcctgatagataggacttcctgtctgcagagtaattttttggatactgtagtagaaatggcatatgaaacaaatcctcacttacacctagatagagacaggtgccagggtgctcagtgtttaaaccctgagagcaaacccactgtcaaatgggcaagtttgacttctttcgctgaagcctgccttctgaaagcccagaatttggtgagatagaagagaaagaagggtagaatgaggtgttacagatacaggctggcagataaagagacctcagcactttgtctgttttcctggtcagtctctgaggtgtggtgattgaacttgtgttcttttttattttttattttttttgagatggagtctcgctctgtcacccgggctggagtgcagtggcacgatctcggctcactgcaaccttcacctcccaggttcaaacgattctctgcctcagcctcctgagcagctgggactacaggtgcgtgtcatcacgcctggctaatttttgtatttttagtagagacttggttttaccatgttggctaggctggtctcgaacgcctgacctcaggtgatctgcccgtcttggcctcccaaagtgttgggattacgggcgtgagccaccgtgcccggcctgaacttgtgttcttatgtaatgttgcatctctcagtaggggatgtcctcctttgctcttttggtggggcagcaattcctgcagcagccttccctctacatgcacacacacaccccttccaaaaggtaataattcacctggtttctttaaagttagaacttctttcaagtttattgctactaagcattgtttcactccctccacacttgtccatttcccacataaaaacttggcttttgcttcaaatattttcttctgcccttttttcatatccttagctcttctgacaaccaagttactactggtatcatttgtaggctgggagaaatacagcatctttaaaaaaaaatagtgaggtacatactcttcctcatttcagtaccaaacaagtgaactgtggagaatgaagcagaaccacttgccagcagagagggaaggccagagggcacacgtggttgtctttcccctctagttccccatttattaagagacaattcacacttgcaggcccgaatgtcagcagatccattgggcccaggttgtgtaattgccatacatgaagtgagttattaagctcctgaaatgacatgctatctcctagttgaagctgacaagcaggatttattttccctcttctttctgtctggacactatggaagtcttgttagagggtgttcgctcaagcagtgggagaaagatcagaaggagccaatagaggagggagccccatgtcttgtcttcttttcaactttgagagcaaacattgctttgttgcagacttgaatgttgaggattaggacatttggttaaatgtaagctttgggacaaatgcaaaactaggggaaatagagactctttccccaggtttctcacgagctccatagtactcaggaacctttgggtggactgtccttgcgcgtcaagatctgttcactccacccctggcttggattcaaggcaacagccattgtgtgtcccttggatgagtgtaagtttgtgtttctgtgtaagaacctttcatcttaaaaagtacaagttctggggaaaggtgcctcttacaaggcttaggttttcgcagcagagcctgttaggcacctgtgttcttcttgggctgatgtgtctgcgatggtgtcctttttcttccctttttagttttttttggcctggaaaccagcagggtgcctccatttgctctctcatcctctggttcttacttgagtgtggaagtcgctccactggtggaccttgcagtggcactgagctgggtcacttcagccgtgaaaggccaactgtactactgtcaaggcttgggacagttaagcgtccgtgaaggtactggatacagcgacagcaggaagtgcagcagtgagaactgaaactaatttcacagactgtggtgttgcctgtgatgtagtctccctccctggctcttctatctcaaaaaaggaaaatagccacccttgaaacatctgaaggctgcgtgccaagaattcacacagtactcctgaaacaggatattactgaagcatttttctcaaacagaaacagatgtagttccctgttactgtcgccagtgttagtagatccttaaaattacctgacagcagtgtgcccctaaatgtactccccgctcctacacacatacacaagtgttttattttattttattttttggcaaagcctccttccttgatttgagggaagttagcctgggattcctgatgacagtaatagattctcagtgggtttgcagacggcagaggtggtgactgacaattctttattactcagaagaggatcttctctggtgaaaaatgattcaggattctgcagttggagattggatacaaaacctcagagaagggacacaaatagagatctttctcagcctcccctttcttgctaccctttgtagaggagagggaatgtctcatatttctaagtccaacctactgccagcagtgacttgccttcacccacagaaatttaagattagagtgtggaattgccctttatgtaaactgtccttgctgaaattttctttgactagactaggcttcagcttctgacaaagacagtaaaatgaaactggcttctgggaatggcataagagcctgtttatccaattcttcctttagattgttctcagttgagctcagcaaactaagtggacggaggcttgtaaaaggtaactgcaaaaagggtacaaggtgattttgcttaatttgcattttaaattatagcagtctatgcaaactgtttgaaggaagactgagagatgttttttggtggggaggcacaagattacagatagcttggaaaataaaagggaaaaaaaatcagcatgattctaccaccctaacataatgtgtattctgttttttccatcttcagatggtagtacctgtacattcagctttgtatttttttcacttagcttttttttttaacaggtcataaaattcacccatttaaagtacaattcagtggtttttagtatatttacagagttgtacatctatcaccataatctaattttgcaacattttcatcaccccaaaaagtcactccctatttctctacaatcccacctagccctaggcaaccactcatctttctctctatataggtttgcctatttggacatttcatatagatggaatcatatgatatgtggtctttaataactggcttctttcacttagcataatgtttttgaggcttattcatgttttaccatgtatcagtacttcattccattttattgctgaatgctattctgttgtattgatataccacattttgtttatccattcatcagctgatggacagttgggttgtttctgttttttggttatgaataatattgcagtattgctaagaacgtgtgtataagtttttctgtgggtatatgttttcatttctcaaggagatacctttaaagctgcatccatccatatctctactttgtggttaacattctcctaggttatgcagtttgtttgaggaagaacagtgttttagtaaactcttgatcctactgtggtgttgcggatattgccctgaatcaagaaaaggtgccaccaaaaaaaaatccaaaacccaaaaacaaaaagagagaatcctgtttttaagtttgaactctccagtagcattgtttccaaatatttggtgcagaactttaaccattggtgagagttgacagacgcgatagtgcctaaattcaatgcacatgtactgctgctttaaacaaataaagaggattttcaatgcgaagcctcagctctaaatctcatctttgtgttttatagagaggactttaccatgaacccccaaagccttccttatcaaatgtgatttatagttctcagaagcttttccttttcttgtgaaaaattccatgccagggttctgtgcacctgctcaaaggcttctgctaggttggggagtggaatgcttattgaacagagagccagccagcaaggtagggaggagggagagggtctgtgagtgccctgaaaatgtagatctgagaaagagtgctctttagagcagcccccacagggcttttccaggtggacctcaggtgtaacccgaggttaaaaacagatcatgccagacacaaaaaggagcagatggtgctgcttggagtgtcatttcctctacaggatgtgtccctgtgtggttttacatcatgccaaccatattaatgaaataatgcaacagaatgtctccttttgcccttgttccaattggaaccacaggttgagtttccctaacctgaaatatgaagtgctccaaaatcttaaactttttgagcacccacatgatggagaattccacacctgacctcatgttttaggtcacagtcaaaactaccttcagtctatgtgtattacgtgtaaatgaaacataaatggattttatgtttagaccagggtcccatccctgagatacctgattatgtatatacaaatattcgaaaatctaaaacatttgtgatcccaagcatttctgataaaggacactcagcctgtactagcacttgtgaccaa

SEQ ID NO: 76420 - DNA, 1020 bp, Homo sapiens
accttgagcaaatttaacctctttgatacttagttgttttttttttttttttgagagggagtttcggtcttgttgcccaggctggagtgccatggcctgatctcggctcaccgcaacctctgcctcccaggttcaagcgattctcctacctcagcctcccaagtagctgggcttacaggcatgtggcaccatatccggctaatttttttgtatttttagtagagacggagtttctccatgttggtcaggctggtctcgaactcccgacctcaggtgatccacctgccttggcctcccaaagtgctggaattacaggcgtgagccaccgtgcctggccgatacttagttttatcatttgtaggatagaaatgatgttaacactacccatctatagaagggtggctaccaaaattttgattattgcctggtgtggggaattctggatgtgaatggtaaaggataaagggaactttaacttcttaaacttgctttttgtttcatttgaattttttgctattggcatgtataacttgaataatttattaaaattacatttaaaagtactcccttgtagaattttatgaaaatcaaatgaaatgggatatttaaaaagataggtatgtgtctgacaactaaaagatacttaaatggcagtttggggaagtattaattagtggctgacccttttgtagtgttaaatgttctgtctgactgtgtggcttcaggtaggtctcttaactttgttaagctccagcttctttaactgaaattgggagttaagagtagtgtgtattccacggggggttttgaggattaaatgattctagatggttaagcagttaactcagtatctggcacatagttaagtacccagtaaatattaactgttatcagcttttatcctcactatgcttgaagagaggaggcagtgagtgtaactttacctactttaaagttacagaaaatgaggcacagggtagtgggtgacttgtcctaaggctagatgttgggttagcagca

SEQ ID NO: 76421 - DNA, 2252 bp, Homo sapiens
gatagggtcttgttctgttgcccaaattggagtgcagtggcttgatcatagctcactatagcttcgaactcctggacttaagtgcttatcttcccagctcagcctcctaagcagctcggattacaggcacgcatcactatacctggctaattaaaaaaaaaaacgtgttttttttttgtcttgctgtgttccccaggttggtcttgaagccctggcctcaagtgatcctcctgctttggcctcccaaagtgctgggattacaggcatgagccactgcaactggcctgtcccacttctttagaggactctgctctgactcccactagcttggcaacaggtggatcctagaggatgttaaagacctcatggaagggaccctcttaactaattgcaaaataagaatgttcattggaaaagaaaccctcccaccaccatggtggaagtccctctaaaacacaagttgttcaggacttttattatgttgctctagtatttatctggtttttgaagatagtcttgcttaaattaattctgatttcaagagtgatgactaaaagttttggaggaggtgtttagaaaaggatgaagctctgggtttatttcagggctaatcatgaatttgcaggagcagcttcaggacaccagggagaggcatggcacactgccttggagctgtccttaggatgctgctaccttttagggacatactgtaggcagtccttggtctatgtaaagttgtgcctgggccttatcagaaattaaacagatgttatttatttatttattttttctttttgagacagagtctcactctgttccccaggctggagtgcagtggcaggatcttggctcaccacaagctccatgccattctcctgccacagcctcctgagtagctgagattacaggcgcccaccaccacgcctggctaattttttgtatttttagtagagatggggtttcaccgtgttagccaggatggtctcgatctcctgacctcatgatccgcctgcctcggcctcccaaagtgctgggattacaggcgtgagccaccgtgcccggcccagatggtatttctagtaaaagtggcagatgttcttgctgtcagaattaattttaatctttttacatgtaaatgtgggattatgggactctttttggggggtcttagtctcatatggaagtgctgctcttactttacagagattttatctatcccttgctcttacccaaagtgactttttttttttttgagatggagtctcgctctgtcacccagtctggagggcagtggcgcgatcttgactcactgcagtctttgtctcctgggttcaagcgattcttctgcctcagctcctacgtagctgggattacaggcacctgccaccacgcccaggtaatttttggatttttagtagagacggggtttcaccatgttggccaggctggtctggaactcctgacctcaggtgatccacccacctctgcctcccaaagtgctgggattacagacatgagccactgctctcggccccaaagtgactctgaactctgttttcccatcccctctgatcactttctctcaccacgtgggtcatttgtggtggcaaagtacaaagtgaccagccttctctctcatagaatttgaaggttgctgatggggctatgttactaatggggctgtgtgcttgctacagagatactgctggtgatgaaagtgtatgacatttctgttattcctttgggttaagacatctgtatttagcaggtattatacctagaaggagtgtctatatcagagtatcccagaaaagaaagaagaaaaatcccctggggagtgggaaaaggcagaaagtattgaatgtgtgccctgtgccaggcagtgtgctcagtgctttaactcggtaggctaatcttcactggataaatcaggaaaccaagctctgaaacatttcagtactgttaattactgtattggaactagaaccaaggttggagtgattctaaagcctgtggtgggtttttttttttttttttttgagacagggtatcactctgttgtccaggctggagtgcagtggggctatgtaggctcactgcagcctccgcctccccacctcagcccccaaccccagtagctgggactacaggcacataccactacacccagctaatttttgtattttttgaagagatggggttttgccatgttacccaggctggtcttgaactcctgggctcaagtgatctgc

SEQ ID NO: 76422 - DNA, 1676 bp, Homo sapiens
tatgttatataaaatggaataaatttcaactctaccaagattgcatgcttttgggtcagactgtttagtttgatatcttggtctcatcactttctatctgtgtaagcttggataggttatttagcccttctgcttctgttttttgttttgttttgttttgcctaaaacggatataacagtacctaccttttaaggttgttgcaaggattaaataagatattagatgtaaaatgcttacatctgtgcgcagtgactaagcactcaaatgccagttaataataataattctgtgattatcctgaggtttcatgtttctggagtaggattatgaccacaacatttacagaatgaagtcctgcaggatgacaaaacatccctgtccccattgacacagccccaagtcacgggcttgcaaaagaatgtttgccatccctaggaagcctaacacagggcgctgggaaatgcttgcaaaagcagatattctcaggtcacatccttttagttttctgaggcccctgtgtttaaaggtacagcatgactgttctagggtggtcagaatctgtcacaggtgggagggaagtacttgtttagaatatggcagagaatccaccaaggtgttaataccaacaacagtttcttcttcattctgggctttttcctccccttatgcttgtttaatggttgggaaagagggctaaattgtacttttcctttgtaaaggtgcacatctcaaatttgtttcccctagtagcttgttttttaaaaagttttaagacatgacaaattatacttctttttggaagaaagattaggaaatacaggttaatggcaacccttccagagagcaccactgttcaccctgctattgccctgctgcttctctccctggtctaggatgtcagggacggcagagtggccaggtggaggggtcaggcttcagagggaggagctgcatttctgggagccaggctggccctcctgttgctctcagggctgacacttctctgtctcatccctcctccctcagtaaatgcagctggggaggattgcctagaaggggaaaactcatcgtgtaaggagaacacttccctcgtggcttttaaaatgtaatgcttccttccccttttctcttcttcccagagtaagagctgccagtaaaacttcagtgcaggactgttgagacgtatttgtcatgatgtgatggacaaaagaattgtcagctcctcctttctgtatcatctcattgatccccctttacccccttgcaaatgagaattacaggaaatcacaactagcattaaaaaaaaaaaacaaaacactgggcagatgggaaggatgaaatgtgtaacccccgttcccagaaacaggcagaatggctgagatgactgaccctagcatttggtgttcactgagccaaagcattgcctgaagataatgacaccgtctggaaatcaaaacctgagtcttcctgctctcatccaaaactcccctcttttgagcttctccaatctagtcagtgacccgccctcccagttctttctttcacaggttcctatctccaccaccctaaccagaccttgtcatccgctggccttccaggctgtttcaatctctcttgccaggttcaccctgctagaacacggttctcctctccggtgagactaggtaagagaaaa

SEQ ID NO: 76423 - DNA, 2350 bp, Homo sapiens
caagaatatttgttgacttcccactacttactgatccaaggcagaatttctctgcctgtttttcatggctgtgcaaactggccttaccttaaatattcagttgaatactcaatactttgtggaatagccagagtctgctatgtgacagatgctaagaaaaccagcaagaactgtcccttgccctgacagatttcagaatggagtttattttctgttcttccctgatccttggcctctcttcccgaccttaccctgccacccgctatctagcatgtttgcttcggcattcctgccccagaaggaatgttccctctttacaccctcatacttattcagccctcaaagctttcaggtcagatctcctttctttcctttttaaggcgctctttgattatcttggttcagattaatttctttttttcctattttttcattattttgttcataactcacaaatagctgcagcttattcttccttatattctaatcattcatatctcactggttagcattttattgcacccatgtagaatactgaaatagacatgattgccttattgtgtgttttgattgtttgctgtttgggtttgcagcctcctcaactccactgaaattcttggtaggctggggattgtgccttctttgcattttaaagctgtatatagaagattgtcaggaaatgatgatacatggaataaacaaatgtgaaccattggaggtgaaaggcgacctgatagtactttgggagtgcagttcccagtaggattttgggtggcctggagcacagcagcagctggaggctggggaccatccagttttaggactctggtgaccaagacctgagagaaagtggaaaggtcaggaagggtcagacttgtctcccaagagtttgtattatcatgggattctcttgaaactctggttcatgtggaaaatgtgcttatcctagaagttgactagggttcttggggaatgatggtgaggccagatgcctctgtttgatccaggttctctgcatggtgaatcaccccagaaggagggtgtgaaaggtgcctggccacagggaagcttatagcttcagggaatgaactcttaggagcaatggtaagcagacctgtcagattgaggatttgatttatttgtattattggcacttgtattgatttttctggggagtttggggatttgaatgtattttgcaaatacaaacattttctttgtcatgtcactgatgtggtttataggcttatgttgcattttttctttgaatagtagaatcttgcatgaaattaaaagcagtatcctccacttctgacttggtagggctttaagcatcatgctaacttttcccctccatctccctttcatttcttagatccacctaggactgtgaaataggttggtaacatctgtgggctaggacggtttcagccagctaaattccctgttacacagtttagatttatgaggcacatctaaatttactggaattctaggtaggaagtgtggttgcaaaggcaaaactctttgtgattgtagcttgtatgaaaatagaagcagcttgaatttttttctcacaaactttatccaaaacatgtctttacatcttttatttctggtaaatggattttggggtggcatccccactactgttgggatgaagggatataacaagctagagggtgatttcacagaatcctgagcctttgaaaaatgctgttgcttttgaaaagtaataaatatagaagccaggccacctttttcagatttataccctcttcccattctattctcagctagtaaatactatggcctcagtttgcctaaaaagataatggcttaagtttatttaaatgtcagcagtagtttggtaatgaattaagtcctttgatgatgatgatgacgacgatgaagatgatgataatgttgatgatgatggaggacactcagtagcagtggactgagttgtggactagttctttctaaggctcccaggaagaaaattgctaactcacttaatatgtgaaggccttagtgtcaggtagaggaggaagcagctgtggagtgtaaagaaatcatctgcccaaaggtacactttagagaaagactttggatgaagttgtgtgttttctttttggaatagggtgtattgcttcttttgagaaggccttttacaatagtacaatagttcctctggaactcatagcaggattctttttccaccctcttctatatttacagctgcttttcccctaggggagcattcatctgttttaaaaagcagggagagaaaacaagttctgtcaaacagtgaggtttggaaatcagaactgtacttacttgcctttca

SEQ ID NO: 76424 - DNA, 1027 bp, Homo sapiens
tacactcaaagctaatgagtgctttcttccactctgcacacactcttgctgcctggagtgggcggcaggctatagaaccacaatagagcaagtactgttgctgttgaaggcatagacggaggtgacagtaagggcagctaggccctgaaattccagtggctcagacccctggctgatggcttacctcctgaggtgagaccaagaggaaggccttcagcttccctgaaatgagtgcttctcacagttaaggtagtgtgaccagccaggggtagggactggcttcctgaggaagagggtgggagagccttaattaagcctgcctggtttggcagtacctcagactcgcctcctctttctgtgttggctgataatttccttcagctcttagaacaactcttcatttcctgggggaacccattgttgccaatatacactcacagagcctatctccggtactgccatgtgtgctttctgcctcctttccagaagaggcaggtagccagtctttttttctcatgagctgttcctaccttgttggagttcctggaggctagtgctgctggacctccagtctggcagaggcctggacgagagctattccttgggttctcagaacagacctagcctagtggagaacagttctgggcctggctctgtgtccagaagggctcagtcagtggtcagattctgattgggagatatatgaggaaactttgtttggtgagagttaggagaatggggttctggttcagccattctctcaagaagtcatgatcatttgataggcctcagttttcctctcctaaaatgggtagattggattttataagatgatcccaaagttccttaaggcagtaatgtgttaggattccgtgacaaacccgggagtctgcccctggtctaggtgaccaaagttagcaaaggctgggacagcacagattgcagttcccaggtctcttttgcctcccagctttttgatgtgtttcttctccttggaatgccccaccactccctgtacccacctctt

SEQ ID NO: 76425 - DNA, 1007 bp, Homo sapiens
tgtatttttagtagagacggggtttcaccatgttagccaggatggtctcgaactcctgacctcgtgatccgcccgccttggcttcccaaagtgctcggattacaggcatgagccacagtgcccagccccaggcatcatcctttattgttctcactcacctcatcctattagtttttgatatattctatagcatttggcacatcacaggcactgaatgaatgaatggatggatggatgaaaatgtttgtttatttcatccaaatttaattacaattaagtaccttggccttggtgaagctgaatgctcctggttacactaacttttgggaaggtcatttgatttttggccacactgaaattatatcaggaagactcttttgaaagataaatactttgttggaaggattagtcattattagaaaggggtggattggtcactctgctatcttttagggctctctaaggaactgctgagaagtttgtttatacagttagaggtgaggtgggtgaagtcaaattgtgctggctggtggagtgggggtggggttgtccatggtgctcatgggagtacagatagtgtgttggtgaacttgccacaatgctacggatttaatgcaagaaataggcaaagcttttctgctgggggaagtaatatgccccatttcactcactaatggatgtcctaattgtatgctagtatttctaacataaaggctgaggatgtgtatttaaccgttttgccaagtttatctcccttttcttgctgtccaaccccctggaaaaaaaaaaaaggaaaaaaggagaaagtgacttaaagaatcaggatttgggctgggtacagtggctcacgcctgtaatcccagcacttcgggaggccaaggcaggcagatcacatgagaccagaagtttgagaccagcctggccaacatggtgaaaccctgtctctactgaaaatacaaaaattagtcgggcttggtggcgcacacctgtacttctagctaatcggg

SEQ ID NO: 76426 - DNA, 1127 bp, Homo sapiens
tcctctctctgccatccttttggtgagttgttcttccatttctttatctttctttgtaagtagcactgtgcatgcaaaacactgtcctgggagctctaaatttgtgcatgggttcaaggtccaactcaaagctttctctttcacttctccctactcccatcagaagtctttgttcctgtgtcctctgtgttctcatagcactttttaaaaaaccttctttggggccctagtaacaatttgacagtgttatatagataaacataattcctctcacgtaagttgtgaattccttgagagtaagaattgaactgtgccccaattcatctctatgatcacccaagccttgcatagaagacagccagtaaatattagctgaattgcagtatagtcattggagacacagagccctaagaagtcagctttagcaaatcggcttcccggactttatttgccaactgggtattgaagcctgttccactcagccctgatgggaaccaagcagagagatgtgatgacacatgagatatatctctagggtctaggaaccaattacagtcgcctctgccaagcatctgttttgctacctggccaaaatttcaggatttatataatcttttccctcttgttttatacatgctgttattttgccattttgtatttttctatacaaattatatcttgtgagtttatctttttttctcattcactcgagaagtattgttgagcacttgggggcagagaattggtggtctctgcaggagtttattacctgcggaaatgcagcatacaaaagttaaataactgtgagtggccttcggggagggatatgattgactgtcctattcctggtccaggcagggatgctgagggtttggaagagccttccatgcctttgggctgaactgagaaattctccccaaactaagatgggaactaagcttgaccttttatttggaaaacaaaagagcagggagccctattagggaagcaggaggaggaaagacttccaggcctcttgaattccatttatctgtaaaatggggctaattccacctatttaatgaggtaatgagtgtgtgtatgtgtatattcccttagtctgccagaaactaatattattttaggat

SEQ ID NO: 76427 - DNA, 1366 bp, Homo sapiens
actgcacagcaacccaatgaggtgggtatcatttatccagtttacagacggcgactgtacctagaccacccaattgccctagaccacccaattgatagtatctgccataatttttccatgatactggcctccctgagagatacatagttcaagtgttctgttttactgatgagaaaacaggcatggaagcaaagtgcttgtccaaggttggcccctcagtcatgttgaagctgggtttggagaaggggtttcctaccttcaggtcaggaacttacgacaggctttgttcctgctcacaggcactttgcctcctcccccctctttttctgtctggtcttatttgttctctcttgccttctctcttgcatcttttctccctttctccctgggcccctgtatctctgcagtgtgcagaggctgggttttgttgttgttgttgttgttgttaagatgtgttattttttgaaagcattttaggaacactgtgtacggatagtccatacaaatgtgctgatggattgattaaaccctaaagggaaagtggactgtcctgggtttgctgcaatgcagagggatatggatggtagggatccgtcttgggaagatgtaggggaatgtgctgctcagtcagaacaatgaggatagagttaatgttgcttccttccagtcagagcctgtgttgacttactttttagaggaaatacttttgggcccctcctattccctagaagacattccagttttcttacagctgaaaggtcctttggggatcatccaggttcacccctgagacagaaagactcactgacttgcctgaggccaaaccgcttttcagtggctaggacctaggctgtccctcctgtcctgtgatcaggtccctgctgcagtcatcctgctgttaggtgctagagacttgttaaagagaagacttaggtggggtggtagtgtgtctgctggctttcctgttgtctgaagttggggaaagcgtgttgcccagatgatgtgagcaattctgggggtggaagacaagggcgcagggaatatcaaagcaattcaaaaaaacctctgacactgtgtaatggcttaggtggcttaagaggaaagctgagggtaatgtttgtgatttggaggctgtgtgattttaacaggagtttgatgtttgccttttcaagtaggagctggagattaaaggaaatggataagttaatattctggcctgaaaggatgtcagagtccggtaaaatatgtggctgtcgaagcactcaagtgttagtggcaaaaaggaaaggggaagatatagaagttagtaggactggaagaatccattgatccacaatgggagaagatagaaggcatctataaataa

SEQ ID NO: 76428 - DNA, 1045 bp, Homo sapiens
gcggaggtgggactgagtcattgaggccctctcctctgtctcagctctaagttcagatgtgatattccttgtgaggatggccgagtgctagttttgaacttgatgcttagttctaggttcctcttcagtgataattttttttaattaggaggagtagtcactaacatgccaaaggaatactgaagtgaaatggattctttttgtttaaacaaagttttagcctcagtatttctctagggataatgaatacctagtgaaacttttttttttttttttttttgcttggtgtactaaagccacaatccaaggacaagtcttgtttttttaaattctatattcaaggcagattatttcttaaaatgattagatttatactgtggccctttctccacagtagctgggttctcccattctgggcaatactttggagatttaggggttagctttcctctgttttatttctgaagcagtaacccttggcctagccttacatataaacaccccactgactaccttctatttatcttttctttgcaaagccctcatttccatcaccccgtctgttctgcacctgtcccgtcttaggcttcaggatggaattggttcctcgactcaggtagctgcttaagcagtaagggaggagccagctattcctgcaaagcaaaaccaaaaacaaacaaaaaacctaaaactgatcaggaactcatacatgtacatcttgtctgctccatttccataccggctcctccccacagtattcatgattttggcagacctttgctacctgcctgtcagatgccaggccttgtgctggctattgaagattccgagttgagtaattcactgtccctgccttcaaggaagtctcagcctggtgtggtgagacagataaacaaatagatacaataacctgttaaaggtacagtcatagcagggtaagaaggggtcatttctacgttggaggtgggtgtggtgtgaagtgtcaggaaagaattcctctagatgacccttgtgctgagcccctaaaatgactctattcctggta

SEQ ID NO: 76429 - DNA, 3506 bp, Homo sapiens
cagattaaaatcagatttggtaccaggtgcagtggttcacgcctgtaatcccagcactttgggaggctgagatggcggatcacttgaggtcaggagtttgagaccagcctggccaacatggtgaaaccccatctctactaaaaatacaaaaattagctgggtgtggtggcgggcacctgtaattccagctgcttgggaggctgaggcaggagaatcacttcaacccgggaggtggaggttgcagtgagccaagattgtgccattgcactctagcctgggcaacagagcaagactgtgtctcaaaaaaaaaacaaaatcagatctgggtagtatccctggcagagtcccaggggcatcctttattagggttatagatggcagactccctaatctatgcatataaagccttattaatggagaagggggtgtgtgtgtgtaacttaaaaaaaagaagtgtaatattatatggaatacctgttgtaaactaaaataactggcaaatgaaattaaataagttaactgaaatataataggcccacaccataatgtattgtaatgtatcgtcaacccatttacctccctaaaggcttatagaaaagaatctttaaagtcttgagctctgatacacacactctttctcactctctctctgtctctctactggttcctatttttctgaagtctttgtctgaactagagtgggtgggtggtagggctagttagcaattgcagcccattctccatgcctccccccgtctcatctttttcagggacagccaacataatgtggtcacaggtgtgttgggtgagccttgattaatgagattcacggctgtcgagtcaggtcctccggctcatcagcctttggcagtttagcaagcaggctggggccctcagctcccactgctgcattccttctctaggcggtgtattctctctttacgacacgtgttctctctctttttttccttttggttagttgaacttgttctgagtccaagtggcaaaggcaaagcctgacttgggtgtagcagctctgtgtcaatagccgtctctctgctggagcctccaggcaggcggtggggcagagctgggcagtttctgaaagccctgctgtgcctgactgccatccaggtgagacagagctcacctcctggcttctgcacgctgcaggccttgtttccccagggaggagttgaaaagccacttctgtgcttgcctctcctggcagcagggattcgaatagttgctagaattctctcaactttgtgtgtgattatggcttccttaccaaagtggctgcttttaactaacttatggctgaagttttcactttatgtccttgtttgtttgttacaggtgaatcagctcccggccgactttaggattcttctggattttaaattttttctttttaaaaaaacttggacggataaaagatgtgccatggcaggatagcaccaaagagcacctcagtgtttgccgtggcctccgtgggacatggagtgttccttccgctagtgatcctttgcaccctgcttggagacggacttgcttccggtaagtcctgacctgccttctgtgtgtgggtgggaaaatatttaataccattgtttctctcgaagactaggacaggggactctcctcctggcaggcggtttcagggagagcagagggtggagggcttttgtggtaaatatagcagggagccagtccttctgaggtctaatgagtcacctggaggaggggcgtgtgggagcctgctggtggtaaccttgtcacccctctcccccagccataatcatcatcaggaggacagaggtgtaaggttcagagcacaatatgcaggttaaggggacagactttggaatcagactgcctgtgttcagtgcccattctcactacttgcctgccctgtgactctgaacaagttattttactgctgcaaggctctgtttcctcagctgcagaatgggataataataatacctacctcactgggtggttgtgaagattgaggtaataaaataagtatgtaatgattgttagctgtcttttgtttgttcgtctttctgcgctttttctcagaatgagtgggtagttgaagtattgtaatttagtgaaaataagacccggtcactgacactacaaatgttgtgatcttgggcaagcgacttaaccattctagggctcagtttttccctccatcagatgaatgggtttacctggaataacatttaaagtcacttctttgcccctcagtaaatgctttgatgattctaaggactttgtggttgaagatggtgagctggacgggccctagcaggggctagacatgccccattgagcctttttgtttgtttgtttgtttgtttgtttgttttcagagagtctcaccctgttgtccaggctggagtgcagtggcacgatcgtggctcactgcaacctctgcctcccgggttccagcgattctcctgcttcagcctcccgagtagctgggactacaggctcatgccaccacacctagctaatttttttattatttagttgagacggggtttcaccatgttggccaggctggtcttgaattcctgacctcaggtgatccacccaccttggcctcccaaaatgttgggattacaggcgtcagccacgtgctcggcccattgaacctttttgagtttgtacagcccttgttgccttcaacagtgctccagagacccttctaggcagtctttgtgtgatcttctagacaaaatgtccttaaaggacatgtttgggtgtgtacggtaggcctctgggtggtgtgccacaacctacctctgtgtctacactccagaatcatcattgaactcaccaatactggtgttcctactggactttgttagaaacacatacatggcagtttccttgtccagtgcttcctggagagggatctcagaactagatcctggaaggggactttggtggggacagtaggggagtggtatattgtggctgtagagcctccatagtttagtgctacttctttcattctctatcagctcccaccacccacttatccaacataaacagataatggcacagtctcagctaatcttttttttcttttcttttctgaattgttggaagaaacaattacagatttttttgttcattgtagccttctccactaccaacatatagatgtgcctttccttccaccctattctgacacttaacccaagccttttccccctaggcatgaggagcccctggcacagcccagggggccatgatgattgggaccccacaatgtggccatcatggttatatgaggtttcaaaggaagagaagaccaggctataccaatgtgcaacaaaatgaagcagagcctcctttcatagggtcaccccaaaaccagaggaggcctctagaagtgctagttgcagaaccacagagtgtggttgactctcttattcaccactgtgtctttagagcagaagttggcaaactggcccacaggc

SEQ ID NO: 76430 - DNA, 3425 bp, Homo sapiens
tgtaaaatatacagccttgctatccagtgggctgtagtagaccctggctatatgcgtgtgtacaggcacattcatgactctgagaataccactagacataggtaactgggcatcctctggagacaatttgtctgcatcgtctctggtcgtagataccacagtcatcataatctgtatcatctcatcatcaaatatcacagttttgatcacagtctaaggtaggaagaatcaggtacttgagagttctggagtaaaattacatcatgtttaaagttcagtttccatactggtttctctcatctacagctcgagatttgcagttatagcagaaaaggtgttagagaggcattgggtccagctttcctttggtcattcctttaaatggggagaattattgataagtttcctttttaagagtggcaaaaggaggcgtatcttattcttcacacctagtcacaccatgcagtggatagaccagaattaaaaataaaatctatgcacatgctatccaatttgcctttcttggactaggcggaattaagatcttttctctgtagcagcctttctcaggtctccaagtctttcattttacctgtagtcttaagaaacttgctgtatgacctgaggcaaatcacatgacctctttgtgtcttttgcaaaacagaaacaataatccttaagaatgttaagttggtgttgtgtagactaataaaaatgattggaaggcaggcacttggcatataaaatgaagtgtgtgatgtaattcccaaataacaacaacagaattggtatgtgacctactgttgagttacaaggtgcagtagactttttatgcagttgatattctttgctgtcattgaaacacaaaacttaaggtgcaaagtactgtttgagttggggataagagatttttggagcagttatcaaatttgaccagtaaggagggattaatttacttcaggaatccccattgctttccagaaagctcatgtttgcatagtttgatcttaatccaactggcttgctgactcataaaaagtttttgtttgcattctctttctttcctgagcttatttactaaacaaactcagtattttacttgtttctgatttttttccccttaaaatgttgccatgacatgttaggccgtgttaaacatcacacaatcacctaaaacaattttagaatagcagggaaaacagccatctgcatttctacatgacagaaagccaggcagttagttttcattgaaaatggaaagtgttgagaactaggttctctgggagatgacttggctttagcctgtagcagagagatgttggcaggtggccctggctcacctcatcttggaaggaccctcgagtcagagagaatgtacactgagttgagaggagaaaacaaatgggaaactaatgtgtatagagcatcacttatgtgtcaggctctgttatcgttccatataaagctctcagaacaccccagctaggcagttgtgcaaccattttataaaggagaaactgaaccagagacaggttcaataacttgttcagaaactgatgattttaagtggtgaggctggctgggatttgtgctcagtatgtctgactcttgcctatggtcttttctgggagccacgctacctgtgctgagtgacaggcttcactgagacctgttttttgtatttcctgtttgaagtgctcagatcagcctccagaaaattattctgatggaggaagaaagagatgatgttttctcctgatggataaaaaggatacaagagtcatctctgggtcaccatgtttcccactatggttgtttctttttttttttttttatttgagatggaatctcactgtgttgcccaggctggagtacagtggcgcgatctcggctcactgcaagctccaccttccaggttcacgccattcttctgcctcagtctcccgagtagctggtaccacaggcgcccgccaccacgcccagctaatgtttttgtattttttggtggagatggggtttcacagtgttagccaggatggtctcgatctcctgacctcatgatccttccacctcggcctcccagagtgctgggattacaggcatgagccactgcgcctggccctctgtggttgtttctgttctcatctacagtggctcttggttgtttggttccagtttaggcacaaggtttgccaaggtggttctattcttggaaaggaacaatagggacgtagtaaatagtttgctaaatgaggatatagttcccaaaacatccgcaaagcatcttcctgtcagctgcaaaccctgttgatgaaagtgatgtaatctctccatggtgtaattacctgtgactataaaaaaaacttagagattatggtaggaggctggatgggtcattatagttctcgatgaaccctagtgtcatgaaaaggcattgagaaattaccctctgcacactaattgttgtgccatgtttaaaacattgacaacacatggtaccaccctcgcactgtaactttctaataaaagaaacccagagtccacgtaactgggtccctattgggttaaagtcctcattaaacacagattccatctgctgagcaatggtgccccactaccctgctaacttgccagcttagaggttattcttcttacctacccgactttctgcaaaagagaggcacaggatgctaataaaacaaaaattagggttaacactcagtcttcaatgattctaggtaggtttccagatgaacacctctcaccacttcttacccactggaagagtgcagtgcatcacttgggagtgggagcctgcagagggtgtgaggagcccttccaggtggcctgtgctggtgtgcctggctgcctggactgggatcagatcaggagagaccttggcctgcctcagatttagctttggggcccagagggacagaaacatttagagataacgtttccatggtgcaatgtgaatgaggagttccctggctgctgacttctttccagccctgttcatcgacctcatcttcagctaatttaacacatgaaaatccgaattcactgaaagatgagggtgtgactataactttttttttctgagacagggtttcactcagttgcccaggttggagtgcagtggctctgtcacagctcaccgcaacttctgcctcctgggttaaagtgatcctcccgcctcaccaccttagcctcctgagtagctgggactataggcatgcatcaccacacctggctagttttttaaaaatatttttgtagagatgggttttgctgggtttgcccaggctggtcttgaactcctgggctcaaacgatccacccgccttggcctcccaaagtgctgggattacaggcattagccactgcacctgactgactataactttttaagaacaggattgtccc

SEQ ID NO: 76431 - DNA, 2591 bp, Homo sapiens
gagttagatccttgatattcgtgaggttttctgagtccctaaattctcaaataacacatgttggtttcccatacatgaagacgagtagcaaagagtggtaaatgcccttctgagatgttggtgctggagtgagatcagctaagtgatctcactgtgaactatttgttctcttcagggaggctaccctgttggtatttcagagctgatattcctcagggatgctatttgttaggaacatttggagtcagttttgaaactttacatattaaatatgagaatgccaaggatctgttcttttaaagacattttttatttcgtcagcacagtgatgtgattggaaggttgcattttacatgattccaaaacacaactgggagaatataacattagaattaaaaaataagaaatatctttttcccatttggtagtccttttgcttcctcttgcttttcgtagctatattggtatttcttcttttaggagcccctttctacctagatttattggcatccctggtgatggagatttttttcttgtttaacttctttgacttattagctttgccagtaaccagatcttttaaaggagaattgtttagtcatccaaaattctgggaagtagtgcagggaaggtaaacagattgtcttcaagatttcttggccaagttttttttttcattctttttaaatcacaaaagtatttttggtatttcagtggggagggggcacaaaatgtgtttcaggaagttatgaccaagtaaaaacagggctataaaataattctgcttcatcctttgttattctgagtaacaagtgacactctatgaaatacaaagggcttgatcaattcttcccatgtagtagacacatgtctccttgggagagggcgggacctttgtgtttattgtcactggcttggcttctgatgattcggccttgttgaccctggctatggtaagaggcaccagagaatgtcattgggattgttgcacactagactatgactgagtgggtatgaggatcagcctgtcagtgtttcctgagcactggtctaggcacagaggggtttggtggcagataggagaaaagtcttggatttctctttttccctgttgatctcattatgatccagaggctggattgcaaatgacccagtggagtcttcagccagtgcagccccactaaggctccttgataactgtgcatggttgctcacagtttcttttttttttttttttttttttttgagacggagtctcgctctgtcgcccaggctggagtgcagtggtgcaatctcggctcactgcaagctccgcctcctgggttcacgccattctcctgtctcagcctcccgagtagctgggactacagacacccgccgccacacccagctaatttttttttttttgtatttttagtagagacggggtttcaccgtgttagccaggatggtctccatctcctgaccttgtgatccgcccgcctcagcctcccaaagtgctgggactacaggtgtgagccactgtgcctggcggttgctcagtttctgattagcggcccatgaagttagctggagcccttcagtaggctgtgtggctctctgttttatacctctcacacacctctctgagctttgatatctgtacacactgctttcggttttatttctttggttttgctctttgtttttgattcttgttctttgttcttgattccatatgtgtttgcatataagctcgttgaacacagagacaaaatcctttttatgttgctcctttgctacagccaggccagtgatcatcccagtagatccaacacacgcattgtgggaaaggtactccataggtgggtttaccccataggatgatccagaatcatggcttgtcctctgtgtgaggaaagcaggagcaagtccagggcccagtgagcagtagcagtgtgtgggggcttcccactgagtgatggttcctcatagtattctgtccccagccttctggggaggaagtggaggagcacgtgaaagtgttttcatgcctcagggatgcaggtggtggggctcttctgtggagaaaagagagggcccaggcaacctgcctagaagagtacgttgcagagtatgctacctttagcttgggtgaggatttcgaacccagtgtggatcctgttaggtgatgaagagttatatagtttgaaagtatatccccagctgggtgcagtggctcatgcctgtaatcccagcactttgggaggctgaggcgggtatatcatttgaggtcaggagtttgagaccagcccggccaacatggtgaaaccctgtctccactaaaaacacaaaaatcagccgggcgtggtgatgcacacctgtaatcccagctacttgggaggctgaggcaggaaaatcgcttgaacctgggaggtggaggttgcagtgagccaagattgcatcactgcactccagcctgggcaataagagcaagaattcgtctcaaaaaaaaaaaaagaaaaggaaaagaaagaaagtatacccctaccaaatctcatgttaaattgtaattgccagtgttgaagttggggcttggtgggaggtgtttg

SEQ ID NO: 76432 - DNA, 1052 bp, Homo sapiens
tcattaccagtgggaagtgaaggaggaatgtatatggaaatcatgctggctgtaaacatatcctgacattagagaggggcatgagagtgccacttgggtggggtttggcttcactttcttgcctactgcctttgcagccacagcttcctctacctctacgtctgtttctaaagatcaaggctaagggacaactccttctcccctaaacatcttcaagcttattctcacctggttcttcctgtggctagaattctacctcctgccttttcctcccatacttctctttatccttcaaagtccaacttagcttcttctgtggaacatcacccatctctcttaccactagaattaatagggtctgaaggaaggagagtgggctttgtgtgtgtttattgaatggaattaacaagagctcctagtcgtagttctttctcttgggaggatgtcagacaggttttcctaggagcaggattccaactcttagaatcttgactgactttgatttgaaaggattggccagctttttatgacctctggtaattgcagctttggggaacttgaaccttttgttctgtacatcatggtacatgaacgctatagaccttgctccaaaccctaatgaccctgggttttggtagggttgctgtggggcagattgggttttgtattttcatgagtgttaactccttaagcaagtatgtgttgacataaggtgggcaggagctatgtaatgccacagagggctttctggggatgaggtactaggctggatcttgacagaagttaatcatatgtagtaagcctgtgagaggagggcagcagcagccaggaactgtgctctgcactggaggaatgcagagttatggtttagcactctgatttattccacaggtactcgttgaattcctgctgaatgccaagactgtgccagctactgaaaatagaacaattccatgtgatacatgctataatcaggaaagtactgcactacacaggaatactcattagggggtctcctgactcagcttgaattggtcatggaaggcttttct

SEQ ID NO: 76433 - DNA, 2294 bp, Homo sapiens
aacgtacataccatatagggttgtggtgaagatgaaatgttgctgttatcatcatcgttgttaaaatgtggcacttgccagtggcaggtacagcccgctgttgcggggagtctggagggaggagaggaagagagtatggtgtctgctctgctcatctcagcacttcctttcctgggaacttcccatgtcactgttgaaactttggatgtccaatatactgtattccctaaactaatttgtttcttgccctgtgaatgaagaagtgttctctttcactctggtggagtatgttcagtagctgtagtttcaaaaaagaaaaataaagtctaaccttagcctaagaattcagggatttaggttgagcacaccaaaagcacagtttgaggaagcacccagataggactgagatgctgctagtggaggcaggtgcctgtcctggctgaattgtcagaattgtggaggaggaggaggaagaagagaaacaagctctcttggagtatcctaaggatcaaagagttaaagaaaaaacaaactctagctaatgaatcaagaagttgaatgagtctaaacaggaaaggaaagagggttggaaggaggatgttaattttaggtacaatttgtgggagaggattggggatgagaagaatagcagtgggcacctatttgcctatgggacaggaagtgatgggctaggtgaggctgcccttctggtccgagggaagaggtcactcaggacaggccacaggagtgcatgcttcttgactctcatcacctggcctcagttcagccaactcgtaggaggcatgtctgacaaagactccttatttcagcaagtctgatgtaccgcgtggggtcccatgtgggtcttatctggcgtcacaaattccatggggaggctggagggtgtcagaggttcttaattgcttggggaagggagaagagtggaggagcagctggcgtctgggcccttcagatgtattccaggatttgtcctcttggatcaggctggggtaattggagaagttggggtgaggactgtctgtgatttgatgtgttcaggggtgcagagaactattgtgacttccagcagagatgtgtctcaggtttctttgagtggctttcagcaaaggaaccctttcttggtgctattgttctcaataccttgttgttaggcagtttagaggctttgctgttcaactggctcctctctctggcattcagaaaatctgtcaccagtaacgcagaccctggccttggaggaatagttaagattgtgaataataggattaagtgagataatatatgtaaaagtcccgggtaaacaataaaagtctatttcaatggaatggattattataatactattttttcagtcagcatctcttttctgaattgctcagagcacttcgttaacactaactggttaatccaccatccatccctggttggaggctggcatttaatagcccccctttgtatgcaagatcaaacacaagtttccaacaaacccccacatcttgagcttgaagcccaaacctatggaatcgaaatctaaagcttggacttctaaatgtgataatgcctcattcctgggaataaagaaggtgagaagagagaggagggatcattaaaattttttttttcatgaataattggtcatgtcagacaaggctgtcatagtcaggattttgaatgacctagaagtcagtcagtcattttcctctgagaagccagagttcctgctggaaatgaaacttgataggagctggagaagcagaaggctaagaagagcagctttggggcaaagaacagggaagcagagagggggctggcagatttcttcattctgtcctattaggctgtggtggaagtacttgagatgccaggttctgcatcacagtgctaactgcctggcacatggcagtgggaacacactctcccctctgatgtgtaccaggaagtgtcagggggacccacagcaggtgcttggtgtattcttcaggtctcatgttgaaacttcacagagcacccccgagtgtcctgctcaggccagttttgctgcagaccaagtattgcagtccagtttggcagggtgggatctgagcagatcagccttaggccgactctccagtcaaggaaaggcctaggtgcattggtccacctgtgtcccttccgaaggctggtctcaccagcctagagctggcatgaaaaggtcctgttttgttcacagtactaggtgaggccattcagagtcatcaggacctttttccaagcttgtacttccctgcctctgg

SEQ ID NO: 76434 - DNA, 2409 bp, Homo sapiens
aacttggtacagttgtcttcctttgccctcctcgcttccatccttccttccctgcttcctttgtactcatttttactcctcagcactctggcagagctagcatgtacgtcgagtgctttgggggttaaaagtatacacaagacaatcataaaacaccctatgcaagccatctatgtgaggggttcctccagagctccccactcttcctccttgtctcttctgcccactttgtctagggtagctgggaatgttttcactgtcctaggggaatttgctgttcttcagattgaatttgaccccgttttcagcctttatttcccaccagagcctgatggtgtttgtattggcaagccagaagactcctggcttggagagaattagagttagtacagcctgcctggccctgtcttttcagcctctatctgaaggggcaaaacaaatttttcggccttggttaattgttacttagcccctctgatccagcctgggcaactttcaggtagctcaggcactgactagcctgaagtctctgttgaaacagggaagattaaagttgatttgattcatttgaagtaaaatcagcaggcttttgatgatttcattaatttcctcccttctgaacaccctcctgttagcagtaattggaaaccctgactctgtttctcatttcccccccacccctctgctttaatctgagacaactggaaactgcactcagctttttcatttactggaagaatggtttgaagatggttttaatgactggctttgacactgtttccagaagctgagactgttgccgtgcttaagttcacacctacctgggggcctcagttttgctcaccttgcttctataaaactgcttagttcttggtgtgcaggtggaagagggtccccatgagaattctctttttatcccaggcaatatatatgcaagcttttcattactcattttcatcactcaacatttacagactgcctggggtgtgtgccaggcactgtcctagtaactgagtgtgttcccagcacctcctcctggccctggtggacgtccagaggactaggtaggtgagattccagcaggatggtggctaaactcaaaccttgggaactgtagtctctggggctttctttctctatctgtttttatagttgcaacttcagtttctgtgctttttttttttcttgggcctgaagaggaataaataatatgaaccaccacttgatgtcagagaaatagcaggtagcaatagctgcaacagctaatcactattggcagttgacaagatgtacaaacacttgcttgtatatcatgtcatattgttgtcctcacggtaaaccatcacagccagtaaaggacaaagccagaattcaacctaggccttcccattacaaatcaaatactttttgtttattattgttattatttttagagatgaggtttcactgtgttgtccaggctggtctagaactcctggcctgaagctgttctcccacctgagtggctgggattacaggtgggagtcaccatgcctggctctgctttttgtactatgttgttttgtttgatggtttggttttgtttttaacgctgacttcccatgctattgtctttagtatgacttcaaccacttaagtgttaagaacctattatgtatgcattgggtcttgtacaaggaagtcagggtctcacagtctaatggggggaaaagataagacaattcatcttagttgcccttgagtgattcaggtactgaatgctattagaaagaagagaattaaccctgatgtctgtctagggaggcttccccagaagagccaagacttgaattgggcatggtggaaaggcaatactcaaaccaagagagaggtgaggaggagttttggttcctatatgactacctcagactcggggatacaaagaaggtggtaaggtttgtttccttcttcagacttagaaaaccagtatcctctggggtgatgctcctccaactttactgtgctttttctttttttttttttcctttttgagacaggttcttgctctgtttcccagattggagtgtggtgggtaatcacggctcattgcagcctccacctcctgggctaaagcagtcttcccacctcagccttctgagtagctgggactacaggtgcatgccaccatgcctggctaatgtttttattttttaaaaaaattgtttttttagagatgacatcttagtatgttgcccaggtgggtcttgaactcttaggctcaagcagtcctcatgccttggcctcccagagtgctgggattataggcatgagccaccgcccacagcctttactgtgctttttaaaatgagattcccacatattttgcccacaaagaaccatttagtagatctctgtacagcccagcaatct

SEQ ID NO: 76435 - DNA, 2067 bp, Homo sapiens
gatcgcttgagcccaggagtttgagaccagcctggccaacatgatgaaaccctgtctctacaaaaaatacaaaaattagccaggtgtggtggcacatacctttaatcccagctcttcgggagggtgaggtgagagggtcacttgagtcccggaggccaaggttgcagtgagccataaatgtgccactgcactccagcctgggcaacagagcaagaccctatctcagaaaaagaaaaatagttaacaaaagaaaagaagttgttaaaaaaacaatgctgcaaggaacatccttgtgcatgtgtcctaagcatgtgtgcagaatttctctggtatctacacctggcaggagagttccggattgttggaaatgcacttcaactttctgcatattcttcacagtaattgtaccagtttacactactactgatgtataagaagattcttatatctccatatgctttacaacaactggtattgttaggtgttaatttttgccagtttgatggacatgaaatggaatctccttaaggctttaattttgtatttccttgattatcctctcccaatttgtagattttttgaacttttcttacggcagtggttttcaaggacctttgagatccttttaggggattgacagggttgaaattattttcatattaagatgctatattacatactaagatcctgtttgccttttttgcactcattgtttcatgagtgaatagttgagtttacagaagctatatggcatgtgttgtgatcattgatgttaacatctgtgggtttattgttattttaaaatgaattataaatatgtaaaatttttagttctattttcaaatatggtaatattgataggtgtaacacacaaattctttgggcatcctcaataatttttagtagtgtaaagcaagcttgttcaacccacggcccatgggctgcatgtggcctaacacaaattcataaactttcttaaaatattatgagtttattttgcttttttttttttttaaagctcatcagctattgttagtgttagtgtattttatgtgtggcccaaaacaattcttctttcaatgtggcccagggaagccgaaagattggacacccctggtgtaaaggaacctgagagcaaagagtttgagaaccactattattttactatgtcaatttttaaaatatttttttcctgtctggtaggtttcttgtttaagaaattatttcctatccaaatttcataaagatgggcttttatattttctcgtagaagttttggaaagtatttttatgggtggcgtctgccaattcccaggcccttcaaccactaggaatagtttttaattttatgccttctcagaaacacttatatggcctgaatggaacatcttccctatctgaatataattttttggaagggcagtatgtgggaatagggatttagccaccttcttcagatcccttttgttcaagagagcctcctagcattttgcagagttcagcagtctctccttaagaatggtgtacactctcattttggatccttgggttcactggttttgcagttggctgttcagaggcccagaacccaccagtgacagggattctggaagcaaaatccctctctgcagcccctaacccacatgccccagtttccactggatacttgagtttctgtcaaggcatcagtgcccttactcctggttgtgtttgtgctggagtgggaaggtgtgtaggcagctgactggttaactgcagtcaaggatataaacaatggcctcctctaaggaaaaaaattacattgctgacatccaaggccccatcatctctcaccaggctcttactggtttccgtgtctccagtgtctttctcacccttcttcccacaaatctgtcttccaccctgccagaataactctcagaatctcatacttggcatgatgctacttctcctcttaaaacaaaagaaaacaaactcagggtcccataagacttatggtaaggtccattcttcttagcaatataaccctcatctgtactttcagctttcttgccagctgcttctgta

SEQ ID NO: 76436 - DNA, 2260 bp, Homo sapiens
aaattttatttacagtgttggccccagttgttttgcagcctagttcttcagtagttgcacaaaaggaagatgccttttttgtggttaagagctgatgttgatatccttataaattgtcttcctacatgcctttccttcagggagggaatgcactgaacagtctgatggcaacaactagtccctcacccttcgctaccaccaattattgtgcattttgaaaaagtagtacattgacatctgtcatattttaaaaatggtacatgaaatacgtgtatgcattaatgctgtctgcagaaaggtcctgctcagggaaaaaattctggatggtgctgtttttcccatttagccacacctagcctcctgcctcccctttagcagcctaaaaaaataaaactttataaaccctggacatctgttagacatgcaaattaagcagattaacttattttctgaaagagctttatagcagaaatccacatggatgtggagaaaagggggctcctgcttggaagactgctgacgtaagtggcctgcagtaggagggttgtggtgggccagagaaggggacggccccgtagggggatctgaagtgggagactttgattgcaggaatcttcatgtcattgttaacatctgaaagagttgactttctttggcaacttatttatagccttttcattacttcttgagaatggtcgctataaagatgggaaaagtaagatagtaaaatgggggaaaaattatttccttggctcacattgcagtgatcatggcaaaggtaggattggatctgttgcatgctgccttttagtctgttgcaaacaggctaggtgggtatgaattctcaagttcatgaaaagggcttacggctaaagaagtggggtctgagcactcacaaattctgggttactgtgttaaatactgtgttaaatgttgaaaaatatgttttcatatggacatgcatcagagagaagtttcttttgtgggtaatgcttgtcttgttacttgaagagtactgctaatgttgctgtaatgtttgattagtagtagtttgagaaatgaaatataggcctggtggggtggttcatgctttaatcctagcgcttcgggaggccaaggtgggaagaccacttgaggccaggaattcaagaccagcctgggcaatacagcgaggccccatctctactagaaaaaaattctgaaatttagccatgcatagtaatgcatgcctggaatcccagctactcgggaggctgaggcgggaggatcttttgagcccaggagtttgaggcattggtgagctatgattatgccactgcagtcaagcctgggtgacagagtgaaaacttgtctcaaaaaaagagagaaagaagaagtggtaaaatacaagaagtaattaggtaagccttgcatatcaagcagaatggtaccaattttctcattctgccctactttgcccatgtctcttcccgtggaacccaggccctctggcacatatgagaaaaacaatccttgtaatcaaaccaaatgtatgaaatacaaatttaaaactctccccaattaaaaaaaaacagagtatagttattgcaaaaagattttgccatccactgaaggagtcactgtgcaattgttttaaagagcaagggctctggtttatctataataagattacattttcccctaattttttataatcacatttgttgtttaaggcatctaagagaaagagaaagtgggagggtggagtcccagtggcaccttgggcaatatcagatgaagtgtttggttgagactgcaactctgaaaactatgctgagttccacatctgatcataagaagttgcctcccttttttcccctgcagccctgtctctcctagaacaggctttgccaaggatgaaaagcctgaatgtcaaatcctttctgtctgccctggcagggaagctgttctgttttccaagaagccttttttttttttttttttttttttcacttggggaatttttactttcctcttatgggaagttgcttcatcatttcccaaaaatatactgtacctcctgtttaaacagggtgcccttgaagagctctggagcctgaagggggctaggggtgttgtgaagtcctttgtttcatgctttgatgtgagctgaaatgcaggctgtctacaggcagaagtctcagagtttgccacgactggggtctggaatggggtgtaggaggagaggctccctgggaagcaagagctgggatctttttaa

SEQ ID NO: 76437 - DNA, 2051 bp, Homo sapiens
aggctgagctgaggccatgatcatgggtgagtgaggccagtgggggctgcctagttggacttgatgttggagaaatggaacaagccaaagtgtggagacatgcatagccagcagaagcatttagacttgtagaaagtggcagcctttggacgattctgaaaagaaatcatcatgaggaaaaatgtgttttggggggaagatttgcatatgaggataaattatagtatgcctccaggtgggctgcaggaaggagccccaactctgtccatggtttttggaaggagatcatgctgtaagatactgggaggggaaaatggcctggtagaagtctctttttgtcttgggtgagtgtggtcccatagtggtgcctatggcccagtggccttctgcagtcccccttgcagggcacagcagttggagccatcaggttgttgctggctgagtaggatcagctctcaggcaccaccctaagtaaagctttgatcaggccctgctgcaggtggaagtgatgtctcctagcggacccagtggggtcaagcataatgtgtagcaggtttcaagcctctgctggtcgttggagaatgagattggccaggagatactgtccaggtccaagtgacaccagtcatttcatgcctaatcagcagtgaaagtgcggtttcctgaaacctttgctgatattgggtgttactaccttcctttgtgccttggacccccttaaagattttaaataagaaatctgatatgtaaaataaaggaggatcagtcaaaaagtgttcttagtagaatatgtatctagcagtcactctttgtgaaaaatggaaattgggaaaatattttgagagagattctatcagtggggacaagcaagcataaacatgttatgcttatcccaagatctattaatttccagtagaagtagggagagtaaattattgccaagggagatactgcccagttttcttaatggtcagaaaatgaatgacagtttcaatttcagctgctgtccctgggctgggcctgctgacttgccccaagtgccttggcacagaccgtggtgtggccagtggaaacatcgtgtctgtagccccgtgaatgagcagttcctctttgggggtcagctcagcatgttgccaggccagggggcaggtcaggccgaggctccactgttagccttgacttcccctgccaggagatgtggggccattatggcagaagaggagctaaggagaaacacctagcttggagccttgagtcttcaactttcacctcaagttactctccttaaagaccagcactttctttcccacttttcttgaaagcctctaggtccctgatcctgtttcaaactgctggtatataaactgctcataccactctgagttatcactttgttagggctgagtagcagggtggcccttaaacaggcctgactttcagtggctctgcccacgtttgcagaagtcacagtgggaaattttcacatttttctctgtccttctaagatgggacagttgagaggactcaggaagggttgagggagaaagcagcaagcccagagttcagaatcggttgccttgcagcttgtccttttgtggtgggtgatttcacttggtttttcaagtgaagggctgcaagtacaaatggactagccctaaaggacattacccacatgcatagagccatgaggcacattgattgtttcccataggccactttgctccccgttgaggaaggaaccattgtgctactaatattattccactgcaaggtctggctggaggcatctgcaaagactcttcagggccctgattgcacatttgacaagtcttttccatcaacaaagcatagagttcggggaaacccaggatgagctgtcattctgagtaacaggcttgtgcaggtgctgactagcttgacttcccttgattcagtgcaaaccttgggaccctggaggcagtcctggtctcttagtaaaatgcaggtgtgtgtgtgttgctgagtaccagagattttggagcctcgatactttcctcatttgtatgtggacc

SEQ ID NO: 76438 - DNA, 3302 bp, Homo sapiens
cctgacctcaggtgatctgcctgcctcggcctcccaaagtgctgggattacaggcgtgagccactgtgcccggcctagcttatgattttaagctgtcagatgggcttttatttaaaagactggcctgctcaaacattgctagccttctataacataaaaccccaggtttggggagttaagagaaaaccaccaaaaaataaaccagctcttagactgtgaactttctcaaactctctagtttcaatccgtaactgtgggtaggtagagttgttatgtatgtgctttaaacgacaaagtttttaagaaaaactaaccaacattccacactggggtactattataatagagaaaaatctctctaattatagcagtattgtgggcttctcccatgcctggctggccacgacatggagttgataagcatacagtgtctttcgtacttgccgttacaactgttaattaagagaattcagctgtggcaccagctggggatgtctggctttgtggaagattgcaattagatgcttttttttctttttgttttttttcttttttttcccttttcaactttggtggaatgcctttgagtaggggcttttagtctcagcagtataaatactttataatgtgcctaattatgtaattatacagttatactcttctgtgtacacacacattgttttatgaatttgtatgcccttttctaatacatgaaacatctagcctgctttttggttgttgtggtagagccagactcctctctgcattgggcagaaagaagaagactagatgtatttactgattagcttctgattatgatctgccctacttctgttcctcttccacctccctcttgaccctctatctcccaaataattagcatcttagtagctacctagcaaagtcaaggtaatttgaataaaattggattgtataatactcttatctttccattagtttgcaaatgtagtccttcaaagtgtgtagtgttatttttcccagtcctctgttctaggcagttatagagcatgagcctggacgtgagagctcatgcatgcatgcaggcacaatgggacccattgatttctggcattcagcttgtgcatagaggacctgtgaccccagctgttagaaccaggacctgggagcagctgctttctggatccagtcctccagggataggccatctgctgccatgtgagagaaccctggaaaagaaactgaccacaagatatctttgtattccttttctgtgtgctccagcccctttagttctttcctgtcccctctcacctaggcaaacttgagaagcatgatgaatctgcactggaaaactcgcaatggattttccgttttcttcccctttccccactccaccctgtcagcacatccagcccattggaaaatagtttccaggggatgtaggcagacttatatgggcagcttcttcagtgggattggtactatttagcaggctttcattttattatgaataacatggctttgcattataggcctagaagtgtccttaaaatctcatctcatggaagaggaacccaagattccacattctttagccttgcattcagggcctaccctcttctggcaccagcctgattttctaaatgttcagttatctcctgctaaacctggaaacatttgctaacttctccgtacacataccacctcttcttgattctctgcctttgtttgtgcctttatgtcccccaccatgttcttcccactctcctttatccccgtcataatcctttatcccgtactcatgatcctacttcccgtgaagttggagctctgataccatttctacaatcttctttggtctcttccccattggattaatccttcttcagaactttctgtagcccatattgatttctaacatatatctattatagtcgtttattagaaagctcctagagtgtaggaccaatatctttttatctttccacctgcctaccttcacctgccacagtgcttttggtacttagtaaaaacttgttgaaaaaatgaatggcagaattaagctgagggaagagaaaaaaagaatgaatgggtaaatataatccttacatggattctggaagagaagcagtagatattactattattttaatcttgttggggctccttatctgtattcccaaagagactgaagtctcctcaagggcacaccatgtgtattatttgcccttgaatttctagcagcagcctaacacatagtgcttaatagaaatttgttaaattaatgaaggaatttgttaggaaagtgaaacctggagagaataagaatcaacacttgtaaatacttttaaaaatttgtttaattttttgagatggagtctcgctctcaccaggctggagtgcagtggcatgatgtccacttactgaagcctccacctcctggcttcaagcaattctcatgacaagccctcccgagtagctggaattacaggtgtgtgccacgttgcctggctaatttttgtatttttggtggatacaaggttttaccatgttggccaggctgatctcgatctcctggcctcaagtgatccgcctgtcttggtctcccaaagtgctgggattacaggcctaagacaccatgcccgtgtttttttactctcttttgagtgaaagttattagttattaaacctgctgtctggaggacaagagattaaaggtattttctgtacatcaatgtggcatttagacatagttatctaccaacatgcagtgtgtgtgaggctgtccgaggcattgtcttctgactgggcatctcagactggtcagtcaaaagtggcttgcgagagactagggtccaaagagccaaagaggccatgacaggtgacaggggcatggtcctcaccctgataaataagcatggttgagactctactcctgactgttagctagtttaggcccaagtttcactattttgaggttgttttgttttactagagccagaccaatatgtacacaggctaacatcaaaggccagtcctagaccttcagggccaggcatccatccttctttggactttgcagcaggcttgaatgcattcctgttgtttttaaagatccttaaagaggcttaaatgtggcttcctcagagaaaagcatgtgggaaggattcaaagagaaagcttgtaagaggagcagagggatcttccaggagcacggtatgctgagcaagatgcaaaagttcaaagtagtgaagaagagaactcctagggggatttgactcctcactgtccagaatcagttggtgaaagttcccctctgg

SEQ ID NO: 76439 - DNA, 2069 bp, Homo sapiens
tccaaacaggaattatagcagcttttgtccatatgtatcccacccctatgttatactttgtaggtcttggggtaaatttttttctggtggcatcagaaaaaatcaagaagcttccttgtagaagggccagccagaatttgaatgcagactctagtacttagaatccaggtgacctcagtccattactaaatttttcagagcctcagttttttctgaacaaatcaagttttataccaccttcttcctagggtggaagaatttaataggataacacttttaaagtaccagtgcagtgcctggtgataaatgttaattctcttccttacttgtatccttttggcaacagagatcattaaatttgttttaaatttgattgtgtgtttcttgaggccctgctgtgtatgcctgggactgtacttggcattaggagttaccattagctggtaggattggaaatgaaaccacaattttggcctttgtacccaagagtccaaccctgttttaaactctaagccagactcctaagtcagttatcacctgctcatcagctttccttctgagctgccgtaaacagccatctgggcctttcctgagaggaccagtcatctcctctgggagatgaggaattctgagaggggagagcaaacacatattttagctcaggtaggtgatatggtgaaggagatgagaacaagaagtgacaatggctgatgaggaaaaaataagcattctctgctttttcttaagcctttaactgccactgtcaagggaaacagtaacacttgctaatacacgtggaatagcctggctccctacctccattgtcatcccaccatctggaggtggaggtaggagacagctgtgggctctgctctataggtcactgtactgacctatagcagtggtagtggctttgggcactgagtgggctagccctgtacctggagcagcaggataaaggagaatggtcctctggcctgcccctccttgtagcagtggtaacagtgggagggggaggggttcccagccccagctggcagcctgtttccctgggtccctgagctgcaagaacaagaggaggtgaaagggtaacaggccatatggagtccatttgtcagccaagagcagcctgggctgtattgtcgagaacgggaagtgaaaaaggagccggcttattactgaactggaacaaggagagagcaaacaacaccccccaaagtgcttatcctgctctgttttctgcctgccccctctccaaatatccagaaatttctgaaataatcctttttctttttaccaaagcctttgcccattccaaaaatcagagataagggtttagtttgctacatgaaaatttatcagtgcctagtaatgtgccaggcatgatacaagaccctttcaagtatgcagttttgttagtcttctaaaaaaacctgtggagctggatattggctgctaaggactaaggctcagaggagttatgacagttgacaaggctgcagagcaggcccctgggtcaaacccagattcatctgtctgacccccaagactatgctcttactccatgtggctctggtcctgttaggtaggcagtgtattttcacagttaggtaccaatttggagaatacaaattgtaccctggagagggatgctctttgccgttgtctgttattgactcatctcaaatcaaaaatcattgtggctcattgcagttgaaaacaagacagtgttttgaaataaggacaaaattttgcaagtcacgttggttttctactaagcatctactatctcctggattatttgtcaggtactagggatacaaaaatgagcagaacaagtctctgccctatggcttagatgtgtgggttggtggttattggggaaatggaggaaggaccaacctgtgagaaaacctgcagagactacaacatggtgataggttacaaataggagtgaagatgatgtaatgggaacccagaggaggaataataaagctgctgttattgaacacttagtatgtgacagacccattaccaggtactttacctgcatagttgtgattaacctt

SEQ ID NO: 76440 - DNA, 1060 bp, Homo sapiens
acctcccctttgaaaaaggctgttcatactgggtataactctttcttttatatgctgtacgaagtagctggatgtctccaaagccataggctgagcacatcaaatggggaaatgagccacaaaacagaacctggcaggtttcctgatgccctgcccccctcagcaggccccggcttaactgagtggtcaggcttgcagcttagaagccagagttcctggtgaatccagccctgccaattacaaatgtgtggcttgaggcagatcactcaactcagttaagccttattgtccttatctgtaaagtggagaaaatatagtacctgcttcatgtagagagagaacccagaagagtacttggcacaggtaataaactatctgtttgcaataattactgttttccttattccaaaacaaacagaactatacatttaaacacctttgttctctgtattgaccttgctttttctctggatctctttgcttctacaaaccattgaaggctagaagtagaaatataacctttatatataagaaagggttttgagagcaagcacataaatagtgcttttctaaataactttaagagacccttagtgctaaatgcctccttctttccacatcttcagcctcacatttcatgccctgtcgtgtggttctgaaccttttccactgttttcagatccccagacctgtcctgactgctggccaaggactccttcactgagactgtgctgtccactacaatagccactactaggtggctgcatgtggtgactgagaacttgaaatgtgtttagtctgagttgaggtgtgctataagtgtaaccggaaaggggtccagattcagaccccaggagagggtccttggatcttccacaagaaagaattcagggcgagtccacagagtaaagtgaaagcaagtttatgaagagagtaaaggaataaaagaatggctgctgtatagacagtatagacagagcagtgtggcatgggctactcggctgagtgtatttatagttatttcttgattatatgctaaacaagaggtggattattcatt

SEQ ID NO: 76441 - DNA, 1231 bp, Homo sapiens
aagaggaacccagtgacgggacactgtgcaccctttttgaatttaataccttgtatatttcccatgagtctgttttttttgttttgttttgttttgtaaaagtattttagataacaaaaacctaatccctaaagcattacaagaaaatactggagagtatgtttataaactcagagtagagaaagagtccttaatccagaagccataaagagaatgattttttaaatatatgtgtgcacttaatggtcatatccctatttggcaagaaggacctgaggtgcttatatttttgtcctttttcagagcatagcacagtgaccccctactcagaatcagtaagtattagttgaattgaaattaaactgaattacaagtcacttctttgcagtcctcacttttttttttttttgacttattatgagtgctaggtgaccgccaggatcccgctcaaagattctgtggagatgtgggttttatggaaagagatacccagcaaagcaggagtggctttagaatcagcagctcttcccctgagactgtccttcccagcacattggacttgtgtgtgggtcctgcctgctttcaggagctgccatggggtgctcagcattaattatgccacggaaatgaaccaattagacacagtccaaggagagccagggagtaagtcagggagatctgtggcaggcctgctgccctgaacaaaagagggaaagtgtaaaggctaaagcagtttgcggaggtttctttggaaatctagctggccagcgctctgaactacttggccaaagttaaagagcaccagaaggagtgtttgcgtttttctttctcctgttcaagactctggtggtggaggagaatagggacaagttgggtccttagaggggacttggggggagcttactggagctcatctcctagtttcagagaagctgccagacttctctggatccctgtggcacctacccagctttgttttgttaatagctttttaaaaatggcatcttttttttagtggcatcacctaaaaaaagaaaagaaaaagtgccttttctccccatctcaagtgataagcaaattgagggtagggagccatcatctcttttccatttggtgtccactccccaacctggctggcagtcagcttgcttaacagccatttgtagattggaaagaagaggcatgggtgagagaggctgtgagggcacagctgcagggtggtgtggtctgc

SEQ ID NO: 76442 - DNA, 1969 bp, Homo sapiens
ggatgggggcaggttatttgtcagcaaaattgaatttcctttggaaaacttttggtctttattgcattcatggttgcctggccattctacctcagcccaacattccaaacagtgattctgtagtgcccccacttttactgttttggctggtaatacccggcagtccaccacctggggtcttcagttttgcagtgtcagtccagagtggaatcagaggttgtccttttcctcctcaggtccactcagaccttccagatcctctgacttaccattactgcaacttaccagggttcccaccatacctaggcactgcctgccatctccctaactgaccagtttcaagagggcaaaggggaggtaaccttgacacccataccccttaaaggccatgcagctcatggggtagaagcaatgtctgctggtggaaagagcagaggtttagaatcagaagatttgactgtgaccccaagcctgccatttaccttgctgtaagcttggctaaaagtcacttaacttttgtggccctcagtgtcttcttcttcaaaggagagtaacgatagctgtctcacagagttgtcaggacaaataaggcgggaggtgaaggtgcttttgaaactaggcagtcctgtatatcagtggaaaatgtggaatttatcatgggatagagacaggtggtgccattgactactatagtcagagaatggaagatgcacagggggtttgggaagcctcccagggaatctatcagaaatcccctctcaggccaagagtgcacgtttttattatacaatagagtcttttctgacattgatagtggaaacaaggccaacatttttcctcctttcactgtgatttattatgtgtgttacaggctttattacataatacaggctttattaaaactattatgtctagatctctataggttcaagactttagagtctgccgttcatttatggatggaattctcttaaggcatggtggggagggagggggaaatgttgcaagcagccacttcccctgttgccagtatacttcccctctgtcagtggcaacctgagtttccagggtttggttaacagttcctccaaggaaagggttatttcctcctcctgtgtttcctgtagaggccttcagagctgcgtcactgagagcagactcctactggatacctcaccactgtacccctgctctctccctgtctttgcagtgtgccccctaccaccggagccagagaatggtggctacatctgccacccccggccctgcagagaccccctgacagcaggcagtgtcatcgaatacctgtgtgctgaaggctacatgttgaagggcgattacaaatacctgacgtgtaagaatggcgagtggaaaccagccatggagattagctgccgtctcaacgagggtcagtctggcagatgaaaaagggatgctgctggggttctgctttctgttaactcacaggatgcaaagcatgcttcctccagagcactctttgctgtggtgcagcccagccccagttgatgctctgcagcctcccttccttgggtcttcatgtctttgtggaagatacttgaggttgctggtgcatgtcctattgcatttcattgagccatctgccctgctctgtaaagcccgtttgatgttcaggatctcttgtttgcatggccaagtgttggtgacccttgaccatgttctgccctcacagtgagcacaatgctaataccttctctaatgtatcgtccatttcatttttccttgaatggagctacagaccagctggacaaaagacctcccacccttactgcttcctcctgtcttgcatgacaggaaaatccacctgcttgcaggaaagtgtgtcatataaccatctttgtgcttcccactcaggcttcaagaccagagcatgtttaacccatgacaccccagaaatgggtgggaaccaacctgagagttacaattaaag

SEQ ID NO: 76443 - DNA, 1028 bp, Homo sapiens
ggatgtctgtattgcaccattcaggaggcatttgacaagatcagctgtggggcccatcagctgttttgtgtatttgggtacaaaacccttctgatgatggcttgtttttatagataaagacacccacacatcacttggggtccccacgctgtctatagtggcttctactgccagctccgtggcgctcattctcctcctcgtggtgctgtttgtgctgctgcagccaaagctgaagtctttccatcatagcaggtgagtccagtggcagagctgacatgagacaggcaggtgcaagcattactgtgggggccagtctttggtggagggttgctggtggccccaatctctgtgggtctgtgtgtgtccagggagtggggagggccctgccatgtgtcaaactcctagatgtgcctaccattgtgcttattgctttgcatacattatcttaatcctcataggaacattgcagatgaggaaattgaggctcagagaggttattcactcagggttatacctctagatgacaacagagctcagaactgaggctgcgcgcggtggctcatgcctgtaatctcagcacttagggaggctgaggtgggcggattgcctgaggtcaggagtttgagaccagcttgaccaacatggtgaaaccctgtctctactaaaaatacaaaacaattagccgggtgtggtggcgcgcgcctgtagtcccagctactctggaggctgaggcaggagaatcacttgaacccacgaggcagaggttgcagtgagccgagatcacaccactgcgctccagtctgggagacagagtaagactctgtcccattaaaaaaaaaaaacaaaaaaaaacggaaatctgttcaattccaaagccatgtcatttcccctacaccagtcgttctcaaagcgtggttccagcagcgtcaggatcatggaacttgttaggatcaaccaaatgagaagctctaggggtgaggcccagtgatattgtttaacaagctgtccaggtgattttgatgaacact

SEQ ID NO: 76444 - DNA, 1060 bp, Homo sapiens
gtttgttaaaagtaactggctagttttgcttgatttgagtagaggggagatttggttttcattgtagaccccatttaaattttgtgctgtgtacatatattactttttaagccaaacactattttgagtaacaaaagtcaagcacatgccagtttacacactgctttcttttttttctttttctgagacagggtctcactcatgttgcccaggctggagtgcagtggcgtgatcacagcctactgcagccatgacttccctgggctcaggtgatcctcccacctcagcctccctagtagctgcaaccacaggcatgtgccaccatacccagctaatttttttgtattttttatagatatgggtttcgccacattgccaggctggtcttgaatcctggtctcaagcagtctgcccacctcagcctcctaaagtgctcccatcaaactttcccttccttccaaaaacctctgccacttctctcctctcagagtgtatgtagcacagattttactgccaagagcaggtgaggaaattgagaactactaacaacaatctagcaacaataatatggtctagcagcagaccatctatatttcttgaattgatgagctgaaaggacacagcatcacctaggattggcctgaatccaatgctgaggaaactattagacaagtccagattgtgggacattctttgagacagctggcctggactctttaaaaaaaaaaaaaagccaatgtcatgaaagaaaaactatagtggactgtttaacagattaaatgagatgaaagacacaggacaattaaatgcaatacatgatacttaattgggtcctggatgaaaacaaagaagactgcagctgaagtagatatatttttggatagttaggaaaatttgtgttattgtattacaccaatgttaaatttctgggatctgatgatgtagttgtatcagaaaggatactcttaggaagtatatgttaaataacatcttcaccttacttttagatggttcagggaaaaaaaaggcatgtttatgtgtataacaaaagtgatcccca

SEQ ID NO: 76445 - DNA, 1072 bp, Homo sapiens
acctatttaatgtgtacagtgaagtggtttttagtatattcacagatatatgccaccatcattctctcacttccttattttagctgtgctgaatgaatgcctttatttctgggtctctaggctcctagtttttccacagggtaaaagggccaggtgcctgtgtacccagaggttaagaacacagtttttggaggctgatggaaccggattcaaatcctagctccatcctttaccagctgtgtgattgagggcaagttaattaacttctctgagcctcatttgcattcttggtgaatccctacctgaaagggctcaggtgagaatccagcatgataaggtgtttaaaattcctagtgctttgcctggcacatagtaagtgctcaaaaatggtggcggctgctattattattatcatgcctgtttctctgtgtgtttattctaattcatcctttgtcttttcctcctccactccaggcgtgaccagggggtatctggggaccaggtctccatcatggtggatggagtccaggttgcactaccatcatacgaggaggctgtatatggcagttctggtcactgtgtgccacctgctgaccccagagtacagattgtgctgtcagaagggtctgggcccagtgggaggagcgtgccaagggagcaacagctgccggaccaaggggcctgctcctctgcaggtggagaagatgaggccccaggccagtctggactatgtgaagcctggggctctcgggcctcagagactgtgatggtgcatcaggcaaccacctcttcctgggtggccggctcagggaaccgccaactggcacacaaagaaactgcagattcagagaacagtgacatacaaagccttttatccctcacgtcagaggagtacacagatggtgagtggtccaagctgaacatgaattattagctgcttagggtccttgctgggagtgaggaaggactgtgagcctttctaaataattggtatatttttagcaaaaaaaagatagtacctggggtatttgcctacaaaatagaatttcaccctcagagtactgagtagggc

SEQ ID NO: 76446 - DNA, 1964 bp, Homo sapiens
aggagagaaagggaagtgactagaccagcagagctaaggcagagaggaggatggtttgaataccaggctgaacattgagtttttttcacataggcactgggaaagataagctagaaagtcataaaaaaggaggtagggagtttttgcctacctagaagtgtatgagtgggacatttactttctttaaattaggggctatgtaggatagcccctaagttgcagtggggtcgagagtgctctagagttccacacaaggtaaccactgtgcttttcttctggtcttcctgcagatattccactgttgaaagaagcatgagggcagcggccagcctttcctctctgcgaggttctctcagcccttcctccctctccctgtgggattgagcaccctgtactctccagccaccttacctggatacctgagctgccacctgtgtatctgtgtatctctgagggccctataggcccaccttgctggaaactcaaggaagattctcgccatctgcctgttggacagctggaggagctggctctttgcctggccccgccttcccatctgtcagagacatatttgaatgtgctggatcaaaccctcccttttcctaagcctctgggtcccctccagccagctctttggcggcagcccccaccagctcctgtgggcctgagtgctgctgtgtttacttgtgcctttcccccaccctgtccagtttccctgtcatgcagacttgttgctgtccacaagccttagtggctgcactgctgccccctgccacacagggggccgggcctgggtctgtcctgtttcctttgagggttgcccctactgccctttgcaggaacagatccaggtgtgagagctcttgagtcaagagtggcagaagtggctctaattggggtgagagtgtagtccctgggcttgccctgggttgaccctggtggcatatttccttggctgaggatggaagatttggagaatcatgtccatgctggcccaggacccagccatctggcccaaaggcacaagctcctggccctgttgagttgagagtttccaagaagcatccagaagatcccaagggagagaaggaaaatggctgataatgattgtcttcctaatatgcaagttctcacttcctacttccagcatcggccttcctggccttgtcttttttttgtttccctggagtataatgggaagttgcatgctgcctcctgggttttatcccagatagctctggctttcttgctgcccacaggggcctggggcaggaaggagacttgctgagatgccatggagtgcccatctggtcactggcagtctgggcaggttgcccctttctgggtttgtggtgacggaggggaggccgagaggcacagaccaagtccccgggtggctgcaggcagctccagcccggtcctgaggatcctcctcaccatggtcacgtgccttagtaactgtgcccaggaagtggcctgctgcttgctgtgctgctgcttttcctacttctgcccttccctgccacccctcgcatgtcacagctgacaagcaattccttgtcttccctggccccctgggggaagggctgagaaacagtccgtgtgcaccccaaccttaatggcctgaggtgggcagaggggtgtggagcagcctggagtacagggccctgggggaggagcccactgatgaggggcgctctcccatagccatgtgttgaatgctaactaggctggggtggacgaactctgccaactgctgtcatcttagaagatagatgcagcagtaaggaatgtttgttttgcttttttctgaaattttctgaagcactgtggctgggaaacttcgaagcggaccctgtgctgcatgtctgctcctcccctgagcctgtctgcttgggggtggtaaaaataaaaatcccagtttattttcagtaccttacctaacagggttggctccaggcgtg

SEQ ID NO: 76447 - DNA, 1558 bp, Homo sapiens
cctcttgcctcctgcctccgcgcttacacacgcactttaccacccggtcattccctggcctcttgctgccacttgtagtcttccttccttcctctcagggtaagggcagtgcctgctgtgcctgttggccactcccacacttcccctcccccaggagccctcatctgctgtgctgagtccaggaaagcatagttaggtagggagctggttggagaaggtgctagaactagaaggcagatgagactagcatgggcccacctggagggctgtccctaatggccccagtcgccttacctcacccacagcagtgcccttgtcttcctccaaaacagaaagcagtgacaaaagggggaggggtggtaatctgaagtctcactgctgagccttcagcttttatttttcactgtttcaaaacccgcattctattctagaatggtttttaaaatggaagatcttacctttttctatcttgttactctggggttttgtccccctaagagattgcactttttgtttggggtttattcagctgcatagatgaccagcttgatccctggtgaaatgaaaagccttccttctcctgaagcctctttccgccctgccctccactaacaacactgaggagcacaagcccaggcttgcccacctggtaggaaaggaagaaattagaacaatgggagccttggctcccctctcgtctcctcccctccttcttgtcactggctttgatgaggcccacttcccagaggctcctgggcctgtgagtgcaggagctcattctcccctcactgctgaagtctgtgacagcttcttcctccagttatgtctttcttccaaagcaatttcttaaccatcagccatgtgctgctatttctagggcttctgggctttgtcccttactgagagattagggactccacagctgccttgaggtagggcctggctgagagacaagggtagcagcaggtggcaggctgttaaaagacaggctgcctgaggagcctggagcaggtggaaacaggtggaagaaaccggccacagccctgctttaccgggctcacctctagggcattccagcaagaggctgatgcaggagaatggccagcaccaaaggacatttaaaagagtttttgggtttttttgtttgtttgttgttggtgtttgtttttttttttttttttttggcacacttgagctgactcagtgcaggtttaatatcctggtgacttgcagtcacattctaatgactttcaagggccagaatatggtgaaaatcacttaaaatatccgtcccttccatgccttagtttagcaggtaggctctatcttttgccatttctgtattttatgtgctgtgttcccgtttcactgggtatgaactgtgaaatcgactgaatcctggccactttatgagtttgtttggttttataaggcatttcaatgtacattctataaatacaagcactccatttgcaaacagatcttaagctaatattttctttcccattcatcttgccctccccctcctcccgccagctttaaagttcagtggagaagc

SEQ ID NO: 76448 - DNA, 1018 bp, Homo sapiens
ttaccctttttacaggtgaggacagtaaggctcagagagattcaagtacagtccaagaccacataggtcatgcatcctcagctgagttgcggtttgaattcaggtgtgccactcctggcctcttcacctcacgctgctcacttgctcacctcttctactccccagcttttctccctgggttcttgatcacctgaccccttcacacctactatcctgcccaagaatccctctcagcaatgtccaaaaccaggacaccaagccatttagcaaaatgcagtcccagatgctcagcagtctcagcagtcaggatgggttctgggtccctggaaagatcaggcaaggccaggagacccaggcagcccctgtctcctccctgggccttgcttctgaaaggtgaggagaatgctctgtattctcaggtcttcccacttctccttgggactagagctgggggcacttgccaggcttttctctttctgttactgaaaagggaatttcatcagctgtgaacctggggtgagacatgacacattcccaagttgagcctaggttcatcctccaagctgcctggtgatgaaggagcattaccgggcttggggaccatccaatcccacacccaagaggcaaacagctgctcggcatttcctgtgacgctccagtgcccctagaaaaggaaatttcacaagctaggaatgtcctgagcaggctgtctgggacagtatacactgttctgaacctgggggagtagatgattctatggttcttcctgcagaggttttggcaagcatggacttccccatagcagagttttctgtgggagtaagtagccctgcctgcagcaaaggcagcctattgcagatgaagcgtgtcagcagggctcagcgtctgaagggactggggtatgcgacaagactatggctcaacacaaatgcacccagcgtgggggctgccctggcttctggggttggcctcttgagggccttgagcagctggggtccagagacttttagggactttt

SEQ ID NO: 76449 - DNA, 1031 bp, Homo sapiens
acgcccagcagacattgctttcatcagtgggacaaatcaaaatcgtgtaccacctgacaggaggcaccaagtgaacacagcatcacttccatgatattcctacagaatgcaacctacgctaataatggaaaagaaaatgagacagacccaaagtgagtgataattcacaaaataactggcctgtaatcttgaaaatgtcaaggtcatgaaaatcaagggaaaatctgaggaactgttgcagactgaaggagactaaaagacatgaataaaaagaaattaacatatgattctgaactgtgtccttttgccatgaaagatgttagtggggcaaaactcaaacagggtctgaggattcaatggtagtaatgtctcagtgttaacttcttgatttgacagttgtggttatgcgggagaatatccttgccagtgggaaacacacattaaagtattgggaggggattgggaaaagtattctcaaatgcttcaggaaatgatctgtaaatttgtgattgtttctaaacaacattatgtagataatgcactctttgcaatgatatgaaattctttcaccctggaaattgtatgacttagtttgttcctgttgctataacccaataccttagactaagtaatttataaacaatagaaagttatcacttgaacctgggaggtagaggttgcagtgagctgggaaggctggaggctgggaagtcaaagggcagggaacctgcagatttggtgtctggtgagggctgctctctgcttccaagatggcactttctggctgcatcctctcatggtggaagggcgaaagggatgattcctacatcctcacatgggagaagagatggaagggcctaaagaggcctggctactgccctccagcacttcataagggcatgaatcccattctccagggtggaaccctcatgacctaatcaccttccaaaggcctcaccttttaataccatcaacttggggtttaagttccaccatataaattttggagggaggcacacattcaaaccata

SEQ ID NO: 76450 - DNA, 5151 bp, Homo sapiens
cgtctcccttttggcatactgtttgaggggtactgaggtgaaagggcggtcactgttcgggtcgtttttacacagcggttgtgcgcccgtccctgccagtcttaatgtcttcatctcctggacacgtagaatagtgggccgggatctccctgactttgctggcgatgcggctgggccttttgtagggcggccgcagtgacccccgagaagggggttgctgggaggagaagggaagagggaatttggcacgcgcagctctgctgcctttgattccaccgccgccattttgtggccgcagagcgcccgcccgctgctgttggcgcaggcgcggtcgaggcgtcgcgagattctggcttccacccgctgtgacgcgcccgcgaggccgccattgggctggctttgcggagggcgcgggcggctccgcccgcacttctcggcctttcctaactgcggcagatgggagggggccggagagcccggagagtgtgcggctgcgcagttggaaaggtggcagtgggcgttgcggttgctgcggtctgggcccagtagcggaccgtgttgggagggagctgggttttcattttgtctgcaggtaacctggcctcattagaggctctgttggcaatctcgttcataacatcactgtgtaaacattttatgccgttgatgtttttgattgtttaatcaggcgtttctctgtgacagtcattgctattatctcgattgaattactttctaataggaagtactagccggacatcatgagtggctgtcgggtattcatcgggagactaaatccagcggccagggagaaggacgtggaaagattcttcaagggatatggacggataagagatattgatctgaaaagaggctttggttttgtggtaagtatttagaactgggtgaattatctgctaagtaggtagagttttgataagcagttgttttcgatcttgagtccgggtggaatatttgccttcagaaaatgttacccagccttatgtctgaattttattgaggctgaaaacaactttaacttgccggctcactggaaccccactcccagtggctccttgattaggtttgactgtatggcagtgtcgttaagatactcttcccattctgtctcctgatttcagtgctcttaatgtgttgtagaatactcttctaaagccaatgttaagagtcttatgcttacattttaggaatttgaggatccaagggatgcagatgatgctgtgtatgagcttgatggaaaagaactctgtagtgaaaggtgagattcctgtgtaactagataaccctgggacatagagcagactgggtctgctggcatatttttctaagtagatttatgtagcttaagtgtgtaacggagatttttcttccctttttgtagggttactattgaacatgctagggctcggtcacgaggtggaagaggtagaggacgatactctgaccgttttagtagtcgcagacctcgaaatgatagacggtatgtgaagggtggatggctgcattgaacaattattgtaggggtagcatttaagattcaggagtcattagcagtgatgattttgggtcctgccgtataatctgttcttctattcccacgttagccagttgttcttgatgaatctatatgagtcatagaacacaaatctattgacggaagtcattagaatggcttgtgatatctgatggcttgaacttgcccacagttgaacacaagtgctgtcattgcatttcttccattgtgaatacgaattttcttcctcagaaatgctccacctgtaagaacagaaaatcgtcttatagttgagaatttatcctcaagagtcagctggcaggtttgttgaaatacagttttgagttattttgatgtggctttttaaaaaagttaatgggtagctaatgttgtattgttttattaaaagtagttttaaattaatggatttaatggaattgtaattttaaacatttaattaaatgtaatttgggggatattttgaactttaatattagtgatcaaatgtaaatgttttgaggatatttttcttgttttttaaaatcaatttttaaccaaatattaaaccctttatttgccagcctgtctgtgtcgttggccttatgacgaggagtgcctgtgggttatcctaatcgttgtcttggtcactcttggttgggcctggttgactttgccagtcagctcctacagtgatcagttggccacctctagatctgtgtttgccggtctagacgttatcggtgcacttccttgaagtgccaggttgcagcgatcccagagcgttgataacgtgatctgatccctaagttgagacctgtcttcctgtaacgcttccgaataagaggtccggtcgaaaagagttgaaagatacgaaattaggtggtcgttggaatcctgatcgcagtaaagtggtccttggtaactgctcgagtagaacatgtctgcatccgccaatagtccgctaatagggagggctgtgcgattaaaggcttccatcgattgggtagtgtccttcaagtgggtggcgaagagccagtcgggcatatgtcatgaaggtttctccgaccgattaatggtttgctgcttgactagcctagggaaataataataaaggtaaagtaaacttttttaatgacatatggggcacaaaataactggtgtcttgtaaatgttctgtttttttaaataaaacttctctactttagtctttactttaaaaatatgtactgtttccttttttgttgtttttttgtttgtttttttttcttttgtactgagctcagcatagactaatactaccttaatgttaaaatctgaatttcttttagcattttgcttaaaagcaatatgctatttgcttattccgtgccctgacatagataatttttgaattctgatagaatacaagtgtggtaaatgccatgtttgtactttatctaacatcttctctttcagtagtcttgttttttttatatcatgtgattgtttgtgtgtcccctttcctcttctttgcttaacacaattatcttgtgttaaggatctcaaagatttcatgagacaagctggggaagtaacgtttgcggatgcacaccgacctaaattaaatgaagggtatgtactggaaactgtgaaagtctttaaaaatatccggaaaattttactgtgaacttagttttgaggacttaaaatttgaatatgttagaatgcagagattctccagagacaattttgctgcttccctcctcccccccacacctttggcagtgtctggagacaagtttggttgtcacaactggttgagagaggatgctgttggcatgtagtcagtaggggctaggcatcctgctaagcatcccacggtgcatagggaaccccctcaacaatgaattggctcaaagtataacagtgccaaaactttgctcttttaatgctgtgttatccagaaataagactcaatagtagcaatagcaaaagtgaacatagaaacgacttacctagactgctgtgtgcaatgtgtgagactacaggatgtatatactttaaaagtggctgttttccattttagggtggttgagtttgcctcttatggtgacttaaagaatgctattgaaaaactttctggaaaggaaataaatgggagaaaaataaaattaattgaaggcagcaaaaggcacaggtatctctaattttttaaagtcaaaagttgtatttaatgggtttgttgtagagtcttatctaggctgatttcttttcatttttcatagtaggtcaagaagcaggtctcgatcccggaccagaagttcctctaggtctcgtagccgatcccgttcccgtagtcgcaaatcttacagccggtcaagaagcaggagcaggagccggagccggagcaagtcccgttctgttagtaggtctcccgtgcctgagaagagccagaaacgtggttcttcaagtagatctaagtctccagcatctgtggatcgccagaggtcccggtcccgatcaaggtccagatcagttgacagtggcaattaaactgtaaataacttgccctgggggcctttttttaaaaaacaaaaaccacaaaaattcccaaaccatacttgctaaaaattctggtaagtatgtgcttttctgtgggggtgggatttggaaggggggttgggttgggctggatatctttgtagatgtggaccaccaaggggttgttgaaaactaattgtattaaatgtcttttgataagccttctgctcacatttttgtgaatgtctgaagtatatagtttgtgtatattgacagagctcttttataactaaagcaaatttaatttttttgtactagaaaaaaatttgaacattttagttcttggttataaaaatgttaattcagaattagtttaatgccttaattaaactaattaatagctttggacacttaaaagagctctaaatttgcttgtacataaaggcttaatttgttttccttgttagggtcaagggtgtcctccactctttaacagctgctggacagacacattagagcagctgtttgttattgataataaaatattataaaactactttttgtctgtttgtctgaagaagtcctatgctgattatttctcatccttatacagtagatttaaaacacagaacacatccagaatcctggagttggttacggtctctctttaaaaataatgtttttgacgtctccaggctagtgaaaagatacagaagtaagtgaatgccaaaatcacaattgttgagttttgtgtccgtggcccccctgtcccccaaagttctttctctatctcctgaatttattggcatcaggttacttaagcttccagagccaagaggaggatagtgtgggaagcagtgtttcttgcctaccttaaagattaggacaggtttttttgttttgtttttgagatggagttttgctcttgttgcccgggctggagtgcaatggtgcgatcttggctcactgcaacctctgcctcccaagttcaagcgattctcctgcctcagcctcccaggtagcagagataacaggcatgtgccaccatgcccagctaatttttatttttagtagagacgggtttcaccgtgttggcc

SEQ ID NO: 76451 - DNA, 1301 bp, Homo sapiens
tagcagatgatgttggttagataatagagaaaacaatttgaacaggtaggtatatatggatataataagtaaaaatgataggtggtagccttgtcaaaaatctgcgtttttaagaggatgttagtaacccaaatctgtgtttctcgttttggtgttgggagtacttgttagtcctgcacatttgccaaactgatacccgaaaactatattgtcttggtttcatttgtacctgaccatacaaaatgataaaaatcccaagtaactaataagcatgattgactttttgtaattgttaatattagttgttaatcatttacttgatccttatttacatatgatatgcaaaatgtttaaattttattagagacaatttgaaatttgtgaattctaggtatttgaacatttttctttgaattgggaaacgactcattttggcagtagtttgctgtacccagttttgggggcgccttgtgttaaaaccaaatacctactgaacttaaaaaagagattattagtgaggtaacattgtgttaatgtatgtgtttgtttcctggtttttccttgtcaaaagttttcctcctctactaacatgatgcattcgcccagttttttcatttcattagctattttttgagtttgttttgcctgattgcatcttactgtgttcacttttgcatacttgatgtcaaatttgacttttcgggagcatcatcccaataatgtcaaaagggaaggaataggatctgaactttttaggttagaacttctgaagtttaattctacagcacttgtgagcatttatttctcttttgggtcacaaaacttggaatgggatttgggtatttgagtaatgggttaaacatatatattgattagttcaggaattgagtgactttaagatgcttatcagacacttttagagatcccagcaagaggcagattcggtttctggtttcatagagtttacagtcactgaacaagtctttaaaataagtagcaaattctaagttggggataggtgaggcttcttgggtagacaccctgtctgtgttcccggccaagacttgatgattctgatagatgtactggaaatgctggagaaagactcaggcaagactggtgtttttgctgctctctctagtttaccacactggctttcagaattgctttgggaccagaatccaggccaccaggggaagggctaggctgtgcaaggggagcagtcctcccctttgtaggtgccatttcccagagctcctggaattgtttcttcagttgtggcagctgtgtagatcattttt

SEQ ID NO: 76452 - DNA, 1808 bp, Homo sapiens
ggtgctgtggctctgatctggttccaggaaatgagaacctagtcctgagaaatggaaacttccccaactcttgcgaatagaggcctttcacacaactaataacctcagttgtccaaggcagttttgtcctatgatgtctccccactgagacaaagcagcccaaattgcttcagttttatgaggtaaactgcatctgcaatttcattctcccagctagaaggaagaaatggagtgcagttgatggaagtagtcttggatctttaatgcttcttgggtgcttcttggggctacctggttcttagtgacttgataagagttaaagccctatccaaaaagtccctgctagaaacttgcttgttggcaggctcaggtctaatattggagcagaacttgaagtggggataatttcagtactcacccttgggagtcttgaatttctcatagcaccaaaatatggcaatgaggagaagcccttctccaagctggaaaatcatgtagaggaggggaaagaagaaaagtggtccaatgacttcaggtggaaaggccacattgaggatggtggaacagagttggacattttggcatccagtctccatgctgacagtgcgtctgcacctgtgccggtgaagaaaaccccacatacactcagagggaactggagggagcaactttgtcccagtgctgctaccaaagagtttcgcagcagatggaatctagaccctggacaggggtactttgctattgctgctggtgtttggatacctttggtgtctggatttttaacccgttcaataccttcattcaatttttttcaagtctaaagtctcttgtccagttagtgcatctgaacatattgccaggaaagtgtcttgcccagatttcaggttcctagcttcttattcgtttcctgaaagactaggacaagaatgaagcccatgggacagtgggacctaaaataatacctatctccaggcatgcagtggctcacacctgtaatcctagcactttggaaggctgaggcaggtggatcacttgagctcattagttcaaaactagcctgggcaacatggtaaaaccctgtctccagaaaagttaaatcagctggtcatggtggcttgtgcctatagtcccagttacttggggggctgaggcaggaggatcagttaaaccctggaggttgaggctgcagtgagctgagaatgtgctactcccctccagcctgggcaacagagtgagaccctttcttaaaaaaaaaaaaaatacctaccgtccattgaggcagaagagagcagagagaacataacccagcagaaagccaataaaaggcatcagggaggaggtggcaatcaagagtggtgtcatggcaaacatgatgctcttccccacattgatggcagagagaactgtgacggccacactgcacaagagaatgatgatcatccctccctgggaatgaagacaagaaaaggcaattagaagagttggggatagagaggaacagaggtggggaagcacaggtagaaattggaggtgggaaacattgcaataaaacactggaagtggaaaggaatatgaaagacctttatcttctttttggattcctttctttaaatttttttaaaattattaacattagagacagggtcttactatgttgcccaggctggtcttactcctggactcttagcggtcctcctgccttggccttccaaagtgctgggattacaggtgtgagccactgcacccagcccatctttttagatttcgtatcagtagctaggaagcttggggacagctgattaacactt

SEQ ID NO: 76453 - DNA, 1480 bp, Homo sapiens
caggatctacctccatcatgagaccttcctgcccattaggcctacagtgggtcatctcactctgagttcctacaacacactgcaggctttactcttttttttttgagacggagtctcactctgtcgcccaggctggagtgcagtggcgcaatctcggctcactgccagctccgcctcccaggttcacgccattctcctgcctcagcctccccagtagctgggactacaggcgcccgccaccacacctggctaattttttgtatttttagtagagatggggtttcaccgtgttcgccaggatggtctccatctcctgaccttgtgatctgccctcctcggcctcccaaagtgctgggattacaggcatgaaccaccgtgcctggccagctttactcttaaatgtggtccccaggtatctctctggtctgtgtcttaaattagatggtaacctctcagagggctgggtgtgcatccaaagatccatcataataatgaacattgtgcaaggcgtagaaggaggtgcatcaaagtgcttactaaaaatggatgaaaagattctattctgaagatgagatgaggaaagaatcctctggattatatagaaacacagatatatatatatatatttctttttttctagatggagtctcgctctgttgcccaggctggagggcagtggtatgatcttgactcactgcaacctccatctcccaagcaattctcctgcatcagcctcccgagtagctgggattacaggcatacaccactgcacccggctaatttttctatttttagtggagatgaggttttgccatgttggccagtctggtctcaaactcctggcctcaagtgatctgcccacatcggactgtcaaagtgctgggattacaggggtgagccaccgcgcctggccagaaacacagatatatttgaaactggcatttctagttagtactaaatatttgaggccttcagacctcaatctgtgatataaagtattaattttcatctactgaaatatcccattgcaaatagaagtcccacaagacaaggagtatgactgaaactggacaaaccagatgccaagatagtcagattatttttggaccatgagtctggcctccagggaaagaagaaacttgtcaattttactttttttgcttggatcagaagattaagcctggcagagagatactgtttgggactagtggttctctggaattcctaaccttctctgggcttgggaggagttgggagaagaaaatgcatcatctgaatgatggccatggttacaacaggcctcatatgccaaccagagggaaagaaaatacttgctgagcagagtaactggaaagcagttgctcatagtttgaactaaactacatgattgaaatccagaataatgtagatttttggaccagtgaacacttggaaataagctttctggctggaaagcagcatttgatgttagggatggaaa

SEQ ID NO: 76454 - DNA, 1502 bp, Homo sapiens
tctacctgtaaagtaggaatgtctgacctatttcagaagattgttctgaggataaaatgagatgaggcatttgtcctgtcctcttcaaatgccatattgtgatacttttcacttaattattttaagggctttaaagactccatctcctttacttttgacaacatctcatggcaggggatactatttttatccccattttacagagagaaaaacgggaccctggatgagtcaagtgacttcttcaagcttataccactaggtggcagactcaggatttgaaccctgctgtacagctccagagtctgtctgaccaaagcactcattcccagtggaggaaaagatagaccattcttttagaagtgcgcttcatttttgtttggagaaccacaagtactttgttattgttccagcatccagtctgagctttcttgtcagagggcaatggggagaggggaagtcgtttaagcagggaatggtgagttccggtttgctgcttaaaaggatcactggcttctaaatagcgaatagacacactggctgccgtgtggaggttggatggggccagtgtggagagagggcaaaactgaattcaggagtcaggtgcgaagctgtttcatggaatccaggagagaagccctgagggagcagagctaatcttaggacctctcagaccagatagggagggggagtgtggcactgatgcttacaatcaaattatagaaaagaatccctccctgcgaagtagcccatactgatggaagtaagcactaaaggttgttctccacataaggagatcgctctgggtttcattttgcgcccccccgcccccttccctgtgatttcctggagatgtcagtctcactgaaggcagctgagcaccttgctctgttgaggagccggtgtgatgcagctgtgaccattcccaagatggccttccggggatggccctgggcagagccccccaacatctgactgaagctccgctgagctgtcctctccaagagggtcgggcacccgggagagatctcctctccttgttctaccccatctctgggatctctgcatcctcagactgccgcctcctcatctatacttttcctccttgtctcccatcaggggaccagggcctctctgcccgcctcttccagagctgctgggctatagagaggctgccccttgccctccagttcagagggggaagctaggatgcctgagttccaatcctggatcatacggaccatagggctgggagatgtgtgtgtgtgtgtgtgtgtgtgtgtgtgtgtgtgtgtgtgtgtgtgtgtgtgtagggggttaccgtacccaagaggccctccccagcggccaatgcccagcacacgcttcaccttgtcccttgcgacttctcccggggcagccgctgtgagactcaggatgtcacctcccagggagagtctttgaaagaagtggatgctcccattccccactccaacgccacagcccaccctgtgcgggtcatccag

SEQ ID NO: 76455 - DNA, 1028 bp, Homo sapiens
caccaccactctccctttcttgacccaccatccctcccctgtccccgaactgtcactggtgggttttctttcccaatctcttctctcctgcattttgctcaagaccctcagaggtgcctcctgcgtcggagagaagctcgctctccgctcatgcagggcttccctgtggtctcacgctggcgcccggtccagcgcgctggagttgttggcaggcggcgggggttgggacgggggcgggtgcagctctgcctggagagttttaggttacccgcgagccacacaaggaccttgtgttgttgttttaaaaagcgatcactgctcgtaaaacccacagcagataattttaatgtcacctcctgccgggcaggcactggaagagggtcagaggtggggtactgtaaagaggtgggaggggagagttgcgcaatgttcaggggtctctccccctgggttcagtgctgggaggttgaattactcgttgaaccttggtctgattggagtttctgaacgacatgaaacctgccaattctgtgcacaggacagattgtccagggcattgtaaaatctcctggaaccgacagtattgtgttcatttctggtctagattatccccgcaacaccccccaccaattggtctaataaagaatttcactgccttgaaacatgtactattaaacgacctagtggttcttttgaccaaacttaatccaggcaatctctggccaagcatcagtttatgtcagggcaattgactcttaactggcagcctgagagtccatgtgaaagtagctaggatctttgtgaaaacaaggttggctcaaccaactcgtgctttctttcttgaacatccttgggcctggccctttaccacctgttcagattgcaggttgtttattcatagcttttactatatgagaatcatctttatagctgtcgtgtggagaaaaagtcttgcaatgcttgacaagtcttaatgactgcccagatgctgggttgattacatccaagcccaggtatcactgtgagat

SEQ ID NO: 76456 - DNA, 1797 bp, Homo sapiens
ttctgttccattggtctatgtgtctgtttttatgccattaccatgctgtcttggttctatagctttgtagtttattttgaagtcatatagtgtgatgcctctggctttgttcttgttactttttactttgctttggctattcagggtcttttgtggttctacaaaaattttagggtttttttttctatttctatgaagaacatcttagtatttttatagggattgcactgaatctgtagattgctttgggaagtatagacattttcacaacatttgctcttccaattcatgaacgtgacatctctttccattcatttgtgtattcttcaacctgaaacttatttcttaaatgttttagatatttgttatttcttctctcacctcttgatcacttgattcatccttcaaaacccagttccaacattactctctaggaacttttctacagagcattctttttgcttaggaacgattactctctccttcgaacaacttctttttttttttttttaaggaaaatttgtattattttaattatttttatgtacagaaaactcaacagtgtacatttaacccagtttagtggcaagttctttagcctttgcctttttgcgcttggcgatacgagccacagacttaggacccaggacattgccaccccagtgacggcggatctcatcgtatctgtcattgtaattggtcctgatagcttccaccagcttagccaaagcgcctttgtcttctgagttcacctgtgtgaaggcgacagtggtgcaggtcttcctgtggactagacgtcccagtcttgccttccccttgataatgcagtaagggacccccattttacgacatagggcaggcaagaagacaaccagctcgatgggatccatgtcgtgtgaaatcaccaccagctgagctttcttgttctccaccaaggtggtgacagtgttaactcctgctcgaaggacaggtggtctcttcttcgggacgtcccctttgccagcagctttcttctcggcccgggccaacagtctctgcttcttctcttgctttgtctctggcctgtacttgtgggccagcttaagcagctgagtagctgtttggcggtccagggcctgggtgaactggttaatcgcaggaggcactttcagccgcttatagaggatggctctctgccgctgcaacctgatatagcggggccatttcacaaagcgggtgaggtctcttttgggctggatgtcctgtccaatgccaaaattcttaggccttttctcaaacaggggattcaccactttcttagcctcctgcttcttcacgacagctggggccggagccaccttctttcccttggccttctttcctttcggcatcttgggcagcgggaggagagagctcctttgaacaacttctatatctggtccacttgtattctaacttgtattaatcctcctgcagtgagcatcttaatatcaggccagcatcttcctcttctttgcaccaagttggccctttagcatttcatgcatgatctgttttgttaaatgaacaaatctgcaagccccttgaggacagaatagagacctcattcatcagggtgcttgtcacattgtaaagcattctgtaaatatatattgaaatgaagtggactgcataatgatgtccaacctgaacccctgctgttgtttaaatctgaaattggttacttacaaactggcttttccatttttgagtttttgttctttgtttaaaaataagtgtgtttggtagttacaggaaggctgggggaagagagactca

SEQ ID NO: 76457 - DNA, 1119 bp, Homo sapiens
ccagcccaaaagagacctcacccgctttgtgaaatggccccgctatatcaggttgcagcggcagagagccatcctctataagcggctgaaagtgcctcctgcgattaaccagttcacccaggccctggaccgccaaacagctactcagctgcttaagctggcccacaagtacaggccagagacaaagcaagagaagaagcagagactgttggcccgggccgagaagaaagctgctggcaaaggggacgtcccgaagaagagaccacctgtccttcgagcaggagttaacactgtcaccaccttggtggagaacaagaaagctcagctggtggtgatttcacacgacatggatcccatcgagctggttgtcttcttgcctgccctatgtcgtaaaatgggggtcccttactgcattatcaaggggaaggcaagactgggacgtctagtccacaggaagacctgcaccactgtcgccttcacacaggtgaactcagaagacaaaggcgctttggctaagctggtggaagctatcaggaccaattacaatgacagatacgatgagatccgccgtcactggggtggcaatgtcctgggtcctaagtctgtggctcgtatcgccaagcgcaaaaaggcaaaggctaaagaacttgccactaaactgggttaaatgtacactgttgagttttctgtacataaaaataattaaaataatacaaattttccttaaaaaaaaaaaaaaagaagttgttcgaaggagagagtaatcgttcctaagcaaaaagaatgctctgtagaaaagttcctagagagtaatgttggaactgggttttgaaggatgaatcaagtgatcaagaggtgagagaagaaataacaaatatctaaaacatttaagaaataagtttcaggttgaagaatacacaaatgaatggaaagagatgtcacgttcatgaattggaagagcaaatgttgtgaaaatgtctatacttcccaaagcaatctacagattcagtgcaatccctataaaaatactaagatgttcttcatagaaatagaaaaaaaaaccctaaaatttttgtagaaccacaaaagaccctgaatagccaaagcaaagtaaaaagt

SEQ ID NO: 76458 - DNA, 1058 bp, Homo sapiens
taatttatttgttgagtaaacaggtcttctggagtttccgcactagattttgctgcctgcatttcttttgcattttgtaacatgtttctctatcctttatatttctcgtaaaatgatagttaaatcaataggtttgatcaggtgtaggtttgatatatatatttttaagtatatttcatgggagttggtgtgtgcttctttcaggagacatacaacatctgtgatgttagcacccattgatgatcattgctagacctgttaattcactgatttttaaacaagtaacaggctctactgaaaagagattctaactttcgggaggcattgccattattttccttgtctctggtgttgccatggagggatagagaagggggtttagtgctaaagttcccttctcaaggctctgtcagtggggaggctgcatgcgattgcaaagctctgagggggaaactatgccctgagttcttggttggtggccttgggaggggaaccaccttggtttctggttgaagtggtaagagcataaaggagctggttttactttttactgctaattgggaggttttttggatgtaactatagatttgctttttgtgtgatctttggtatatttatatcagttggatatttatgttacaagaaacagataatgcattttgaactggcttatacagtgaaggagattcattggctcaagtagcagaaagtacagaggtaagacaggtgccatgggctgaattctatctccttcaaattcatgtgaagtctcaacccctaggacccagaatgtgattgtatttggagatagggccttgatgaaacaattaagttaaaatgagtctgttacggtgggcccttaatccagtctgactggtgcccgaataagaagaagagattagaacacagagaaaaactagggacatgattgccatgtgataaggcagcaagagggtagccatcttcaagctaaggagagaagccagagaggagaccaaccctgccagcatcttgatcttgaacttccagcttcagaattgtgagaaaataaatttctg

SEQ ID NO: 76459 - DNA, 1026 bp, Homo sapiens
tactcaggagatgtccaggaagatgaagagaagtgctatagcataaattagtaatagtccatgagggtccaaagagaagggctgcttgaattgttaaggtacatttgccctctgaccatctttgttcagggcctgaagcacagctctaaccaggaggtgcattttgactcatttcctcactcctttgttcagcctttgactcattcattcacttgttgtggatatcctaatttctgcagtttaaactgtaaatattcttggggatggaactatctgaggtggtctgggaattattaatttactgatggcacacatcttcacattgtccctcagccttcatgtagttctggcccagttgcttctaagattttatgagttggcctataatggggctgtggaaagtaagggggatgttgtgtttgcatctgttccagaaaaaaactctgagttaaaagtattctgattcctattagggtaggacatcttagggaggaatttgacaaatgtctgagaaagaatatcttttgccagattgaagaattgtgcaagtgcatattgcaaaaggctttgtcctatgtctttgtttttcaaatgcacaagaagctgttcagtggtgcacacaccaccccgctgggaaacagggacttgtcagctggcaaaattccatgatgcattgggagagggaaattcagtgcattctttggtggctctttgccttgtcaccatcttgagatgcctattgtaggaaacatctgttgttttggtctgcccagcctctactctgtcttttctggcaatagaatctctactttcctttggggaacaccgtccctcactctactcttcataacttgagtggactgatcccacctcccagttctagggtgaatgcatgacccaggcctgatcagtgtatgccctcctctggtttaggaatggtcatgtgacttatgctggaccagtggattcaatttggagactttttattgaaactctggagaaagacaagccctggggtttgtatgc

SEQ ID NO: 76460 - DNA, 1046 bp, Homo sapiens
cgtaaattcaaccctagcctttgagtcctctgtggagcagagacaaatcatgccttctctgtgctttctgaattcctgacctgtagaatctgtgagcattataaaattgttactttaagttgctaagttttgggaaaatttgctatacaaatagataaccagaacaaggacaaaaaggaggagtcaagagaagttggaagccaactgagagagagggaaggcttgaagtggtcaggacagtgaacacctaagagacatccactgaatttgcccactaggaagccattagtgacttcaataggaacatcttcagtgcatcatgaaggccaaagattgccatgaaagagaggaatggaaatggagtgtgggccactttttcaataagcttggccatgaaacaagggacagaaacagtggaaattagatggagatgcaaagtcaaaatttttctttaaaagatgttagagagagatttgagaagagaaaaaggttggagatgcagcaggaaaaaattactagaggaatgtcttgagggaaataggaggagttaggtggaaacagtcatatttctgagaaaatgttcttgaacaacctctggtgtagagggaaggaggtttaatgggtggtggaggagacaatttctgaggctaggggccatgactattttaagttctgggctgccagaacttaaaactagtctagggattaacaaccacaggaagcagcactgtggcatttaatgtcttatcatggaggaattattattttgatagcaaaaattagttaacttcactgtctatttataaaaggtaaaacctactacatggaatcttagatatcatctttttgcctctactctgagaaattctttctgtaacatgcttactgattatctattttcttgcttaaatatatggtgatttctttgtctattaaatataattttacctttctgagtcttctacccattgatcctagttctccctttgtagttacacaaaagagaagaatttcagatcccactttatcttgtaatgaaccaaggg

SEQ ID NO: 76461 - DNA, 1002 bp, Homo sapiens
tgcaggtaagtgagcctgtgggtggccctttcctgatgtttcacacccttggatgaggtcttgcatcttcttggtggctgctgtgctggagggtagtgggaacacggacagactctggccgcaggacagcctgtgtttagacgaagaataggaaagaacacagtagacccctgggaatctgctagccaggtctgggagggcctgggcctcagcatcctctttgctttcctcatctggccttttgacagtgccttgggatctgtgggtgccgtgctggccttccagtgctctctgacaggtcttcctattagtgttggaggctggatgaggagatcattctggtttattgtggtaacctccttaggtacaattaggacttggggcaggctgggctcaaaacagtgtaggggagttgtttttcagttttgtttctctttccttgcctcttttcttttaatcttaggttctggggtgtgggggtgtgtgtgtgtgagacaagtctatttggaagaactgtattctcccaattgtttctttgaaatgtccctctcttcttcttctctgcctcccagcactttatactcacctcttctaaagtcctctatggtgatggattggctcgttcactgtagatttatctctttgctccactagactatgggtggactccttcaggtcagggactccatatttccaactataccgaaagaactcagaagacagggactgtcttaaatctccatactcctagggctcagcactttatcaagtgctgaaaaattatctattggtgatggcaccaagcagcatatcatcataaatatgtgagtttttggtgtccctgaatcatggtgcatattcactctatatgctttgttattttacttcagcgtgtgaaatatcgccttatgatctgaacatgtaatacactgtgtctgatagcaggaattggctgagctcttccttattttttgtggtagacttctctaagcaaatacattt

SEQ ID NO: 76462 - DNA, 2668 bp, Homo sapiens
atgacatgaggtttatgtttccttatctccttggctcattccttgcctgtttagagaagctttttagagtatatgtcttctgtctgtttatacattggaacctagagttagagtggaaatgctcaagttcactacagagtcatgaataagatcctgatcatgtgggtataatgagcttcctaaaccagtggttctcaaagtatggtcactagaccagcagcatcattatcaccaaggaactttgaagatgtgcagatttgatccccagcaaagaccccttgaatcagtaagtctaggcgtggggcccagcaggctgtcattaacaagccctgggcgtgattctgatgctcctaaagtttgagaaccactgctataaattaggggtctgtaaactttttctggagcagatggtaaatattttaggctttgtggggtatagggtctctgttgcaaatactaaactctgccactatagtgcaaaagcagccacagttaatatgtaaaagaaaagaatgggcatagctaagttataaagtaaataaagccttatatttacaaaaatggggagctgggccagatttgtgcacccatttccccacagtagtttgcagacccctgaaaaaactaaaaggcatcttcagagtagtcagacttgcttgttacttgcctcgtctatttagtgatacattcaaaatgctccttaacacccacacgatcagaagtgggagacaccagtaggaaggaaacaaacaaacaaacaaacaaacaaacacaaagctgcctaggtctggtgaagtagccattatcatgcgagaagatgcccagtgaccagagatatctgtccctctctaagtcttacctggtttccaactgtaatgcttattaatgagacctttctgactgttctcactagaaatttgttcttacttatcccaagtgctgcctgacagttctgttctcttcctctagtccattcatgcttctggtgtgctggaagactagtttacgtattcttttttctaatttattttattcattcattcattcattcattcattcattcattctgttgcccaggctggagtgcaattgcatgatcttggctcgctgcaacctccgcctcctgggttcaagtgattctcctgcttcagcctcccaggtagctggaattatagccgcccaccaccacgcccggctaattttttgtatttttagtaaagatggggtttcaccatgttggccaggctggtctccaactcctgacctcaggtgatccacccgcttcagcctcccaaagtgctgggattgcaggcttgagccaccgcgcccggccagtttacacattctgtcctcaaacttccaacacattggtcctccttcttcaatctcagccttgcttcctctttcactgagaaatccaggcaatggaagatagtttcttcaggttaccattactgtatctctgaatctacccatgtctgtgccctgaacctcctgtcactgtggatgaactgctgttgcatctgtacggggcaaacccctccacttttgtgctaggtcgtatctcgtacttactcaaggacattactgtagccactgtctcctgtcttctgtgttactatccaccacctcccactagatcatttccttgttgtcaaacctattataatttctaccttgtcacctttttattagcatcccatttctctgctgtccttggcagcaaaactccctataatggtctatacatgctttccctgatcccttgtctctgtcttctcttgaacttacacctctcaggcttgtgtctccattacgtccctgaaacaacttgtcagtgtcaccaatgacctccaagctggctaatgtgcagatacaggcaatgttcagacctcattgtactgggtttttagcagctcttgacacagttaatcactgcctccatcatgggacactttcctcagtttctgggacattacttggttctcttcctacttgcctagatgctcccacttagtcttatctcctggctccccctcatctctctcacccataaatggtatagttcctcagggctcagccctaggaacactccctattctcattcctttgcttatcttttctaattttatggtttaaatagcatctctatgcagacatatctcaaatctatgtctctagtctggatatagccatacctacatatctgccttcttgctcaacatctctatgtgggcgtctgataggcatctgaaaccaacatgaaaccaaaagcccagattttccctaccaaccttaccaaacccatttacccattcctcaactcaataaatgacagctccatctttagaggtgcgacgaaaccttcagagtcatccttgaccctcctctttctctcatatcccaaatcatatccatcagcacatcctagtgattctactctaaaaatgtgtccagaatctacccgcttcttgccacctctgctgctatagcctggtccaagccgttaggctctctcctcaggataactgcagtagttgccacactggtcttctcttttcagcctttgggctctaccctctgtaagcagcatggcagcagagggagctttctcaaatgtagatcagatcattcactcctctgctgcccattttacagcggcttccag

SEQ ID NO: 76463 - DNA, 1039 bp, Homo sapiens
atatcgtaacacatctgtgatgattttacaagttatggacctgcagaagaaatggaggtattaaacttgacaaaacccataattggtagccttgtgaatgtgaagctgggcctcaagcttggcccagtgggactcagatctcatgctgtcaactcacaatcatcaaagctgcaatgggagttgggtgggcctaagatctacagggaatcctgcctcattcactctcctggctgtgatgaaatcagtggaaaccttccagaggtagacttttcaaaaaatgtattttaactctacaattagccaacataattttggataacttatattgggtaaagattatccaatatgaaattaatacaaccatctggactaaatcatcctatgaacacaaatacccccccccccctttctcccctggagtagggataaaaggcacatacattgcatcttaacatggaggtaagtgcctgccatcatccattagtctcctgggaggcatggatgcatgctctctctccttggcagttgcctaggctgttgctatggactggatttagtaaagggatgtcttcagagcaaggcccagagcctctatcaggaactggatcttcagacagaaggacagcatgtgcccctgcactcgggacaaaagccaatgaagcccaaaagcttagagccccttctatttggcagtagaaaactccttctgtgatctctaggtctttgctatggctgaccttgtaagaatgagtgaaccccaaaatgtgatcctagatatgattagagccagtgctggatgtattactgccgtttacctctgtaggttttatggacatgtaaattaggcagtgcagatgagatgtggggctcttcctggcagcagacagccctcatattattattaaggggctattgctagaactaggacgtagaatcataatttatgtgctcatacatctcaacaggttcctgtcatattcaaatggctctgtcctccccaattgtcatggttctgtcctcccatcccaatgcaaacatt

SEQ ID NO: 76464 - DNA, 1036 bp, Homo sapiens
aaaggaggaggagaggtaggggaggtaggggagctaggggaggcaggggagctaggggagctaggggaggtaggagaggtaggggaggaggagaggtaggggaagtaggggaggtaagggaggtaggggaggtaggggagctaggggaggtagaggaggaggagaggtaggggaggtaggggaggtaggggaggtaggggagctggggggagaggagctagagaaggaggggaggtaggggaggagtgagagtaggggagctaggagaggtaggggaggtaggggagctggggggagaggagctagagaaggaggggaggtaggggaggagtgagagtaggggagctaggagaggtaggggaggtaggggagctgggtgggaggggagctagaggaggagggatgctaagggaggaggggaagcaggggaggaggggaggtaggggaggaaaagaggtaggggagctaggggaggtaggggaggtaagatgtgactctcacatgtgtgtccatcttttttcctttagtagattggagggctcttgaggggaggaaccatgattgtccctagattttgtgtgggcagcacccaaggttgacattcaagtgtgtgctcaaatgtcacctcctcccctagagtctctttgcaatcacaggatccagtcccttgctgtgctgtcaccccattttattttcttcagagcacagattaccacccgacattgttttatccatttatgtgtgtgcttgtcccgatccccttaaatgtagagcccacggggccggggcttgtgtgtcttactccctgtgtctccgtctccggcactaagaacagtgctgggcacatagtaggttcaaatatttgttggctgaaagactgaacactggaggaagcaaacaaagagatgtgaatcagggctgctggctctctggaacctggaggggttcactgtagaccaggtagtctccatccagcaagttcattgtaggttagaggttgttctttttccaattttcttatcagaatgggcagagc

SEQ ID NO: 76465 - DNA, 1071 bp, Homo sapiens
cctggagaagaagggagggatatgatctcccgggggaaaagtacaactcaataaagagcttcttggttctggattaaacacaggtggaactgcttcttactggtaattgggagtttggccagattgtggggcttgtttcttggtcggacagggaaggaggcagccccagaggcgttaggctgacgaaggaaaagagaggccttcttactcagaaacctcttcctggtgtctgggccaagctaggatcagtctcttttctggagatgcaagtagggtctggtacaggacttgagagttcggccccacatctgtggtgaccctcccctagggaggcagagacgtggctgggggagcagccccaacccctgtatccacttcagagatgggctgtggaatccacatgtgcttctgctgcttggcttctggatcattcctgattctgttcccacctctgccctcacccctttcatccccagtgactgtacccctgacagcacccttcccactcccctgacagcacccttctcacccccctgacagcacccttcccacctctgcacctctccagccagttaccgagggacctcactgcccatcccaccacactgcccgtcccagaaggccgtcagctgccggatcacctcacttgagaggtctgtaggggcacttgcgatgtgccaaaaacattgctcaggttggatggatgtgctcttggcatgagggtgagcagaaaccgagtcctcttttgtgcaacattatgtttaaattgcttgaaccaaactgtggctttggggcagggctgtttttccccttagcagctgactgggtgcagaggaacaacaccgagtcagttccagccactttttctgggtaagtgatggcagccaggtcactgggctggggttttaggagtaggaggtctgaggaagggcccctgggtatgcaagagaaagggtcaggaaatgggagttcctgggcctcagggcttaggcctcagaaaagctctgtcaagggaggaccttgagagcctggccagctagtggcttctgaagccggcttcccaggcaagga

SEQ ID NO: 76466 - DNA, 1031 bp, Homo sapiens
gggttctttctgggccacagaactgaggctcggctgtcttgagggagccatcccaccttcacacagacatctggcagcagccacatgggcgtctcctctgtctcctgcgcacgcatggccgttttattcagggtgctctcctctgcctgacatgcctttcctcgtctcagccatgaggccaaatgttatttatccttcaaggggcagcctgagtcccgctccctccgggcagtcttcccagctgccccaactcctccttctccaagaccttcagctccactcgctgtcgtcctctggacaattccatgacaggcgggcagtgtatagctcttccttgtttgttggtcttttctcttgacccagagcattggcttttggaggaaggagccagatcatgttctttgggagctgacagcaggcgctgggtcaagcctctaatgagcacttaagaaataattgttgaattgatcaacaggaaataagcttagattgcagcacaagggatttaggttggatttaaggaaggatttctagagagccattagatgtttagaaaggatggctgagggagactatggcagtaccaggtcttaccacaattatgaaaaataagagaagattctcctgaaaatcaggggatgtggcggtggcagctgtcaaggtttacatggagaaaggtggggaaggagagaaagaaatggccacgctttagtgtccagttaaaggactacagacttttggctggaatctgcctttctacttctgattcttgtcattagctgagggctttcttcacttttccctcctgtgacgcagcttgagtcaagctatacctcaaggcgtgggatgagaagtggagcaggtgtcgcgcagggagcggggcactgacctcaccagggccaaagccatggagcatccgcctgttctggcagtccaaagagtggctttgccatcccgttcctcagaacccgagctgttcctcaaccctccaacaggtgcgtggtgggttgtatggtgaaggcatgctcaag

SEQ ID NO: 76467 - DNA, 1048 bp, Homo sapiens
agcaatctccaatctagccagatggggcaggaaggatggggtgggactgaaccacaggggagaagtgttgggtcctagaaaaattgctgctgaggtccaggtgttatggcctttgaaggactcagcatctttgtttagtcctactcctctcctttttaagggaatagatgggaggaggtaagaatgtggtggtaggatcttagaaacctacatcttctttactaaattatgcaaaaacatcatttgctgagcctttacgtagtccaaggctggattgagggtttagctcctttggatcttcacacagttccttggtccttgttggctgacatataatggagccataggtctgggtttgaattctgattatatggccttgatcaattgctcaacttttctgagtctcagtttttccatctgcaaagtgggatgcagaagattacctcttgggtggttgtcaggatcaattaaaataatttatttaaaattcttagccctgcccctggcacatagaaggcatacaataaatgagaatcccctggaaacttatttctattctactatgacttcttcctctctaattccctcttagaatgctgtaaaatttcagcagtgcaattgggtgctttatagtctaggttttagataaatgtagtcttctttcttggaacttctgtactaaaatataatttttaaggcagttttctggtggagacagggaccccaaatagatttagatctggcatggggaatctgtttaaggtaaagcaacctctattttaagtgtctccttcagagatgcttttaaatgcaccaaaagttggggagatataccttatcgaggtaaaaaggagaaaattgaaaattgtctttttctgctttccctagaagaaatagtttcttatacaagaccaaacactccagcacaagtcatccttagccctatctttttggaggccgatcagaaggcagtcagccctgtattttaacctagcctaagtactctgattagcttgagcaacttcagaagttggcctgtggcctcccg

SEQ ID NO: 76468 - DNA, 2816 bp, Homo sapiens
gatgagaaaggagacccagcaagaggagagtctgtcttgcaggttcagtggctcaggcctggagagtggcttttgggcttcttaccccttaagatgttgttgggctgctgctgtattggggatggagcaggaagcacactgggtggggctcacctggcccatttggctcattgaaggagggacaagcagtgtccatgacttctgtcggtggcgtgagggtctcttataggacactgataaggtctccattcacctcctttggggaacatactgtgatatcggaggtcttatgtctggtgatgcagagcagatccagaggggaggaaaacaaagacttccagtgctattgtttttgcaagtaacttagctggcagctttcttcttccacattcttggtcctagactcttgaacaagagccagtgattgtgccctccaaacgatgacttcctaagggctcttctcagtgtgagggtgtgtgcacgcatgtcgctgtgttcatctgatggaagcacacatgcctcagctcatgaacaggttcagctgatcagcccttttatttaaagcactatccaactcccacccctttcaaactctccgtcggactctgggccaggttagcttcatttcagccacattgtgagttactgagtgtattagtctgttctcacgctgctaataaagacatacccaagactgggtcatttataaaggaaagaggtttaatagactcacattcagcagggctggggaagcctcataatcatggtggaaggcaaaggaagaacaaaggcatatcttacatggcagcaggcaagagagcgtgtgcagggaactgccctttataaaaccatcatatcttgtgagatttattcactatcatgagaacagcatgggaaaaaaccacccccatgattcaattacttcccatcgggtccctcctaccacatgtggggattatgggagctacaagtcaagatgagatttgggtggggaaatagccaaaccatgtcactaagacattttgtctcacagccagttccagtgtcatctttatggaaaaccaatctctggatcttactggcttttgcaagttctctctaagtttggggctgcctgttggaatcccacagtctgctaaagggacccagtctccccttagcttctattctgataactttttgataactggtatttccatttctcttctgtctgtgattatacaatagtgccacattcacatttactcctaaattacaatgactctaagaccctcatctgctcaaacagtaactccccttagtccccactttggtgtgccttggatacttgcacaaataagttataatttcctctttgcccaaaggatgcttagtgctggctgtgcccatggtgaaagccaggtccaggtgagtgggactatctcccactgctgccaaagctgtcgattcaggtgccagagcagggatgggcttcatgcagaggtgggaagaaggacccacctcatttctgtttctctttgccatctagctctgtgagtgcccagaatctctcaaggggaacttgaatcttttggatgccactttcagcttctgcatctcccactttgtccagaatctctacaagtctcttgcgaaaacaattctgtctgttttgggatcttgtctttccaaccagaggggttcagtcactgcccagcacccagttgtattgagaccaaccccagccatcttccccactccccactgaacttctccctcagtcccctagtggtaaaacacatctcacatatcactgggtgcaaagagctaccagtgatgatgagctgaggatggtggcccagggtccggtggcacaggagtatccagcgctcactgccacaagccagcaggctcagtgccatgctagatatttgtgttcttagtaatgctcaatgaaaacttagagcatattgctggtcagatctcataggagtgttcaggataactttataaggagttactacccttggctgaataaattgctcctgccaggtggagcgatggtgctaatttaacaaacccttcctatcagatgtgtgtgtcattgggaggaagggcaggacgcttagaaccaaacaggcatgaagaaactccttctttgtcctctttgcctttgcacccccacaagtctaagtcctctcttataatccatgatctcttggatgcaccccaagtgtaagaccattttgtggctccttgttaataccatcagcttaatctctattttttttccctcaatgctagtgggctgagaggattaaaaatatctggatccctgggtcctggagagctctctgtttatttgatttgtagtgagaggagtttttgtgctggtggcagactttgagggatgaggagagggaatgggcatgtgactttctccagcctctgcttccctagtatttagtgacagggcaggggtgtgtgtgcacaagcagaaaataaaaataaatgccttccgtctctgagtaaaaggtttgatgccctgtcggtgatcaaggaggactaaaacctaaagggcatttaagttgtaggactccactcatgcaaagaagtattttgatctccacttgtcctcctttctccttctttctcacgaggatgcatgcttctggcatcccgccctgccctacctagcctcgtggaagtcctgtagggcagcgacaaagcccactgatattctccatgggcagcaaccctgttccataagacagtgataggatttggttcttggtgcttttatttcatccagttggtccagattccacctggcgcat

SEQ ID NO: 76469 - DNA, 1039 bp, Homo sapiens
gaatttttaggatcctctatgatctctccccaacctggccctaggggctgatttcttctatgaagggtcatttctaaactctatcttgaaattactttgcttgtgtacttaggtgtacctgttgtgattctcttagcttgtcctttcaacatcccttcctacttgtgaaaatcttttaagacccagtttatggctccttccctgagaaattctcctggatcctttcagtctgaatttacctctccttctagccctacagaacacagtgtcagctgctctgtccagcactcagcagagccctgaagcataataggtgctcagtgagtctttgccaaatggatggttctttttccttcctccctgcctctcctatcctctcttttcctttctacgagtttgctgtgaccatctcacatcttggattgtctggcatcccattttcccatatcctatctgtttgtttgtgacttaggctttgcttcctggtttcaaaaatgcagccccagtggagatatgtccacatgtcagtctttgcaactagatcagcttgtaggggcagggcctgtgttcttgtttattttcataatcctcaatgtacctagcatggtggcttgtattaaagggggtgggcagagaaatcgccagaaacttctctgagtgcctatgggggtgtctgatgtgcccttcaaagcaaacattctttggaattttttctttagttttgtgtttattgtttttatcttgtttgtttgctgagttgtaatttgcgtggagtacaattgaccccttttaggtgtacacttttatgaattttaacaaatttatatagttgtgtaaccactaccataatcaagatctagaatatttccatcgcccacaaacatgttctcctgcttctctccttatctccagtccctggtaatcattaatccaatttctgtcactttggtttggccttttccaggatgtcacataatggaattatatagtatataactttttgagtctggcttctttcatttggaataatgctttattt

SEQ ID NO: 76470 - DNA, 1041 bp, Homo sapiens
aggtgtcattatccccatttatagatgatgcaacaggtgtgggatgtggagtggcagagctggggttcagactcacaaatccctaagtccagagccctcagaagccctccatactctgttggctctctgagctggcagctttaaaggaggctctgaggtgtgttctggaaggaggcagtctggtggtctggttagagtgctgctcctggagccggacacctgggcacgaagctcagcccccacccctcaggtaagtccccgagcttctctggggtcagaatttccttatctgaaaagtggagattgattattatgattgcttatctgttgttattcactattattgtatgtaataataattgttatatattatatattcctataattagtattgttaatgatcattattatagcttccctcattaggttgtgatgaagataaaatcagttaacacacatgaaacacttggaactcataaataatatataaatttttgtcattatcatcatgattattcccatctctactgtagttctactactgaaatctttctatcatgtcgataccactataccgcttaagaaaaaaaaacccaccaaaccttttgttgaaaatccccaagttggaaaatggatgaactcttccatcaattttttaaaaactgtttattctggtaaaaagaatgtgggtgatctttgtatatatttaaaactgcattgcaaagaattcatgtctgtggggaggaatcagacttctctcagattagtttggggctgagacagggtgaaggtaaaggaggagagtggagtttgtggccatcggctttttctttctccaggcttgtgtgatcctgggtgtgttggttataggaatggctgacccctgccctcctgattctgaagtgttggctacctcgtgacagacagcccactggccagcttttgttttggtgaggccaggccagaccaggtggtgtttactgagggaaaggaacttccagattagtccaggctaaattgctaaacgagagagtccctgaa

SEQ ID NO: 76471 - DNA, 1047 bp, Homo sapiens
gagctccgtggtccaggaacaatctttcttgatatagttgtatgggcactaccacttctcccattttctaattctaaccactgctcccctccaacagtgcacacatgtacctgatttttttatttcctgaggtcattgcatatagggatctatatgcatggatcccttgcatatagggatctatatgcatggatctcttgcatatagggatctggggagatgtaacttcttcttgatgatgctttgttctgaagttggaagcttaaaaaatgttctgtggctttttgacaaaggcattgggctctattgtcatttccatagttcttactattgtatttcctaaaacctagggaaatacacacttgtttcctaagtgcctggggttgagctatgaagcagatcttattgttcctttttagctccccagccccacagtatagaaacgcatcttcctgacgtcacccctgtagactcgagttgtgtgactagcttgccctgggaacaccttggtttaccgtctggtttttcttctttcacattcccagcaagtactgaaggtctggatgcttgacatgaactgtgaaactttgttggcctggactgatgaaacattggcaggctgaacatcctcatagggtggaaggggtttgtcctatctttgatgagcctgggagtctaataggagttcaggggccaagggcctttttgtcttcatgtggatatatcttgcctagagcaacagtttggctctctcagacagtgtagaggaccctctaggtgaagtactgagacctggggtgcatctgtgagctggaatgtttccaagcttcttcagccacagttggcccctttggatgctgcagaaaaagtgggctctgtgtgtgtttagtggatggtgccctgctttataaagacctcctgccttttggtctgtggacaatgccagcttttttttttaaagcagtcatactgccaaaaattcaagcccatcctttatgtacagatggtataaatggtaaatggtccccactgttgggcacttattgc

SEQ ID NO: 76472 - DNA, 1346 bp, Homo sapiens
ttttttgtagagacgatgttttgtcatgttgcccaggctggtcttgaactcctgagctcaagcaatctgcctgtcttggcctccgaaagtgctgggattacaggcgtgagccactgcgcctggccaaaaagctttagttttgaagttcaatttatcttttttttctcttttatttcttataacttcattccttttcatgtgtatattcggttgtctcaggactacttgttgaaaagactgtttttccatcttgaattgtcttggtcctctcatcaaaaataagcttatttctggaatctcaattctattccttaatctatatgtctagtcctatgccagtgccacactctactgattactataaccttgtagtaagttttgaaatcttattttttctttgtaattggacagtgagatgagggttgttctgcacccatgtatggggttaatgctggctccactcaccgaggcagagcatctagtagggggaatgcacaggaacctgtagcctgtgctgtggtcctaggtttggagacaatgtcagtacccttggcatgatatttgtaagaaaagggaaaggttgggagagaacggtaccaaatgggggtaggaaactttttagaatcaccaaagatgagcattgtatatctctaagagctttcagtctctgacaggccaatacttctttgaatctacaagcaggaaagggaattccttttcaaattagaaactctgggttacagggagccttgaaactgtagaggagaaatgctactgcctgtcggagtagagcggtgtgcttgtgctggtccctcccgcccctcccccaatggcgtatcctctgtgggcattaaggttctcagcacatcaagatctgggagaggtagaagctggagccccagtgagcagcagccagtagccagcttcccaagggcaccctacttttgccttcctgtgggaggtcaaggtggcatatcatttgcagtgagtgaacaatctcagttatgcagttacgaaatttaatttttaactttgtcagtgatggcaagagcagggtctgacccattcatgtgcaggaaggacttgtctaggaagtgaccggtctaatctcttgcatgtgttgggagcctctactatcatgttttcaatggaagaactggtccccatgcccccatcacccatcaggtgcaaggatgtgtgataagatgagggtggatggagcacgctttgtgctcagaacactgtctccattgtgctctctggggactcgcctatcccactctctgctctgtcctgctcttcaatggctgttttctagctgaatggccactgtgagtcctcttcag

SEQ ID NO: 76473 - DNA, 1823 bp, Homo sapiens
tttttagtagagacggggtttcactgtgttagccaagatggtctcgatttgctgacctcgagatctgcccgccttggcctcccaaagtggtggaattaaaggaactgctcttcttttttagataatcatcatcatcaacaacaccaccactttcttaacctatacacaaggtgccaggctgttttatatttgcctgacacatgttaagttattcagtcctcactataagcactgttacattcccattttattgatgtggaaactgaaccacagagaagctgtgtagcttgcccagggtctcacagtgtgcaagtggcagagtcagtattcaaacccaagtaccctggctccagagttcttgatcctaaccatgattccacactgcccctctaagagacattgccatcttttaaagtgatgttgccagactagggcatattcaggagggtgactcaggtgagtaaagttgggaaatgatgtcatgtgaggaatatccaatggagccagagataacaaccaaaggatggataaaaagatgactaggccgggtgcagtagcgcacgcctgtaatcccagcactttgggaggccgaggtgggtgaatcacctgaggtcaggagatcaagaccagcctggctaacatggtgaaaccccatctccactaaaaacacacaaaaaattagccaggtgtggtggtacatgcctgtagtcccagctacttgggaggctcaggcaggagaatcgcttgaacccgggaggtggagattgcagtgagccgagttggcgccactgcactccagcctgggtgacagagcaagactctcaaataataataataataataataataataaaaagatgaccaaagggatacctgagagccagatccaaacctttgtctgtgaatgataataagtcttttaagtgtagtcccacagagctgacccaggatcactgagtacagtatataaagagtaggattctgactcgaaatagggaagaacttttgacaagtagagtagctcacagacagaatgtctgactcaaagaggacttaacttcccatcctggaaagtgggcaatcagagaccaagtggatatccatcagctgtgccatggggatgggagggagtgttcctacattgggaagggggttcaattgatctctgaggaggaaaacaccactttttaggattttatgaaacaagagctaatgtccaatcaggtggctaggcacacagtaggcccacaacagacatttactcaggaaactttcaggcagagccattaagacacacgtttagggcttttgccactgctctgtgagtgcacgtaacatgctgggaggtgacccggcaggtcagtcaactaaactcttctgcaaaattgaagggatcagaattttttttcatgtcaaaatagggaagaataataggaactcaggtgggaggtgtgaagacagaaaagttttattaaaagtgaagtcagacaggagaacaaggaaaggctccactcctgcaggccacttttgtcttccccaccagccagcgttctcacagttctcatctgagtaaatgctcctatttatgagggactttcttattatgtactttttaaacataaaaatatatttgatacttaacccccaagatagaaataaaattaaaggaacaagaggtatcatatttgctgtttacaaaacctggaccattctaggcaccagacagaggaacaggagtgaagacagtgaagtttcttgggtccccggagccctaacactcgggtgttccaaatgtctttatatgtcctttgtgggggatgctg

SEQ ID NO: 76474 - DNA, 2095 bp, Homo sapiens
gggccagagacacagcctcgggcgatggacttgagggcacagtcctcatggagacagaggcctaccttggccatgggagtcaagggccctgggagtgagtcagcgtggccattcagctcctgggacatgtttccccagaggtgattattgaccaaggaggagagagcagcctgccaggctccattaaattgctgccactggcaaggaactgtctttaggaaatatcccctctagggtggatggagtctgaagggatcaactccacatttccagcagcatttcccacccaagtctgtggaggttactagaggagatctggccctggaaaaggccagcttgccaggcatttctggcatcgctgagaacaattctcaccaccgccactccatatccagccttcgctgggtgccagacaatggacttccttaccttcaggtttcacgttgttatccccattttatagatgggctcaaagagctgagcgatgtatctagttcataactggctggaccaggattcaaatccacgtctatctggatttttttccattccaccattaaggctcctcagaaagtagtgttgacgtgaccccaagatattgctcttggatgaacatttggggtagcaaccatggccatgagatgaagtgggtgtgggacatggtactggggtaaaggcattgaccagaagacccgagcagggtctcagatgcaggagctgcgggaaatgcctcatttagacagcatgcaccttcgtggtaggaacaaggttccccctatcttgtcttatccttgatttctgtcgataggtccatagcgaaacaacttgtcttggggaaaatgacggtgtttggtgtccacacgagagcagaagcctttctacagcttttctgcctttgtgataacttttggatttcaccaaggctgtcagatgtctcctctcactgctcccttccatcccttaccactcaatttgtgtgctattactgtctagccttgatttcaatatgtccttgatttcaagaagcacattttcttcacaccttaatatctttgcagttggcacatgtcttgtaattgagatctacatttaatgtagtggggttgtttaaattgacattgcatttttataattgatggagaccaagaattgagaaaataggataatggatgcctttattcaacccatcaatcacctacaatgaatgtcaggcattatgttagattctgggaatgtagaaataactagcatgcagtccctgaggtcacgatcttgagaggggggagtggactggatgaatcaacagctagagctcacagtgataagggctgtgattttgggggccccagggtgtgtgggaggatcagaggaaggaggcaggggaggctgggactgctttgaggaggtgtatcacaaaggaggaggggaatacgagggattaggagtggatgggagatgggttggggaagggcattccagacaaatggaatggttggagcaaacaaaggctcagaatcaggagaaactaaaatgtgtttgggagcatcagagggttctgtggccagagtggagggtgtgtgctgggacatgggcatgaaatgaggctacggaaatagatggaggcagatcacagaggaccttgtgcataccaatgagtttcatctctatcctagatcccaacgcgaatcactgaaggattctaagcagggaagtaggccttaatgtgtgtttaggaactccagattgaaagcaggatagtggggtggggcgggaggtggtgggtagggtgacagctactggaagagaaagaagagctaccctgaaggatgaaaaaagcctcattcctttttgctattcccaggcaggcagacctgatcttggaggcttgaggaagatcacacagtggtgcagcagggcatctagaaataaaacctgcaggttttacccttgccttaatcccgtcatgtgtgccctcatctcaagacagtcacaagatcaataggcaagctgatctatgaatggatgctaggagaagctagacaaagaagaaaagcttaccacttgtctctgcttgttaaagaaatgtcatttcaat

SEQ ID NO: 76475 - DNA, 1025 bp, Homo sapiens
agagagaagcaggtaaaatgctgtggtttgcgtgggagtcccacagcaaccatgtacccagtgctgttcactgactggaccacccatgagagacactctggagacagatgtggggatgagaggtggaagatgctctttcaccgtatgggtgatgctttgaaaggggttggagatgagtcttgatattgtgaccgagacttatggttttcttcccttttcacttccctgaacaggtgcagtgccatacttacactgggtactgctggtgtgtcaccccggatgggaagcccatcagtggctcttctgtgcagaataaaactcctgtatgttcaggtaccgtagggaggggcgggaagaatgaaaagggttggagagagacccgttggttggtctcctgcatcttgtgggagaacctttagaaggttgatggtggtgatgaacctttttctagatcagggaggattctactctaacatgcttgctcggaagtcagcaaatgataaggcatgacagtgtatgccatgtgtgtgtatttatggattttgagtttagatttttggttcaatgctctccttctaagcactggctgtaatctcatagagctgtggtggcatatgagttactagcttttgtgctgattctgattgctagtggctcttgaagtgctttattgagttggattttgagaccacctgggagctcagcatccaaggctgtagttatctattagtgatgtctatcatgggatcaggagagaagaatggtggcttctgtgtcatatactcaccacccctgaagaatgtaatgtagagaaatggaaaattttcgtaacagtggcccttaaatctgactgatcaacagcaatgtctgggaaattaaagagaacccagatatcgaggcttcctcttgtatattctgatccaggaggcctggagggagacctgaggtctttgtttttatgaagtctctcaggtgattctgatgattagacaagttagcaaactattgctttatagtgatccatt

SEQ ID NO: 76476 - DNA, 1104 bp, Homo sapiens
attaaaccagagaggatgaggaaggtagggtgcccaagtctgcccttggctctcttgttgtgtaagcacatttgggcatttttcccccctcgctgatgctccttcataattgtcccagcacatccagattctcttcactaaggcgaggctggctttgtgggcatgcgacctgtgcagttgctatcctgaaattctgaataattctgtctttgagtctgatgggacagtgaagatgcgagtgagtggaggagagacacgtcatatgagtgtctgctgaaccttgtcacctcattagcacaaagcttttgtgaggtgtactatgtggcttccatagcatgcttaaaattttaatttttctttatctaggacaatactaagtagcaaattaaaataacaccgtgacaaggtaagagagagagactatggaataaaggacaaagttttgtattttagtgcctttaatggcacttttccctgctttttgaatgaaaggccctgcatttttactttacactgggccccacaagtgacgtagctggcatctgtctgagggctgtttattggacaagccaacatgagccataggtccctggaatatgctgaccatagtttttagcatggaagacagttggaggcttaagattcactgccactgacctccaggacagcatatgtgcagagctggtagttgaatggaaagcaagtgtgcatttcatctcgtgtgcagcctctccaggactcccatctcaggctgagtttggggcttcccacctgcatctaggccttggaaactacatgctcatcagggcccacgtggagccttgggcttgctgagggtcattgtgaagttcacaggcttgtcctgcacacacagttgcagggagaccaaggtaaagccctgggccctgcctccagtgcttatgccatgggatgggaagaagaggcgaagtcacccactctgaatgcaggagataaggatctggagaacctgctgcccccaaatgcaggtgctccaagaagatgtggaagtggaacaggtgataccaccacccaccagaaaacagggaccaatgggccagatgggctactgctctttccctgggc

SEQ ID NO: 76477 - DNA, 1167 bp, Homo sapiens
tgaccgggctgggagggatcggctgtccctcccaggctggaaggaatgaaaagatgtattgtgtgaccacggagagtctggtcgccagccaggaattagttctctgaaggagaggaggagaaaggcagagcagaaggaggctgggggaggaggcccagagagatggcaggaggaagggaggagagagagaggctgggtggtcacagccgtttggtctaagacaggaggcctgagtggctgtggctcctggatccacaggtgtggggccccagggaagaagtgggggaaggagggggagacactgttatcttacccagatgcacgtgctccaggaggggaggagggtcaaaacttcagactatttacttaatcccttggaatgtcctttcctcactctgttctttgggccccttgtgtttaacgaactcctttatgggcacatgtgtggtaattaacaaatgcagtgtaggtcctggaccatgtgtttgagtttcaaatatccattgatctggggcaatcccatcctggctgccccctccccttcttctcctttggtcctggcccttaaagagagacgtgtgtgtgttgtgtgtgtgggagagggggacggtgcacatgtgcattcacatgtgttttatggatgctacagaggaatatcagaagagaggaagagggccccaaacagcccctttagctctgaaaatgcactgctaaaacagttgaaggctgaagaagtagagatagaggtaaagttttggttttcactggagtcatccaaaggaaagtagattggaagcagaatggtttcagagatcaagaagttatcctgcagcagctttacctggctgtaccaaggcctatggatttttctgatgtgactctttttggggtctcaatgctaattaccataggtgatttgaggagcttccaggataactgaacacaggttcaggggctggccctgcccttcattgcttgtgaagtgcaaggagggaaggaagttcttagcctctggtggggtgaaggggggcagtggtgaagagtgattaaatgaaaggatatggaaaagcacttgtgaaatgatttctggcagttctctgtgagcttttgacttctgagtgcccagagcatcagaggccatggggtgatgctgtgataaatggcaag

SEQ ID NO: 76478 - DNA, 1076 bp, Homo sapiens
gctgttggcttctgctcacatggcttttcttggagaaggattctctctgattctgtgcctgctgaaacagaactgtgcctgagcagctccaagcctgagagaggcagctcgtttgctttctggttctccgagccgcctccaccaagcctggaatgttcatataccagcttcgcagaggtcagtttcagaaggggtgtgcttgcatgctcacacatgtaccatgtctccctccttcccatagctaactgctccgccagcttggctccagctactcaaccgcctccattttggcccgtattccagggtctctgaagaaaagtttatgcatgaacagcactagactgagagtttgatttcctgccatatcctcatctccaaggattggagagagaataagatttagggatctggaaaaagcctcttagacataaattcatttgaatccctggtgttattagtaaccattgatattttacgcttggtgcttttactcagcaaatatttatggagaacttactaaatgtcaggcttgttatcgtcactaaggacccagggatgagtataacagtacgagtccaggcctcacctcctggagctcacattctaattgttcttagccttttatgatggaggttattcatcttcaggtggaggaaaacctccagcggagcagcaggcttctgtaagctctgggaagttgccacctctgcaggggagggaaggcaggtggcccctccaaacaaccctgtgtggtagctcctgtagccagagcctctaaggaaagccccttggagcgggtggcctgagctgagcaaagccctctgccaggttcctgagccctctgactagtgcctttgtggggccactgaagtccaggtgagagggctcagagcttgtcaggccaatgagagtatgttcatttgctccctgctcccggcctaagttccagtgtggcacagcagcttgcagagaggtagggatatgggcacataggtggacaggccttgggcctgcttctgacccctggtctccagctcagagggccacagaactcgtgtggtaaaggccgaggaact

SEQ ID NO: 76479 - DNA, 1413 bp, Homo sapiens
tgcttacagtcatgtcttctctggtctgatcttttggtagggggtcttgtgagtggtcaagtttgagcactggctgaaccctctgtagaaagtgataatttttgaggggtgatcatatttgtaggatttttttgtagactctatttaataacaataaagaccagagtcagtaaagtctatttactatcaataaagactgaatgttcatcaacaggaaaatgtgttcacaagcgaaatctgtatctctatcaaggaggatcatcttttcaaccgaagacttcattatgcgaaataccactctgcataatttatgcctggttgttgaatttagccctatcttcttttccttataggtggcaagactatgaacaaaagatatatgactttgaaccagcaggcagaattttacatgacaatcaattaatgagtgtcctgtcattggtcccctttaagttgacctgttcaccagctctgtcctaatggtggcgatgtggcattagaatgcaaggaattatatagaccaggaggtgaattcacacgccatcagttgagttcctctgtgacttgggctggtcattgccttttcatgtgtctgttcactgataaaagttggagatatgggatggtggagtgaaaggagactgtgaacccccttgggtcagtctttgacagaatagtgcagtggttaaagcacaggctttggaattagtgaaacctgggttcacattgtagctccaacacttagtgaccccagtcaagtcacataattcctttgagcctcaattctcattcacaaaatgggaatcacaatctctccctcaaaggactatggttaaaagttaactaagataatgtctatatggcactcaactgatgcctggctaactgataaattgtaagtacatatatttattattatcattattattggtatgaataacgggaatagtaatgatggtgcttattttgaaaattcttcaatcagaaagaatttatgattgtcaccttaagcaaaggcatctattaggcttcttcttaggaccccctctattcccctttccctgttaggcaaatataaatcaaatagaagtggttttggtgcctgtagtacctggtgccggaagtaacatttgcaactggtctcctagtccctgaggccctggaaggtctgcaagacccccatgagttaattctcattctgtgaccaagtggaagatacgaaggtgagctctgaattataacatacagcacttttttggctgaaacactcacttggcccttaacaattgtttccttgaatttctttttcacttacccatgcatttgattgctttggggaacgatggaggagaaaagatcatcatcatcatcatcaaaattagaatagcactgtcataatagctactttgttat

SEQ ID NO: 76480 - DNA, 1089 bp, Homo sapiens
agttgggttggatcacagccacagccatatatttgtgtagtgtctgtgaccattttcatctaaatagtagagtggaatagttgtgacagaccctgtatggcctgcaaagcctaaaatatttattatctgaccctttacagaaaagctttctggcttctggcatatatgattgaaatagaagcatttggatgggagtgtgtgtatggggatgtcttacttaagttttctggcccctctcatagtccaggcaggaggatgctccctgacatgcccaggtaagcctgcatcagcacaggagctctgaggcagctcacaaggctcttcaccatctcacacataccttttccaagctttaatgtccggttctggtgcatgctcccacaaacgggttgccaaaaaagcatcttgatgtttggctttcttaggtagtggatagggagtcttttgcatgtagcggagataaaccatgtaatggcaaaagcatgggctttggtgtcagacaaacctataacctggtttccaatgctagcttcctactgagaggtttggtgagcttgggaaagttaattaacttccctgagtcttgatttccttatatgtaaaacaaagttttagtgccttgcaggatttctttgtgaggactcaagagcatctgtgtaatgcctggcacatagtaggtataccataaatgattttttaaacccaacaaaacactggtgactcttggtggaatatctttatgtcttttgctagccacttgtcacatgttatcatatttggtttaatgagaagtcagatataccttaatgataacttatgtctggatatttggctctggtagggactggagccttttggccaaacacctgagacagtttttcattagagtttgatggatgatcctgggttcaggtgtgcttcagcctgcatccccggggaggttgccatgggactccgtgaagcccatcggggtgagagctcttcttctcagctgtctctcagaggcaaaaaggctatcccagtttcttttacaccccacacatccttttttcacactcagaccctgtgacgccaggtttgttttctggc

SEQ ID NO: 76481 - DNA, 1028 bp, Homo sapiens
actctgtggcctcaagtggagtagagaggtgtgacttccctctttgttttgtcatctctttctttcctttgtccctgtttttttccagttaacttcttccatgatctgatcaagggcctcaaggaggccctagaccctggccctgtgagttaaatctgaaagggccatgcctttcctcccttgcctcttagacccacagcgctcccttctctacatcattgaatggagcagctcatggtgactctgctccctggagatacagccatcagcacagacataaggtggaaatgcatttcttttaagttttaccatgaaagtgacaccctggcctcctcgtgcatgactgtgactgtgttttctcatgtcaccttacctgtcacaggtaagctgttcacagtatcagagtgctgctcttctaggcctgcttcaggccatttggccacgtcttggattgcttcttcctcacccaggaagttcctgctgggatagctgctatgactgggacttggggtcactgaggcaactgcacctcctggctggattccccaccccccaagccagcactcttggcccgcctagaaaccaccggctgatgtaatgacttgaggcctggaaaaataaacagctcgcagggaaaccagcggtagccgtcgtaagcaaataccccatggccacctggaatctcgcacatgacgtgattgggaggaagaatgagtaatccactaacgttagcagccgaggatgggtctgggcttgtgtgcatttaaaatatctatataaaaatacaccctggatatttatttccataactggccttctggatgtctgcccatctctctgatgcaggtgccttggtcaatcatggccagtagaattgagctggggatgggggatgggtggtcatccctatggctttctccatggcaacaaaggcctttttctttcttaaaatttccctttgcggagagaagcaataaacacacttggaggccccatgaagcctagccgcacagtccatttttaccttg

SEQ ID NO: 76482 - DNA, 1592 bp, Homo sapiens
aactatcatgtgctaaggcctctgtttgccactgaggggtcaaaggatgaaatacaaggaacatttaaggcaggagctgaccactgggcagtggtgcaccaaagggatggggggtgatggtgtggtccataccagtggggaggagtattttatcactgacattgttttgaattgctggcatagtgattataaaaagcagatagactcttagctatatgtgcatattttttttagtttacctacagacctaatacccctttattgcctgcctctggagcatactgctccattcccctgcccttggtcagctactggagtcctgttgaggagacgggtcattcacagggatagggcaggaagaccatgtttgctccacaatgctaccttagacaagctaataggaatagtagctaccatttagcaacttactgtgccaccaggtttaatgtttttcacacacgattgcatttaatcttcacaatgaccctgtgaggcatgtgcaagagttaccttacttttacacgtaaggaacctgaactggccaaggtcacagagaaaacaaggggtagagcctgaatcattgaccacaaagcccatgctcttgactgcctatattgcctctattccaactgttgctgacttcagaacctcctaacatgccagacccttcgataggagtatgcaggaggagtgataggcacttactactgcttttagccttgccaaggaagccctagtattccctcatcccctacctctagttccctctgaccgccctgagttctctctggcagttgagcttttagaccatcctcacatctccatctgggctggagctggagacagttcttctcttggccagtgagttaattagaaaggtgctccctccagggggtcctcccgggtccctttgtaggttacaattgagggatgatgttagatttttgctttcttttgctgcctattctgtgggggaaagggctttttagcttaaaggggatggaaaaacccatgccaacagaagtgtgactttaattcgtgcaaattctgtttctattctccccataccctccctctacctgatacaaacctgagcacaatttcggtggctgactttgttctgtttgccagcgatgtttgctttttccttgccctggtagagcctttccttttctgggccagttgtctaccctctatttggaaaggagccctgagcaatggttctgtgggctctccccctcatcaggggctcccagagcccctgcataactctgagtcacatagatgttgagaaattgggaattgggaattggcgatggccaagtggcactgagtggtgtgcgtgatggaaagccatggtagcagggcagagtcggcccagcaaatggtgcttggaaaaatgatcctctgggggccacttagcccctcctgtgaaaaagtgcaaagtccacaagtaagaaaaataacctgttcacatagttggcttgaaaccataggtgctaaaaccccctgtggctaaataaacagcaagggcctgctcagtgatgtcccataaatcatggagtgcagcaacccttccctggggcaccaca

SEQ ID NO: 76483 - DNA, 1051 bp, Homo sapiens
tgtgtatctataatctgtagatatctagcacttgtccctgtgctagcccttccaaaacaaatagatataaagatacatacacacatacatatacgcctgtctctgtcttctgttggttctctttctctgcagaaccctgagtgacacagaccttctctgtctactgtctgctctctccacccgtctccccctttgacctccacttcctccatcaccatgaggttcccatgttctttctccaaaaagcttacagcatagctggtctaccaataactgctgactgcatgtgcagaaggtgctttggtgttgggttacccaggatctcagcttttctgtctgctcctttcttcagcagttcctcctctggaaggcagtgtctagaaagaaaggccagcccaaagatctgaaactcaaatcttgtaatgtttatgttttttggccatttttgctttaaacaaaaaaagaagagaaaggaaaaagatgatgaagaagaaaaggtttctgggataaaagactaaactctgggctaaaatcaagtctggggattagctgaggatttaggttatccatgctttcctttgttcctaatcaccatgagtaattgagaggcacagaggcctgggctagtcctagccgacagagctgtgctccaggcttatcctctcttggtgggatgtgaaagaacccgtgccctgggcctggagacagggttcatgtttgtctggtccaacctcttttttcctctcctgtctcctgccctgcccactcctgctggactttggtccttctttgctatgtgcaattagtggtggacagggttgtgtgccttctggtgacaaggggtggacatggtttcacttctatctgagtatttaccatgtgccagactaggtactggacagtttgcttggatgttttttctattgtgtttcttctcttaggcagtcagaggtttgtcagtgaaactttaaccactcattgccaagtgcggaatgacctgactctcacttcttctctgcaccatctgagggacaggattataggggcgggc

SEQ ID NO: 76484 - DNA, 1092 bp, Homo sapiens
aactctgacctgggctggcccttcaggacaactttgccggccccacctctcctcacatattcctttccttcccaccattatgttccaggtactggttctcctcagttctggttcctcaaacaagtcaagctcttgcctgttccaggacctctatgtcagttgctcctagaattcagttccccatcttccaatgactggcccctgcttatctatttaaatgtcaccttctcaagtaccactcaatctgtaggagctgcctgttcaccctgtacctcagcacccctttttaactcagcctagcatatatcacggtctgatattttgctggcttgttgatatattatctgtctccctaaacccaaggagaatttaagttctatgagagaagaaacattttctgtcttcttccctcctgtattcccagagcttagactagtgtctggaacatagtaggtgcccagtaaaatatgataaatgaataaatagctagagggacgggggatagatggatggatccctgtctcgataagacctctttctggcacacatcagagggtcaaccaaccaccacaagaccaagtataaggctggagccagctgtcaagtttactgtggtgctattttgtaaccagggcccgagggtaccctggccaggacccagggacttggagcgccatgcagacagaccctggccagttgtccctcttgtttgatggaggagcagaggtatgaggcagctggaggtcaggtagcatgtctggaacaggactgacgaagacaattaggaaatccaggcattctgagttttggccttggctgtggaattcaggcagagttggggctacaggcatgaggttaaggaagccgcatctgatccctcctttatcctctcagactctagtagttaaagctggacatcagctggggccagggaaacagtctcacttggggacagtgggaaaaagggatagaagatgtttggacagtgcagaaaaaaggtgccttcctcccagtctacttcctgtcaggcatggagatgttggctttgcatcagctctcacgtttcaacccgcccctggtatgagctccatg

SEQ ID NO: 76485 - DNA, 1053 bp, Homo sapiens
taggccaggggagggacaatttggattccagctctggtttattcagcaaattagatcaagccaatttgtcttgagcacccatcatgtacaagaacatttctggctttggtagagggtgagtcatgtttgtgtaataaggattacccacctggggagtcctgagaaaagaatggtccaatcttaggatttgagtcggagaggatggcttaacgttgccacaggctgagccgctgtgggtggactttggcttggaggagccgtttctacctgactttctgggggcagtcataccagggctgatggttcctgcaagatcctgattggtgttctctgcggtgggggtgtttgtccatggcccaggttctcagagccagaccccagccacaccctggaggagcgggtagtgcactggtatttcagccagctggacagcaatagcagcaacgacattaacaagcgggagatgaagcccttcaagcgctacgtgaagaagaaagccaagcccaagaaatgtgcccggcgtttcaccgactactgtgacctgaacaaagacaaggtcatttcactgcctgagctgaagggctgcctgggtgttagcaaagaaggtgagtgctctcccctgtgctcctggcctttcaatacttgcccccacccaggcatgggaccaagggctctctgataaatgagattccagatactcatctattcatcaattatttgctggaagtgtgctatgcttcatgctagatgtttgagacagtggtggaattgactgataaggtccctatccttgcacagaagacagagcttaaataagcactcacatgagctgtgatacatgctgtgagagtgtgctagggtgggccaggctacagtcacaagtagacccatacatcatggcttgacacagtggaaaatttttctttcccatataatagttcagcatggtcgcaggttgtagggtgtgtgtgtgtgtgagtgtgtgtatgtgtgtgtgtgtgtgtgtgtgtgtgtaggggtaggagtaggggcagggattgctctatgcagtca

SEQ ID NO: 76486 - DNA, 1047 bp, Homo sapiens
aggattaatcaatggggtggggtgaagtggaggctgagtagacttaaagcctatgcagaggcagaaaggattcctgtgtccccactctccatttcaacacacaccacaggacacactgctctggacccaagcagcccagagctagaaggctctgtgggtcctctagtccattttgcagtctaggagtcaaggctagcccagagaggagtagcgatttgctcaagggtacatgtgaggtaccaccactgctggcgcttggcccagcctcaggattcctgggccagactgctgtcccctccaggagaaggaccccagtgtgtttgaagatgtcgccttgtgtgagcaggccagtcttggttgcctggtgaagccaagggagtggccagtgggggagtctggggaagagggggagcagaccagcctgggggcagcgtgggcaggagtagaggtgttgcagggggtgagggtgccaccagcaacctgagtggggaagcccacagtttccaggcaggcagtgcctatgggatgacggaccactattgagaggcccaggagcagtgtgggtataccatgatcaggcacaagtaggggctggagtaagtgcagaggccctgaagtcagatgggcctggcttgattttaatcccagctctgacaattaccggatctttaatccttggcaagttacctaaactctctaagcctccgtttccccatttgcaaagtggagattatagtacctacctcaacgatttggtgaggatgtaatcagataatgtgtgtgaagaacttagcacggtacctggtacatagcgaaggcacaaaagaaattggtagcggtagaggaacatgtccgggaaagaaggtatgagtttcagaactgccccctccatccctctgctctgcagggcggcagaaaaaagcccctgtggtcaatggtgtgcaggggctccgggagcagagcctatgcgtcggtcatccatcccgtgtcgtgcggtgccccctggtgggctgcgaggggcttgcatgctaggtggggacagaagct

SEQ ID NO: 76487 - DNA, 1749 bp, Homo sapiens
ggagcagaaaacccaagggcaggtggagagtccagggaggcaggatggatcaccagacacctaaccttcagcgttgcccatggccctgccacatcccgtgtaacataagtggtgcccaccatgtttgcacttttaataactcttacttgcgtgttttgtttttggtttcattttaaaacaccaatatctaataccacagtgggaaaaggaaagggaagaaagactttattctctctcttattgtaagtttttggatctgctactgacaacttttagagggttttgggggggtgggggagggtgttgttggggctgagaagaaagagatttatatgctgtatataaatatatatgtaaattgtatagttcttttgtacaggcattggcattgctgtttgtttatttctctccctctgcctgctgtgggtggtgggcactctggacacatagtccagctttctaaaatccaggactctatcctgggcctactaaacttctgtttggagactgacccttgtgtataaagacgggagtcctgcaattgtactgcggactccacgagttcttttctggtgggaggactatattgccccatgccattagttgtcaaaattgataagtcacttggctctcggccttgtccagggaggttgggctaaggagagatggaaactgccctgggagaggaagggagtccagatcccatgaatagcccacacaggtaccggctctcagagggtccgtgcattcctgctctccggacccccaaagggcccagcattggtgggtgcaccagtatcttagtgaccctcggagcaaattatccacaaaggatttgcattacgtcactcgaaacgttttcatccatgcttagcatctactctgtataacgcatgagaggggaggcaaagaagaaaaagacacacagaagggcctttaaaaaagtagatatttaatatctaagcaggggaggggacaggacagaaagcctgcactgaggggtgcggtgccaacagggaaactcttcacctccctgcaaacctaccagtgaggctcccagagacgcagctgtctcagtgccaggggcagattgggtgtgacctctccactcctccatctcctgctgttgtcctagtggctatcacaggcctgggtgggtgggttgggggaggtgtcagtcaccttgttggtaacactaaagttgttttgttggttttttaaaaacccaatactgaggttcttcctgttccctcaagttttcttatgggcttccaggctttaagctaattccagaagtaaaactgatcttgggtttcctattctgcctcccctagaagggcaggggtgataacccagctacagggaaatcccggcccagctttccacaggcatcacaggcatcttccgcggattctagggtgggctgcccagccttctggtctgaggcgcagctccctctgcccaggtgctgtgcctattcaagtggccttcaggcagagcagcaagtggcccttagcgccccttcccataagcagctgtggtggcagtgagggaggttgggtagccctggactggtcccctcctcagatcacccttgcaaatctggcctcatcttgtattccaacccgacatccctaaaagtacctccacccgttccgggtctggaaggcgttggcaccacaagcactgtccctgtgggaggagcacaaccttctcgggacaggatctgatggggtcttgggctaaagg

SEQ ID NO: 76488 - DNA, 1080 bp, Homo sapiens
cccactttcaggcctggaggaagcatgcacacatggagacggcgcctgcctgtagatgtttggatcttcgagatctccccaggcatcttgtctcccacaggatcgtgtgtgtaggtggtgttgtgtggttttcctttgtgaaggagagagggaaactatttgtagcttgttttataaaaaataaaaaatgggtaaatcttggcggctgttgcctctttctttgggtggcttcctttaatgaaaaggctttatttcctagaaagcttagttcgtttccctggcctgggtgctctccacttccatccaaggacatctgaggtgctgccaatgatgaacctagcaggggacccggaagtggccagtgtggtactgcacctagagaggggactcccttgctaaaggtgtttgtgcactctctgtaattcttcctcttacctccacccacatgtctgccccacgggatgcccctccctgactgccattcccttcctctcactggaatgtagggaatgttgctggcagagctttgggggcagggcttggggaagagcctattccatggcttcaggctgttgaaagtgggtacattgccatcatccagatgacaagacgccaggctgaaatgtagccataggtggggagcagacccccagtggagtttttcagcctgtaccccagttttgtggggtatctattctggctgaggctgcaggtctggtttgcagagctggagaactcccagacgaggattggcagcaggggtggagattctaggttttctccagcgtgaccggcctctttgcctttttccctgtgtgcacacacagctgtccctggaaatgaccgcctcagccatccccttgggaaccttctccagattccttgtgccacactctgcccccttgtctttgcaggtgaacagaagataattccccttgtaaacctctcctccagcctttgctccagctaggctttcttgcgacagggtctaagccccggaatttgatcacgcaggccactccttgtccagggcttgtccttccttgcagctcagaagagaggacaggtggttcacggcac

SEQ ID NO: 76489 - DNA, 1098 bp, Homo sapiens
aggcctatctacctgattctctctccttctcagttcctgaaacctctcctctccttccacttgggcctaggaggaagcaaactcataaagtggaactctgggtttgggctggtcatgagcagctcaaggacaacttccttgatgagggcaaatgggacccaggtagttcatggtaaagggtggcatcatcaatactcaaattatcactgaatggggtagagaataaagtggagggcaagatgctgggggatcaagtggttctaatgctttgttcctagagcaattgcagtattttcaaaaattatgacatcacctgattatttgcatgactcttgagaacatacatgggggaaaagacaaattaaaagctattaacatgcacagggagaactggaagtcctcccaggaaactttaaaggagtccctcctctcctatagctgcagggaccacagggatatggaccaagcccaagttgcagcattaattaaatgctggaccccattaggactcttcaggacatgagtagggaaggagtaacaccaaataacatatgacttaacctacccatgtagaactgggtacctttcccaataaattataaaattgaacttgctcagaaatatttattataaaatggaagtggtatgtatatagggaaaacagcccattcatgtcaagaaagcaccagtaacctgcacaaacaggcagttttgactcctgtggtaactccaggtaacagctttgctgcctttccctcaaccacacattgacttcatggggaattccctgtgaccagtgaataaatgagaaaaaagcatgaacctaattctgcacagcatgccagcaccagccagaagtggacagcgccatctatagccctactcacaggagaccctcaaagactgtggtggatggaaattttcccagtggacagaacttcaggcagtacattgaactgtccacttgggcctgaatcatggatctacaccaactcatgcagtggatgatgagtgactggctcattgaggacttgaagctaattggtggcaagaaaaattaggaatttaggaattccatgtatggaatgggccccatag

SEQ ID NO: 76490 - DNA, 1047 bp, Homo sapiens
gttcagtcattcaacaaacatttgttagatatttgctatgtactagctacattactaggcactggggttaaataagtgaataagacaagctgacatttcagcgctcaaggatcttactgtcaagtggagaggatcaaagggtacagacaaatcaaggaacgtgagagaagtggtatggctgagatggattgaataaaggagcaatgagagctccctgcaatgtgtgtggtaccactgaggattctaaattaaccttcattaaggacttagtagtgacagaggtgaagtggggataggtacatgattaatttacatccatattacaatgaaaccttaacatttaagagggatattattgatgtcttcatgatccagaagaatcctcacctttgcaaccatcactatagtcacttcttgagaattatggcctttaagactgtagcatgcaatgacaaaacctcacagaggtatgggttctgcccgcacactaatttcactcattaaacaagtgactggctcctatatcccaggctctcagcacgcctttgcaaaataacagattattgcagctcttggacctttgatgcctctgggaatagtcaaagccacagatgtcaaatatgtaaatgccaagatctattataattaaatagtgcaggcctccttcaaagaaaaaaagcatgttggctgtgctgcacgttctccaaccaaatcagaatgttaaagctcgaaggtatctgacctcccattttttaaattatgaagatgaaattcagaaagggaaggtaacttatccaagattacatggctagctatgatagaaagttagagttggaaaggacgttagaaagtgagggtttgaaaggactttagaagctgcttattcaatgttctctctgccctttcccatcttaggcttctccattttacttttatccatcaataaaatgttaacttcaaaaagaatatggcaattcttgggtaaaagatgctctggaagtgtgagtccgggagtattatgtgactaatgtcttaactaagaataat

SEQ ID NO: 76491 - DNA, 1300 bp, Homo sapiens
ggggagacatgtcaaagaccatgtatgtggactacaaaacagaggatggttctgccaatgcaggggctgactatgagttcacagagggcacggtggttctgaagccaggagagacccagaaggagttctccgtgggcataattgatgacgacatttttgaggaggatgaacacttctttgtaaggttgagcaatgtccgcatagaggaggagcagccagaggaggggatgcctccagcaatattcaacagtcttcccttgcctcgggctgtcctagcctccccttgtgtggccacagttaccatcttggatgatgaccatgcaggcatcttcacttttgaatgtgatactattcatgtcagtgagagtattggtgttatggaggtcaaggttctgcggacatcaggtgcccggggtacagtcatcgtcccctttaggacagtagaagggacagccaagggtggcggtgaggactttgaagacacatatggggagttggaattcaagaatgatgaaactgtgtaagtaaccttcctgtattctgcccctccctgaccccatcttttgccatctctttctgtctttctgtactgcactttacaacatttccttgtgtttgtgttaatgtcaaactttggttccatcacaggtatgcaggatcagcagacaccactggacaggttctgcttccaaactcttcttcagttttctcactttaaattgtttctgggcaaggaatcctgtgacaagagctaaggacacaaaacattttcttctctgaaacacaaaatgatagctggtggagctgtgggatgacagaagttttgtgatatcagattttggagaattcttgtgactaagaaggactagagaactgcttgggcctcttcttcctcccttcctcatatgaagggtatctatgagctttgaaaccaatcctttccattctgggcagcaatagcccatcagaacattctaaagaaaacaagtggcattggctttgttccctggtactatattgccagtctcactgtgtaaccagattccaggcacgtcttctttaatttggaaattgcaaaattgatagaaatttagcaatctttttaaatgaccatagactatttaatggtgtgaggcttgcccagcctagttgaattgagtcagtatggtttggatactggaaagtatcttggagaagcagagctcccagggcagtggctacttgtctttagtcacaggtctaagctccaaaatctggtgaagcagtgaaggagaaacatcctaggaattgtgggaggaaa

SEQ ID NO: 76492 - DNA, 1754 bp, Homo sapiens
gtgctctctggctgcctgtcctctgggcactcttgtcccaggtctattgttttcatgacccaccaggatggcgcttcacttcctcagaaattgtgatccccaggaaagtgccccacaggaggggtggagttgagatgccagaccagctctcttacagcatgcatttccggggccgaagacacgtgattcacatgaagctcaagaagaacatgatgcccagacatttacctgtttttactaataatgaccaaggggccatgcaggagaactacccttttgtcccacgagactgttactacgattgctacctggaaggggttcctgggtctgtggccacattggacacctgccgtggaggtctgcgtggcatgctgcaggtggatgacctgacttatgaaatcaaacccctggaggctttttccaaatttgagtatgtagtatctctgcttgtgtcagaagaaagaccaggagaggtcagtagatgtaagactgaaggggaagagatagatcaagaatctgaaaaggtaaaactggctgaaactcccagagaaggccacgtttatttgtggaggcatcatagaaaaaacttgaaacttcactacacagttactaatggattattcatgcagaaccctaatatgtcacacataatagagaatgtagtgattattaacagcatcatacataccattttcaaaccagtttatttaaatgtctatgtacgtgttttgtgcatatggaatgatatggatatagtaatgtataacatgcctgccgacctggttgtaggagagtttggttcgtggaaatattatgaatggttttcacaaattccacatgatacctcagttgtttttacatcaaattgacttggaaacagtgagtgttatgccagctttgacggaatatgcaaccccaactggggagcaatgtttgtgtatataatgaggtatcacctatttaggggggcatgtgttacagcacatgcactaggtcataacatgggcttgagacatgattctgttggttgttattgttttcgacgaaccaactatctcatggctcctgttcctgatcttaatgatatgatgagcaattgttcttatgagataattcaacgcaagtttaatcaatgggatccttgtttgagtgctccaaattttccatacctaattttccatacgtagctcctcgttgtggagacaatatcaaaaatcagagggaagaatgtgactgtggctcccttaaagattgtgccagtgatagatgttgtgagacctcttgtaccctttctcttggcagtgtttgcaatacaggactttgctgccataagtgtaaatatgctgcccctggagtggtttgcagagacttgggtggtatatgtgatctaccaaaatactgtgatgggaaaaaggaagagtgtccaaatgacatctacatccaggatggaaccccatgttcagcagtatctgtttgtataagaggaaactgcagtgaccgtgatatgcagtgtcaagccctttttggctaccaagtgaaagacggttccccagcgtgctatcaaaaattgaataggattggtaactgatttggaaactgtggggttattctacggcgagggggaagtagaccttttccatgtgaagaagatgatgttttctgtggaatgttgcactgtagcggtgtcagccacattcccggttgagctgagcacactacatttcgtaatatattagtacacgacataaaagaag

SEQ ID NO: 76493 - DNA, 3295 bp, Homo sapiens
ctcagcatttcttgacgctgttccacactcaggcctataccagttggctgtgaagtgttatgtcttgggtggtttttctcagcacatttacatagcccattcttcagccactgtgcacgttttgtagaattctacaaggaatctccttcaccaaagatctgtaaaggctagactacttttacatgaacttgttatttaagaattttcttcagttctgttaagcatacatatcttacgttacctggataatggccattattctttattaaaatcttttaataactttagatcatttcataactatacttatgaaataatctaaattcttcttgtatgctaaattagttgaattttgttccttcatgtatatatgtaatacagactcctggtaaaactataagtgaacagtattttcatttactactttcccattgattaaaaaaaaaaatcctgtaacttgctaacttgtagttctacaagtgctataccagtaatgatgctatgaagagtttgtctgggagtagattttccttctagttcttctaggacctgtagaatttgagagctgaagactctcaaatgtagagtatttggtccaaccttttcattgttacttatgagagagttaatgcccaggtggcttaaattactttccaaaggttatatagctagttagtaagagagtaatgcttagtatccaagtgtcaaggtaaatttattccattttccctgtctctggatataagctatcctatgttttcacagctttttttttccatcttactcaattatttcagaacaaccaaaacagcagatatgtaaaagttaatgtcagagtggtggtcagtaggagaaaggtgaagaaacatttatttcttcccttttattccaactatttttgtgcttgagaggtacttcagactaaatgaaggtaggatgatccataatgtagttgcagttagtttcagttgcccaaaagtgttttgcttatgatagatagctgtaggaaagtcttttcattcctaagcccaggcgtaagacaaatgatcttggtctcttttcttttttgtagaagactttagggtctccaccctttgttcttttcttcttattttctaccatcatccctgataaccctttcagtcactgtgctggatcagccttcagatttgtacttttgttttcccagcttcagccttttccttgtcctctcaaaaataaggcatgtagactctttctctattttaatagttttacggttaaggtggcgtaagataggcattaacatcagtaacaaatgaaaagttctaaatcttaagatgacatttcatcaatgattgtagttgatttatttgctacagttgtaatcgaggacctatcggatactttctactcatttattcattgagttagttgtgtcctaatcaaagccacaggctcttatactaatatttatactttaattttttgtggttctatagaaaatcaaagactccaagtttgatgactggaagaatattcgaggacccaggccttgggaagatcctgacctcctccaaggaagaaatccagaaagccttaagactaagacaacttgactctgctgattcttttttccttttttttttttttaaataaaaatattattaactggacttcctaatatatacttctatcaagtggaaaggaaattccaggcccatggaaacttggatatgggtaatttgatgacaaataatcttcactaaaggtcatgtacaggtttttatacttcccagctattccatctgtggatgaaagtaacaatgttggccacgtatattttacacctcgaaataaaaaatgtgaatactgctccaaaaacagagtcacgtattccactctccaactacccacatattccttttgcaatagccattagggcatcattttgatatttcattctgatttctgattctctgatttctgattcctaatgaggacagtaggtctggatccaaattctcacagtaaaatcaagcagtaattttctctcatatctattagggaaagaaaaatgatcacagtctgctaagagtcttgattttctttgtaatgcctcacatagtatgataatcagtctccaaagcatcacatgataattacaatgataccattaacatgtcaaggaaattatattatttatggttgtcaaaaattatgaagtagtgtatgattataagcagatatggcaaatttgttcagtaaatccatagatgactacattttgagaaatactaagataatactaaaaattatgccttagcataatttgcatgcaaaattgccctctagtgtttttgttttgttttgagacatagtctcgctctgttcgcccaggctggagtgcaggggcacgatctctgctcactgcaagctctgcttcccgggttcacaccattctcctgcctcagcatcctgagtagctgggactacaggcacatgctgtcacacccggctaattttttgtatttagtagagatggggtttcaccacgttagccaggatggtctccatctcctgaccttgtgatccgcccacctcggcctcacaaattgctgggattacaggtgtgagccaccacgcctggccgaaagttagttgttttgaactcattttctcctttttacccctgcctttatcagcttctaccttctggtttcatgctgagttctagttgcctaaagtctccattgaaacactcctgttataattgccataaaatcataaatccactccccctttctcctcctagtcaaaatttgtattcttttcagcaggttggttttaataaaaagtaaattaagttgattatctagtgataatttgtgatagacatgattcataagatagttatctgggggagcaattggatttcagagaaaaaaagtctccacttattattcactcattaaacaagtaactcaaaaaaggatcattgatttaaatgtaaaacataaaagtataaaacttttaggaaaaaccacaggagaaaggcttcaacttaccgaatagctcttaccaaagaatattgataaaagaaaaacttgacagattgacacatcaatattacaagcttttgtttgccaaaggccctgttaaaaggatgaaaaatatagacagagaaaacacatgtaaaccacatatctggcaaaagactcatacctagagtaaagaactctgtaaactcagttaaaaaatatccaattagaaaatgggcaaaaaacatagaaacatttcactacagaggatacac

SEQ ID NO: 76494 - DNA, 1408 bp, Homo sapiens
taaataagcaatttttaaagtatatttaaagaaatgaaacataaggaagtgtataggctgtcaggtatgtggggaagtgaagttcatgtagttttcatgtggagcccatacagattttattatagtcaattttagtgaaatttatcgttggtcagatgaaggtttttttccttcattcagcaaataactaatgactgcctactatgtgctaggtgccgaagatagagagataaataacacttagtcactctaagctgaaattgctcagcatatgaaagtggaggaatatttgtaggtgattttgatgttaaagtatttttttaacatcacctggtagtagaagattgagttatgaagctgtctacctctcacctgtaatagttttagagttggttgctattttggtgtaagtcttttttgctgttcctcttttaactgcaaatctttttgagaccagcactcacatccaaaagggcaattgtgataaaaaagaagacagtattttaaggattctgatcagaaccagattcttttcttttcttttttttttttttttttttttttttgagacggagtcttgctctgtcgcctaggctggagtgcagtggcacgatctcagctcactgcaatctctgccgcccgggttcaagcgattctcctgcctcagcctccccagtagttgggattacaggtgtgtgccacaacgcctggctaatttttgtatttttagtagacacggggtttcagcatcttggccaggctggtcttgaattcctgacctcgtgatccacccatctcggcctcccaaagtgcagaaccagattcttaactgccacagactcttgtattatgtaatttatatacagaacacaaagcacttgatttgcttaactgatgtacttgatgatactataaaacctatattatgagaaagcattgctccttcaaaggaatcaagtgatagcaaacactcggtcctgtttccaggttttcctcactgttcattttgcctttgttcttgcagggggagaatgaaaggggcgagagctaaagtgtgttgtcaatgcaagtcaatccttaaccaacaataatttacaaaagaactttatatttgctgtaatcattaaatttagttactaatcccaggaaaagggttagtccttcctcctagtttgtagatttgcaaatggagatgaataattgaatcctattttaatcttttatctgcagtaatctgggcttcttattaccggatatatttgcattttacctccaggccatgttagttcttagaagattattttcctcatgaaccctgttttgttttgcttcctttctgcttcaattctaatgtcacattgcatacctggatgtaaacagcagtcagtttctcagatcaaatagagcc

SEQ ID NO: 76495 - DNA, 1417 bp, Homo sapiens
ctcacagcctagttaagagaattcataaacaggtgagaagttaaaagtatatcagcaggctaagtattgaaaacaatattaaaggggtaccatgcaaaacacgatgcagcaacaaagaagatatgcaggtaatcatcacattttcttttagaaattcagggaaaaaaagatgtcacataatggcatcaggctcaattggaaagggaaggcttttgaaaataagaggtccggtaagaccttgcctctgggtcactactggtatagggagaaacttgctttaaacagtcctgacataaagtgccttttgacatcaactattcaatacctttgagactcacttagacaactggactcattgtaggttccacagaaaaacacggacaacattctagttgtcactccaaccagccacactaggagggcacagcctctggtaccctttctgttcctgaaggcatgtacagcggcttctacagcaagcttgcttacctcccaggattcacctcatggtttggacactgattcctgagagagccttgagacacacaaagtgaaaaaaatgtcaagcaggaatgaaagctctagttttttgcttgttggtatatgtaaatttgtttaaaaagtatccattctgtcgttggtagaagttttgctttggttgataatagagattctgatgtactcttataacttaggttttctcagaaattaagtagcattgaagatcaatgtaatacagttttaagcaggtacactaattatattattgattctatagaaaactaaaattatagatgaggtatcaggatccattataggttgtaaaaaaattcatgttcttcatagattgagtctaatatttcttctatagattgcatctaatgttcctactacctaaattattacgttcaaagttttgaaaattgaacgaaggtatttttaagtacttaaaacatttctctatcattctgtattacatgtataattataagatattgtttgcttcaactagctgtactttgttttcctgtgaagtttcaacttatgtgttatcgatttaacttaattgttccatctagccatgtataatggaaaaaggaagttaatatttgttattgtgttctatgccagggactgtaccaaactctgattggtacattatttcatgtctcataactctgggatctaagtattgtcacaaagagactaaaaatgagagaaaaaattacttgactaggattatgtaggtggtaataatagaatcaggatttaaactcaggacttcagatgccagcatcaatgatattctctcactggaagtggttctcaaagcaaggtcctgacaaaagcatcagcgttactggggaacttgttagaaaagcaagttcataggctgggcatggtggctcatgcctgt

SEQ ID NO: 76496 - DNA, 2633 bp, Homo sapiens
aagatcataggttttatctcatgtcttcattttcctgatacgatacacaaatagcaaggtagaggcagtacagaaacagaaattacctgacttgccctcacgggtccctttaggtcagcaaggttaaatgcctccccattagacctattttctttccaaagatcctgtgacactgatgcatcagctcaggacaaagagaggactccttctgctaggtattgctgggggttacagttttgggtggtctagagtctacaaacccaggtgatgtatcaacctgggcgtttcagttgcaaacacacattagtcactagagttaacatttttctttcccttccagttacaggtgcagaatggacctataggacatcgaggtgaaggggacccaagtggtattcccatatttatggtgctggtgccagtgtttgccctcaccatggtagcagcctgggctttcatgagataccggcaacaactttgaaaaacttgctctctttcaatactcccaatgaagatacatttcactcaccctccacccctgctattctgccatgtctttccctctctctgcatagccagatttgaagtgactgatacccaccccaaaccttgctgttcacagtctccaattcttcatattctaatgggaaagtaaaggtattgtttgaaggaaaactgaagaaaagacttggcttagaacaaatgaggagttatatattttactaggacttttgatagaaattcagctacaacccaaagagagaaagattgagtcttcctgtcaccataggcaataccttttttcttagctggcatgccataaaggccagctatgtgatattagaggaagaaaggatttttctttttaatgatcttccttgggaaattattgtggcctttatttaatttctaactacgtacctgggtgcctatatcgacaaagagtgagaagagcatttttacttttttaaaaaagcaaatacatatatacacatacgtatgcaaatattatagtataatagtgatccctatggagaattaaaggtgagaaagctactttgtggtgtctaggtttctgataaaagggatgatcttaactgaagaatttaaagagatacttaaacagagcaaatgtagtaggaacaagggagtgagccttataagaggacgttcagtctcatttattaaaataataactgagactgggagaggtggctcatgcctgtaaatcccagcactttggtagcctgaagtgggagattgcttgagtccaggagaccagcctgggcaacatagcaaaacctcatctctatttaaaaaaaaaatagaaaaaaatgtaataactgaagcaactaattaaaaatcttagaagaacaatatttattcttataacagccaactatggtgagttattataaggtaaattgccataatccagcgctgctcacatctaaaaaactttgaggtgtaaaggtaaatcgtaccaatctctgggctgccctagtgacttttttgatacctcagagtcctattgaagaaccaggtggaatgattgtggtaagggctatagtgctggagccaaacaccccagcaagaaaactctaaaaggacaaaagataaggtagtgcctccaaggtggcacctgaaccctctcaggctactttttggtttctactaacaaacctgagggaaggaactgcctccctggcaggatgggcatcaaatcaactctggcttcagatttagttaaaatgaggccgggtgcagcggctcacacctgtcatctcagcactttgggaggccgaggcaggcagatcacaaggtcaggagttcaagaccagcctggccaacatggtgaaaccccatgtctactgaaaatacaaaaattacctggacatggtggcgcgttcctgtaattccagctactcaggaggctgaggcaggagaactgtttgaaccaggacctgggagacggaggttgcagtgagccaagatcacgccactgcactccagcctgggctacagagcaagactccatctcaaaaaaagaaaggcatggattgctagtatttttgaaaggctttatacactacatacggcttttaataaacctttttgcagcaagagggaggaaaagagttttgtttgctttaggaggtagggaaatgtggtaggtgtttcatgcggcctaggaggaggatatgaatgaatggatactatggaatgccagtgatctcgataaggtgggaaccatcctgttcatgttcttttaaggctggttttaagcactatgggtagctgaattttctggctttaagaaaatcatttccattagccaaatatattggccatactataggccttttataattttgttagcaagattatcaggactcaggcaatcaactgtatttcatttctagcttggacagtctggtaattaaatgttgattggacatcagctttgtcaagacacttttacaaagaagtacagtgcatatcctccatcccatagggcttttgggttccaactgcgaagacaacactcttattggccacataggtaggacagtgtaagtaggggtcatgtttatattacagacagcaaaagagaaaagttactgagaactggg

SEQ ID NO: 76497 - DNA, 1566 bp, Homo sapiens
cagctggcaatgccagggcttaggaatataaaggttagggtggtaacctggaagaccatgctatctttaaggaagcaggttaacactcatggaagaaatgctaatacggtaacagattcccaagtgtcaaaacgagacaggcatagaagctaagaggaaggagagaccactttttattttacataggttctcttcagatggcctgtggaacttcagttctaggaaaacatagttttgaaaatgaaaaaagttctaagttctgagctctaagtaactttgcccatactcctagtccttgcaatttgctctgaaggagtttgttatttaaagtttggccatttgaaaataaattgttgacttctaatagccttcttcctttcttactactctttggtgttttgacaggtaaatggccaagacctaaagaacctgctgcaccaggatgctgtagacctctttcgtaatgcaggctatgctgtgtctctgagagtgcagcacagggtaggtatcactttgagccagaaacctggcaccaggcttttgcactgtacttctgaataagcccaatgtgtgtaatcttcagtgttgctttttgttttaccctcactcccctgaagagtttctcaggcaaagggaggggtccattggtacttctgcttatcattgaaggacattcaggccaggcacggtggctcacacctgtaatcccaacactttgggaggccaaggtgggcggatcacttcaggccaggagttcgagaccagcctggccaacatagcaaaacctcatctctactaaaaatacaaaaaattcaggcacggtggtgcacacctgtagtctcagctacttgggatgctaaggtgggaggattgcttgagcccaggaggtagaggttgcagtgagccaagatcataccactatactccagcctgggcaagagagtgagaccctgtctcaaaaaaaaaaaaaagaaaaaaagagaaaaaaaagagaaattcacaacagtatggcttataaccaaggtccttgcttcaagataatatgccttaaagataaagcttgacaaccaaattaaaacagatgattaaagaaaagccaggtgtggtgactcacatctgtactcttagcactttgggaggccaaggtggtatgattgcttgagcccgggagttcaagaccagcctgggcaacatagagagacctcatctcttaaaaaaataataataaaaataaataaaaaattttaagagtgacatggaccaatggaaaataaataaattaattaattaaaaagatggtaaaaaaacgtagccaattttactttttggtagggaaggaaccatatgtctaccgctgaaaacttatttataaaaccattggataaaacactacaaagatggtgggttttctggtacccactatatgcttttccctgtcactgccatgaacccttcatttatcaacttggtgaccctcttaaccaaatctttagtgttcataggagaactccaggaaaaaggaaatggaattcagaattcagtcaaggcagcacctatccctgcatc

SEQ ID NO: 76498 - DNA, 1035 bp, Homo sapiens
gcccagctaattttttatatttttagtatagacagggtttcaccatgttggctaggctggtctcgaactcctgacctcatgattcgcccacctcagcctcccaaagtgctgggattacaggcgtgagccaccgggcccggcctaagatctttttttaaccttttgaatcatagcacagtgcttaataatgtttaagaaatgaacaagttaagaaattcaggcaaacctaaaaaggttgactgataaatatgggcccacagacctcaggtcttaaaataaattagaacaagcatacagtcaaaactattaaaatgcaaaatataactctggccctattgttcatttctctaccttaccatgggccacagtaatcctatgatactatcagtttgctgggggataagggagtatagttggagataattattctgtagaatttctttttttattaatcttcaggactagtgaaaaatggccagcttattacttgtatggaaacagtgcagatgattggtataaagaatggaaaaatgctgagggggtgagatattatctagaatattcttgggagagctggcttcaaagggctagacttaaataaaaggaaattgaaataggatagggcttcggagccctatcctctccagatgggccataagcccatggtccgaagaggagaaaactattccctgttttcttttagaactgaatagggcaagatggccacgttgggaaaacgttgaaataaatgaatgaagtacagacaggagaagtcttgattggcagaattaagtattggtctcagatacatgattttgaacctacctctataatgagttagcttcatcccttaaaaattttttgctatatagtttcatttgaattttccctttcacattacttctcatgcagttcaggtgattagtgattaaaggtcatatgtgtgaaatctcttgctcttcttagttgtcagcttattgaacacctctctgccatgaagcccatttggtagcagaacctgaaggcagagataca

SEQ ID NO: 76499 - DNA, 1035 bp, Homo sapiens; identical to SEQ ID NO: 76498

SEQ ID NO: 76500 - DNA, 1035 bp, Homo sapiens; identical to SEQ ID NO: 76498

SEQ ID NO: 76501 - DNA, 1035 bp, Homo sapiens; identical to SEQ ID NO: 76498

SEQ ID NO: 76502 - DNA, 1035 bp, Homo sapiens; identical to SEQ ID NO: 76498

SEQ ID NO: 76503 - DNA, 1536 bp, Homo sapiens
gtgtgctttggctacataaaatgtgagatttttgtctctctttgcaatctcattagtggattgcctgtaacacccattccggtctggttcgatgcttacagaataatacaccttttttttcttttctacatttgtggagattttctaggatggcaggagatttttttaaaattttttttctcgacaatatcaatttatttaggtcccttacttttactagccacccccttcccacttgcttccaatggcaaattagaatggtaacttgccccttgctcacctcatgcttggctttgggaaccggtgagaaactgcaatccattggcggtaggaaccacgattcccagcattcccagtgctccgagtccttcgggcttccttttccgggtctcgaggctgctgaaaccgaaaccgctgtgctgtgggcgcagcgccgagattgattcaccttcacctgtgctgcactccagctgacccaagtaggaagccagacgagctgtaaaacatgaacggaagagtggattatttggtcactgaggaagagatcaatcttaccagagggccctcaggtatgtgcggaaagggtcatatctgacagtaggggattagagggtgtaattgcagacacctctgctgctgagccggattcacctggcctcggggcgggcaggccacaacctagaggtttcgtgcaacgcttcggggtgcttagagaaaatatattgaaatccatcattagccagatacgggtctgaggaatccacctcaaaatccagttggatgaacacaaatatatatagtcaagaaggggttctttgtgcaaatcgtgctagaaaagcctttttaaaagcctgcttttttagcctgcttatcgtggataccacatccttctttccgttgcctgttctatccctccccctatgagggaccgtttagtaaaatgggagcataaacggtgtggactctgaatgcatagccgttttcctgcagctaggatccctccctcgctcctttgatttctgggaacttcatttacaatgtcaactagaatgttaaagcaggaagagcccttagaaatcttttattacacaggttcccaaacttggttccgccacaaaattacccagggctttaaaaaaaaaaaaaaaaaagaaaataaaaagttaaatcttatctcccatctgcagggatttggatttaatacagatttattttatttatttatttattttttatgaacacctcatgtgattttgagcagccaaactgctatcctcttcccccactgtggctcttcattaaaccgggctcttgacattactacattctgcctgctttcgactttgtttactttcctttacaactatttagttgatcaattaagagctctttagctttggaattacagtatctgggtctaaatcttgtatctaacctcttactgattcttgatacttattggctaacttaactgatgtaagccttagtttatcatctctaaaatggggatggttataaatatacttcatagtgttg

SEQ ID NO: 76504 - DNA, 1035 bp, Homo sapiens
aggactttgctgccataagtgtaaatatgctgcccctggagtggtttgcagagacttgggtggtatatgtgatctaccggaatactgtgatgggaaaaaggaagagtgtccaaatgacatctacatccaggatggaaccccatgttcagcagtatctgtttgtataagaggaaactgcagtgaccgtgatatgcagtgtcaagccctttttggctaccaagtgaaagacggttccccagcgtgctatcgaaaattgaataggattggtaaccgatttggaaactgtggggttattctacggcgagggggaagtagaccttttccatgtgaagaagatgatgttttttgtggaatgttgcactgtagcggtgtcagccacattcccggtggaggtgagcacactacattttgtaatatattagtacacgacataaaagaagaaaaatgctttggctatgaagcacaccaggggacagacttgccagaaatggggctggtagtggatggtgcaacctgtggcccagggagctactgtcttaaacgcaattgtactttttatcaagacctgcattttgagtgtgatcttaaaacatgcaattacaaaggagtatgtaacaacaaaaaacattgtcattgtctgcatgagtggcaaccaccaacatgtgaactgagaggaaaaggaggtagtatagatagtggccctctacctgacaaacaatatcgtattgcaggcagcatacttgtaaatacaaaccgagcactagttttaatatgtattcgttacatcctttttgtggtttcgcttctctttggtggcttttcacaagcaatacaatgttagggaagagaaaggaaaagagcccacacaatggagtaaattacattgacacttactgggagatataatcaatagtcactctgacaattacatcatcttttagcaattctgatgtcatcttgaaataaaatcacttggcaatttaaaaaggtctgtgtgtttaaatttacttaacatttcatgtctggtcacattct

SEQ ID NO: 76505 - DNA, 1459 bp, Homo sapiens
aatatgacatcaggaagaagaaattttgccaagttgacctgttttcttctttttcctcttcctctccctcccttttttctaaaaaattatagctaaagcctggagaaaagcctgttccaggtatggttcatgtaatattcttattacgcttgaaataaggtcaaacagcttgtaaatcaatcacaagtatagcatgtgaaatgagctgtggtcattttgtccttctagagctggggctgggtctcattggaagaagaattgtcttgggtcacacataaaataacactaatgatggctgatgagctgaaaaaaaaaaaaaagtctcataatgttttaaggaagtttacagatttgtgttgggccacattcaaagccatcctgggcctcatgctgcccgtgggcggtgggttgaacagtcttgttctagagtctcccattgtagttttttactcttaatctttgagagctgctgaactgtcagcaggtggtgccattgtggtagtgattgtggtagtgaaaagatgaattgggagggaaaaagtaggtattgaggaggtgtgaggaagccactgtgattcgaggtttcttcatcaaatctgtatttttacacaatgatgttttctgttacattattgaaaacaggtattgaaccatcatggtactgggttagaataattatatatcttgtttttacatactgtcttacttaaatgctatgtagttttgtctagtatcattaatttccttgagttttcaggttgttaggtttgtaactgggttcttgtatacatctgcctggggaaacagctagatctagaacttgagataagcagttaaaaatgaatttgaaaatgtgagccattcatattaaccatttatctcattccccccacccatatctccctcccaaaaaatctacttttgatatctagtggatcaaacaaagaaagaggcagaacctataccagaaactgtaaaacctgaggagaaggagaccacaaagaatgtacaacagacagtgagtgctaaaggcccccctgaaaaacggatgagacttcagtgagtactggacaaaagagaagcctggaagactcctcatgctagttatcatacctcagtactgtggctcttgagctttgaagtactttattgtaaccttcttatttgtatggaatgcgcttattttttgaaaggatattaggccggatgtggtggctcacgcctgtaatcccagcactttgggaggccatggcgggtggatcacttgaggtcagaagttcaagaccagcctgaccaatatggtgaaaccccgtctctactaaaaatacaaaaattagccgggcgtggtggcgggcgcccatagtcccagctactcgggaggctgagacaggagacttgcttgaacccgggaggtggaggttgccctgagctgattatcatgctgttgcactccagcttg

SEQ ID NO: 76506 - DNA, 1377 bp, Homo sapiens
actaatactgatgtgatgagagtttcagtccttggagccttttatgaggactgtctttttattgctggttttagaagctgctagaataccataggatattacttcaactaggattatctaaaccaaagccacctgattaaatttgctccaagaagcactcttgttatatatccccatctcagaccgtgttctactagtctagcaggacttactagaaaagattagacagtgtattatgttgggtaaataatgacattattccaatgtccaaatatagttcagtgtccaatatagtttaaatgtagttcagtgctgacagtagaaaaatcccccttttcaaattttttactctcctcaatgttcctccctatgtttcctctcctattttaaagaaaaacaatttattccctcaaaattactttggacatgttaagtattgatattttcacaagataatgtgatatgtggctttgttgggggttctcatgatgactcccgtatttggggattgctagcaggactcagaggactcagcatgtagttgtactcagctaagatttattgctataatatagcaaggatgtatatagccagatcataagggaaaaggacacagcagagtctggaagaatctatgtgcaggctttcttatactttctccttcccttaagaggttacacagagtgcactcttctctcaacagtgaaaatgcagcaacatatgtgtgatatttctgcccagggagatccattagagacctggtacccaaggtgtgtttttggagttgggggagctcttcatgtaggtatcctctatctagcacataccaaaatttcacaacctctgaagaaagcaggtattcagcctaaattgcattgtttgtacagtctaggcacagtgagccactattaccagggaatggtgggaaccctccaaaaatccaagtttctagacactaaccaagggccaaccttgcaagcaggcctttctaagtatagcagcctcaggccttctgtggtaacctttttattgcacagtggataataatgtgaagctcagttttggtcttgttaagtgtaaagattcccaggacttgcagttggagtaggatagttggcagttgtcagcatgaacctggaacatgtaatatcagaaaattttgtagttagaagtgggaataggtaagaaggcctagggagggcatgtaaatccagaaagattcagcacacagatggaggcattagaagtgaagagactgttttttcttctaagatgatatggaagtaataaggtattttaaatatatatgtgtatatgtatataaagttataataagtttgaaggtagatggtaaggaagttggtggtgttggcatcc

SEQ ID NO: 76507 - DNA, 2254 bp, Homo sapiens
aaccagagcctccggtgcctgtatagacgctggccgtgctgctgactggctgggtgccgcagctgggcgcctggatggagcccagggaccagtagttggagaaggtggagtgagtggtgaaactcatgctgtctggggaggagagtgagaggacaggactcaggctttgctgatgaccacaattaactttttttttcacatcagtccactgagttaattcttttacaaaatgcatggtagatctggtcatatcaaattaatagaggatcagttgaaaatcctcagtgatgcattcaactaaaagccttgcgtgggttatactacctactgaaagcttggtttagaaacaacactgaagagtgtagagtccagatttggttttgaatcaaagagctagacaccttttccagcgatgaccagaaattgaagacattagaatcaaggcaagaccatggataaagtcatactgaagagaagattcaagataggggagccagatgggtgttattctagctacatctctcaattggataccctcattaagacatttatggacaatctttaacttggcattgttttcagagaatgacttgataaagaagttgtgattctggaatccaaaatcagttacaaaatcaaagatctagagtccctgcccagagtaaaagagaaccttagaaccaaggcaaaccagcgacaagacaagatttccatagtgagaggattcaaggtgtaaaaattacacaagacggcagtagcctcactagcagctatcttattccttaggacccagcactggggcacaaaagcaagctcattgcatttgatatctttacactggaccccccagtctgtcttgctccaaggtcttactcccttaagtaaggttgactgacaacagtattggcatcttttgggaactcgttagaaatgcactatccctactgaataagaatctaattttaacaaggtccccaggtaattcagatgcacattaaaatttgagaagcactgctggagggcaacagtgggcatactttttctgaaaagggccagtgactaaatacttggggtttgtgggcctcgtagtctctgtgacaatgctcaattattgccagagcagccatagataatatgtaaatgattggatgtggctgttttctagtacagctttaccaaaacagtaattgctaaaccctgccttatgggaaaatgtcagattttatttctttttatgagaatctgtttagcagtttgtgtccatagctgtatttataaaccttttttcccactgttttagttatcccactagctgattactatatcattgctggagtgatctatcaggcaccagacttgggatcagttataaactctagagtggtaagtgtcttcacattctttaagcactaaagaaaacttttaattagctaccttgcttccagtaatcaaactagagctcctctgccttgtgtaagttgctataaagtattgactattagaatgtcttgaactttggttactgtgagccaagtcggtgctcaaagtatatttcatagtctcaattatatagtaatttaggttctgaaaaataggttctgtctttgcatatgtaatattttgtgagtatttactttggaaagtttggtcgacctaatgataaatttagagtttattttccttttacaagcttactgcagtgcatggtattcagtcagcttttgatgaagctatgtcatactgtcgatatcatccttccaaagggtattggtggcacttcaaagatcatgaagagcaaggtaagtagaacatccataccctcctaaaacactttttgatcctctgagaatgaagctgttttctttaggaaaatggctgttgatcttttctaagtgtgtttcactttttcatgggatgatggctttgttgcagctgagattcatgtaactagatgtggtaataatagctttcacataggaacagatgcaagttcactctgttagttaactggtagtctttgttaaggtgattcaaggttttaaaatatttggggccaggtgtggtggctcactcctgtaatcccagcactttggaatgccaaggcaggtggatcacctgagcctaggagttcaagatcagcttgggcaacatagtgaaacctggtctctacaaaaaaaaaaaaaaaaaaaaaaaaaaaaaaggaacataggagagacagtggtgtggaatgagcagagatgatattccttactta

SEQ ID NO: 76508 - DNA, 1052 bp, Homo sapiens
tggcaaagactctaaaataagagtgtgtttggtgtgttaaaggaacagcaaggaggtcagtgtggctggagggtagtgagagaggatgtgggaaggagatgaagtcagaaaggtgttgaaagctatgataaggtctttggcttttcctctgagtaaaacgcagagccattggaggggtttccatcagaggaatgatgtgatctgacttttttttaggactacattggctgctgggaacagtgtaggagggcaagggtagaattaggaaaaccagttaggaggccatttctgaaaatgttatttcctggcctgttgtgtatttggttattgcatgatccagttatgatgaactatctaaatggtctatactaattatttggttattaacgcacttcatctgtctcctcctttattttatagcacacaaagtacattttacctttatataatttttctcggttgagtcacttggctcaaaactgcctgtcaccttgaattaggtctgacttctttgaagatgcctgaggtaatgacagtataagagagattgaagtttttcaaccagtattgtataggcattttgatgttcatgatttacacctagtggtgttcagtacagtcagtggtatgaagcatcatgaaagccaatagccaatacaagctcatttattaaaagtatctagctctatcatgtctttttaaaagctatgatttaattctacgctaaatatgaaaccgtgtggctgtagttaagggaactctacttcctgtttatcccttagcttttacatcattatcatctcatctacaataatagcttcctaacttctctatccctaattgagagatctcaaactggtagctatagatgtgttctcttgggcatacatgttatttgaaaattttgaattccttgccagcattaaggatttccaataaaaaaaaaagtcctttctaaattttaaatcttatcacttcttcacctaatgaaattattctctaaagatataatatactttatatttttacacctctgtatatacattctctct

SEQ ID NO: 76509 - DNA, 1052 bp, Homo sapiens
actattctttatgatgtgtggtgccagttttaaatgaacttataggaacactttacttatatgaggaattataaaaattatacaatttatacttctgtagctcatacatgcatatgtatttattcttactagaacagtggaaatgctgcaccaaataaactaaactatttttatttcacttttttatatgtgtactttatatgcatacttcatatgtgcactttccaccaggctttcagatgagccaggaaaggaaaagggaatacacgtgaccctaccctttccttctgtgtcatcattttcagcatgagtggttggctaatatgggaaagcaacataggtaggaaaggatatgatagggttcctagattatttgtgtttctgagaacatttttttttgtccatgtttgaagccatttctagtttgaatggaaagaatggccctttgggactggcagcatattcatttagttatgggcataattaagtcttgatgaactctcacgcatcatggggctcctagaattctttgctcctggggcattgtgaatgctatatgcaaatggggcagcagagagtggtattgtgcccatctcctctgtccctgctcatgctgtgttgtcccatcagacttcacttaaacaaaacacaagtttaaagataaagtgactaagaatttcaagaaggcaatagcagagtattaaatgaagtacaggttccttctgagtgtggggctctatgcaacagcacaagttgcccacccttgaagccagccctcaatgggacaccagaagatggctggatggatacatctgaggtggacaaaattggatacagactctaaggcagagtctaagaacaaagggtattcaacagatgttggtgtaaagatggatgagttacaaatttaaaaactcagtggtgaaaaggaggtcaggggctagagacaagcagtaaccttgcaatcagaggatgaattcctagggtaaggattggtcaaaagaagggaaaagaatataggcctcatgtcaagatgctcagccaagatcttg

SEQ ID NO: 76510 - DNA, 1090 bp, Homo sapiens
gggaggagacaaagagctggggtgcaacaggaggaaaaatgaggagccagaagaagtggggagaaagggacagaatccaggacggggctctctgccaggggatgcctggaagtccccggtcaggcgtgggcgcagctctggagctgcttcctggttacatggcttctttttctctctgggagcatcggctgagtttcatctccgtcagctggatataccgaatcacgttggtgtctgtgaggagagaaataaaccttagggaacaccaggtgagggcaactatcacatttacaaggaattagcaaaggctgtgtctgcagacatccaacaggccaggctcactcaaccaaggtcccttctgcctatccatggtggctgagagggcaactagatgtcgaccctctccttcactgtctccccttagcaaatgtggacaggttggcatgacccaggggatgtgagagagaatgggtgggagaggagagagaatttctctccctctttctatgcagcagcgtatcccagtggtttcccagccggcgcagttagtttagtgagaccccagttggagtttaacatcaggcaagttgccaacttctctgagcctcctgtaccatctgcaagaaacaacctctatttttttttgtttgtttgttttttgagatggagccttgtcctgttcgcccaggctggagtgtagtggtgcaatcttggtttgctgcaaactccacctctcaagttcaagcaattctcctgcctcagtagctgggattacagacacatcccactgcgcccagctaattcttgtatttttagtagagacggggtttcatcatattggccaggctcgtttcaaactcctgactttaggtgatctgcccaccttggcctcccaaagtgctgggatcagaggcgtgagtgagccaccgcgcccagccaacaagctccatttttgaatgccaaccttgtgccaggtttctaaccttcatgatctcatttaatcctcaatacaatcccgcaaggtatgtatccttctcctcactgtgacaaaatggaatagggacctagcgagattgagtcagatgccaag

SEQ ID NO: 76511 - DNA, 1041 bp, Homo sapiens
cccacccagcaggcagctgtgaccgcagaagggcaggatgaagtgggccaaggtttgggacaggttgactgtgtaggtgacagggagggaaagatgatggccaggggaaagagcatcgtataggctaggggattgaactgtggactgattcagtgtaaataaaaacaaattaacaggtagtagttcctgtcagttctgttggaagcagcccactccctcacttttactccttcctccaaccctcaatcagagctacttacagccaggcaggatggggctttccccaaagcaattggccgtttgtccagtggcagacaatggtggctacagcctttgtgcttttaagagtgggctgggattgtggagactgcccaggggcttggctttgtcagaacttgtacaatcttcttttgatgaaattatctgaactcaacatctagcacatagaatgtgttcaacaaatgcttgttgaatgaataaattatgactgcagactggctctcctgccttaaactaatttcatcccagcctagtctcctgatgtctgtgctcgttatgctatgccatgttgcttcagtcaaacaagaaacacttactgagggcatattgtttgcccatcattgtgcaatatgctgtgggacatgggatgtcgtctcagtcttcaaggaaatggaagggttaagaaatgcatatgagattattaccaatgacaccgttaatttatatgatgctttaaaattatcagagcactttcatgtatttttcgtgtgactagtgaaaaagacaatgttgtacaaaattaaaatatatacagatgcaataatgtgaatagttaggatttattaaatgcattatcttcagatctttacatgtataatctcatttctttcatgcagttactctgggatactgttcccatttgatgggtaagaatattgaaaaccagaaaaattaattatcccaaggttgcatggcctttagtggcatagctaggatttgaaccaggcctgcctgactccagagctctggctagtatctatg

SEQ ID NO: 76512 - DNA, 1051 bp, Homo sapiens
tgctcttggcaggtgctaacttcatggaagatggtaataggaacagatactgctctctgcccctgcttcttggattcttcagctcctaccgctgattcggattatccccttttgaccctcttggggatccagactgctgccaggaggctgagtagatacctcagttatctgtatgttatttctgagaggctttggcggatcctcttcacttggcatcctgtggcatccctagggtctggtggtagcagtaatagcaacaatgatatcttacatctggacaactcagaatagtgctaacttttcctcctgacctttgcaaaatgacatcattttccttgtacatttgatacccttgctagtagagaaggggaaatgcttaaagatgaaaattcaagtgaagagaaatgaaaaagtggcttggactaattgctgagtgaggccactgggctcagaactgaacaggttggctgcattccccattctgcttttgctgtgtggccataggcttgtctctttagcccctctcagatttccttcctttaaaagcaatcatcacatgctttcctctcaagggagttgggtgtatgtatcagagaaggtcagtgaaacaccatagctccttgccagctcctagaggaagcttctttcatctatacaggatgaatcgctgaagttgagagtgtggctctcatcacctttgccttgagggaacttgccttttctttcgtcctttggcttctggaagaggagtgatttggaggtggttgagcatgactaatgggggccctggtcgggcccatgcccttctgccgcatttatatagcatctggtgttgacaagcattctttcctaattcccccacttaacttgtctgatgctgtctgccaatgtcatcctcaccacttgtgtcttacagagaaggaaatgggagagggaggttgtgtcttacagagaaggaaatgagagagggaggttggtagcaacatcagagtgacagttggctgtctctcatttcttggggtcatcagtctgatttgtttagagcctggga

SEQ ID NO: 76513 - DNA, 2329 bp, Homo sapiens
agccctgctcccgttccaggcagggccgctgcccccgactgagcggacgctcctggacctggatgcagaggggcagagtcaggacagcaccgtgccgctgtgcagagcggaactgaacacacacaggcctgccccttatgagatccagcaggagttctggtcttagcacgaaaaggattggggcgggcaagggggacagccagcggagatgaggggagctggcgggcacagccctttctcagggttggaccccctgagatccagccctacttcttgcactgataatgcactttgaagatggaagggatggaaacagggccacttcagagggtctcctgccctgcagggcctttctacccgtgtccactggaggggctgtggccatcagctctggctgtgtaggggaggaaggggtgcatgcatgtcccccaccctccacagtcttccttgcctttagagtgaccctgcagagtcactcagccaaatctgtctgctgctccctctcctcagccagttgggtgtgcgcagagctgtcatagggtccctttgtcagccccgagttcagcttcccaaacaccagtgttggatattctgtgattgattttggtcctcctccgctgtcccccaacacccaggaatgggaatctggcttggttcgagataggagcttttctgtgtcctaagccctttcatgctagcaggaagactgaaagcaaggtggcccagtgtggggtcatagggcttgatagacctggcactgcctatctgcacttccaggtgccccacctatttatctgagcccacaggtggaaaggggaactgcctcagtgagaacggggggacggggatgttaggaaaaatacagtaaagttgcaatgaagaggttcatgaagtatgtccttgttctttttggaaactctcggcaaagggcaaaccagcaagtattgagggtacccatctagctacttggggtcaggacctcgtcagaccaggttcggatacaatcatctgctcatcccaggaatagtttcttgggggactcactcactggtgccagttctaagtcagagacaaaattccactgtctgttccttttgctgtctgaactttatgtgttactcccttcctttggtcttcactctaatccctggagtttgtgggcttttggttatgtttggttagtagatatcaccgcaatgccctagaacagctatgaagcagaataccatatggccacctggacattgggacttgggaattcactctcaactgggccatccatgttgtgatgcccttgaagtaaaatggagccagcaggagtaccttctgtaaatgcatgtggcaaagtgctatttatagggtgcccagggagccgctgatgtacaataaccttgaggtcccccatactgaaaactgaccaaggcctgtgcacaggtagcccctcatgctgggctctggaccatgagctgagtaggaaggatagcagaggccaaccctgaccttcctggaagttgtttccttaacttgaatgttgagcttcctctaaagctttctcgtgtatgtcttctccatgccactactctgaggcctcctgtgttatgtgtgaacagttgtctttatgtgggaatgacgacttgattgggagtagagtctcaaggtcattcccctcttccctcaagactctctgaatgctgctccactgtcttttgtcttggaggtcactcagcaggttccttgcatttgctgcctggatgtgcagctggcaacagtgatgaattggtcactgctctttctctataactgggatagatgtcctgccttggggtcactaaaggggtgaccttgttccttgctttatgagcccattagcactttggttcaaggggcccaccaagtcttggacgggaaggcgctactggttttattgcccaaggttttgttattgcttctcttctgtgtccttctctttgttcagtgaagccaatatgtaagatactgtttttgtccccattcccctactcctgagctaggaggaaaaaatgtgaatcttaccagcagttccagccaaccaagtgattcttcttcattcttgatggggagaagtacatacaaagtttgttctgacagggcgcggtggctcacgcctgtaatcccagcgctttgggaggcagaggcaggtggatcacctgaggtcgggagttcgagaccagcctgaccaacatggagatatcctgtctctactaaaaatacaaaaaaattagccaggcatggtggcacgtgcctgtaatcccagctactcgcaaggctgaggcaggagaatcgcttgaac

SEQ ID NO: 76514 - DNA, 1260 bp, Homo sapiens
cctcccttttactgtcctctagggaaaagaccagtgcttctaggcctctggttcccccctcctacaaagtggttggcagggtgcccaggctgtatcctcggagagttaccggctttccatatgggctgatgacagggatttgaaagcgagctcctgtcctctgtctctccacccccagacagaccaagggctctgcttcagcactgtgcactacccacgtaggtctgtcccacagtgcactgggttggtgcagctttgtgggttggttttgccttttaaaaaggggatggctttgaaagttgcctaagcatgccataaagcttggaaggaaagcctgagaaatgccttatgtggagtagcctggtccacctctgctagctcggctgcccggtgcttgcctggcttcgcaggtctttgcatcaccgtaactgtcatgccatgaatgtgttgtgtccagtgtctgcttcgagtgcttctctcttgagatgggctcaggcaagacccccagccagcagggccatccttattctttctgtctgcttgccagcttgcccactagttctttctacagttccacagcagcatgtgagggggatgggtcatgtcattgcccttttcttccctggagcatgtgcatttctgtttgtgaagcaggtgggcttggtaagagtcattgcctgtatgtactccaaggttctttggtagaatgaagcaggcagggagaaacgtctccatagacccatggagctgagggtcaagtaagaaaggtaaccagttctgacagtttcctcttttcctctgattcagcctcaagtccctggtagatggatataagcagtggtcgtccagtgcccccaacctggtgaagggcccaaggagtagcccggccctgccagggttcaccagccttatggagatgggtaagcatagctcctcttgagagtcttggctgtctccctgctccctgggggcattcttgcccaagcttctaggaccatttaaggacccctagcactgcttcatggaggaaacattgggaatgtttttgttctagaatgttcagtgttctagaaactcatactacacttgtattaaggggccggtattagtcagggttctccagagggagagaaccaatagcaaccaaaaggaagtttattagggagaattgtctcacacagttacaaaggcaaagtcccatgacaggccgtctgcaagctggagaatgagaaaagcctgtagtatggctcccagggaaga

SEQ ID NO: 76515 - DNA, 1076 bp, Homo sapiens
tcattttcttcccaaccctttctttccaagattcctgcatttccacgccttccttaccccttgtcttttttccccccttacctgcctccttatttgctcactacccaatcccacccaacaaaacaggtaaagtcagatctgtttggaactctgatgtctggctggcctaagctctagctttacattggatttgtgaaaattgaagaagtgtttccatgtttagtactttgagagagctaaatgattggtggctgagaactccattactttcctggaagggtccacttgggcacagagtttttgataaggtctaacttccctgcagctccaaatgtgtgtgtgtgtgtggtggtatagaggctagtttgggggagccctgtctgtccattttctagatcctatccaacccttgtgattcacagtgacaccaggtgaaagcagcaaaacctggggcaggagctcagtcgtcccaaaggaggaaggggaggaggaggagaagagggccccaaagaagaagggacggacgtgggggccagggacgcttggtcagaaggagcttgcctcgggagatgaagggtaagtgccagatgacatgaaattctttctctcttgaagatggatgtaccatttaaacataggatatgaaataactttttttctctgtcgtgtgtttgattgctttctgagaaattacaagcttcttgatctttacaacagtttttcaccctccaagttcctggaacgtcctagaacaggcatggaaaactttttccataaagagccagataatacatattttaggccttgtgattcctatggccctgtcacaactcttgagcgccactgttggaacacagaagcctccagagaccatggacaacatgtaaatgagcgagtgtggctatgttccagtaaaaccttataaaagcaagtggcgggcagggtttaacccaccagttatagtttgccaacccctgaaggcgttctactcagagtagcaagtagcccaagcagtaaccaaatgtaaaaagttctgccagggtgttctgcttatacctggctcttcttccattttt

SEQ ID NO: 76516 - DNA, 1038 bp, Homo sapiens
tcatttatttatgggaaactgaagcccagggcataattccccattgtctgttcttgaatcaggtagtaacatggtaaattgtgttgtggtggtgctttgtacaagaaaactctttgggctcgcttttcttatccttaattaacagccagaatggaatgagtacagaactgctgcatttcatttccattttcactctttatggttgtaatggtggacagtttgctttacttcctgagccttatttgaggttacctaaattctgatctctgtttctggaagaagtaagaggtagttttctgggaagtgaggccatgtaatagcctaagtcttacatgtttgcttctgtccattcatgctttctgagtattcacatgttctattcagactgctggaatcctgatccccactcacgaccatctttcacgaatatcctggaccagctaaccaccatagaggagtctggtttctttgaaatgcccaaggactccttccactgcctgcaggacaactggaaacacgagattcaggagatgtttgaccaactcagggccaaagaaaaggtaaacaaaacaaaaaaaacaacaaaaaaacgaacgaaaagaaaaaaggcatgcattgaattggtagacctcactcacagggacctctggaccgagtctgactgaccatcttgattctagcatgcccaccttccagcttggtatctacttaattgtccaaaccagagaagaatgcagttgggcaaaatcccagtgcttggattacaggccttttttcttttctcacagtggaatgtctcaccctgccagctggaaatatgagaagttctggaaatgtttcttgattctacaatagacttctagaagaaggttaatttgatatagggatacttcaaccttgaggatagttatcagaacatccttcccatgtcttttgacatcagaatcagaaatagaatatgggcaaaaaataacatgggtctgaaattgtgtggcatttttcatgtttttatgaaaagtatttcaagcccaaaccaac

SEQ ID NO: 76517 - DNA, 1030 bp, Homo sapiens
gagaggtgaacttgcttcctaaaggcacatagctgttaagtgataaaacaggcatttgacccaagtctgtctaaatctttctctggtagcattctgcctacttgggcagtagttctcacattccttttagctgtagaacccctgaagtgggatagaatgcagacaaacaaagaaacaagccaggtaagagcagagctgccctgactggagctaatggggccagtcccagtcccataaccccccacccctgcctcacccccgacatgcttccaggcggtctgagacaccttcacaggacactgagagcttagtgtgaaaactgtcacagaagggatgcagggacacaaacagaacatatttggatctttgaaacactctatgatctttccaggtagttagggcccagataccgtctgtctttgtctggttgggagaaaggggttctgtgggacctttggtttttattctccaggatggaggtgggcatttattccaagagcaagcaatggaggataacagtggctttgacctaggaatctggttggcaatgctgagagttcctggaggtcacttggtagaagctccccagcatgaccactacctggataagtcacatgaaaggtttgtcaggaagtgtaatagtgcaattcttgatgatgtttgggttttcctctagaggacccagggcagcctgcaggactgtctgaccatgcgctcactcccatacccacagacccactcactcacatatctatgagtgcttcctgtgtaccagagcttgggctaggtcctgagaatgcaaagattaaaaacatttctccctgctctttaggagcctataggctagcagacaaacagctacaatacatggcagcccaaatgggctgagtaacatctggggatgtcaagaaggcatcgtaaagtatccaatgctattcccataagcctccaaactaaaatccatctcctgtctagacgagtcaagaccaactggctaccaggctttttgttttttcctggcaagatgcat

SEQ ID NO: 76518 - DNA, 1016 bp, Homo sapiens
aatcataccatttgtggtcttttgtgactaggcttctttcatttagcataatgttttcaagattcatccatgttgtaatacaaaattagctaggcgtggtggcgcatgcctgtaatcccagctactcgggagactgaggcaggagaatcgcttgaacccaggaggcagaggttgcagtgagccaggattgtgccattgcactccagcctgggaaacgagtgaaactccgtctcaaaaaaaaaaaaaagattcatccatgttgtaacttatctcagaatttcattcctttttaaggcttaataatattccattgtatggatagaccacatttgtttatccatttatcagttgatgggcatttgggttgtttttgctttttggctgttataaataatgctgctatggacacttgtgtacaacacaagcttttgtgtaaacatatttttttcagttttcttgggtctatccctaggagtggaattgctgaatcatgtaacagttctatgtttaactttttgaggaaccaccaaactttttcatcatagctataccattttattatattcccgttagcaatgtatgaatgttccaatttcaccacatcttttcaatacttgttattgcctttttttaaaaaaaaagttattattatgtctatccttgtggatatgaaatagtattttgttgtgattttgatttgcatttcactaaatgacttatgatgttgagtatcttttcatgtaattattggccaattatatctctgaacctgaagaaatatctattcaaatcctttgccaatttaaaaattagagtatttgtctttttattgttgagctgaaagagtcctttctattctctcatcagatatatgattagcaaatttttttttccattctgtagattgtttttccactttcttaaggctgttctttgaaacagtgtttttaattttgatgatgtctagtttattttatcatctgtggattgtgcttttggtgtcatatctaaaaaac

SEQ ID NO: 76519 - DNA, 1080 bp, Homo sapiens
tttgaggacatgattattgagagtcactggcgtgcactaccacacctagctaattttttgtatttttagtagagacgggatttcaccatgttggccaggcaggtgtcaaactcctaatctcaggtgatccacccgtctcggcctccccaaatgctgggattacatgcgtgaaccactgtgcccagccaggaatttatttaattgtgacatgtgtattttagtttcttcatcagtaaaactgagatggcaatagtacctgccttgtaagttgttgtgaggattagagatagtggctataaaatgggtggtacaaaaatggatgcactgtaggtgtttaagaaatgatggctctgaccatcaatccatggcagctaaatgctggagcccacaggagaggccaggaggatggcagaagagttctgttctgtggtttccctgtgattaatgcagactctggtttcttctgtattcttttccttgcctagtattgatcctccagaaggtggagaatggagacctgagcaacaagattctgaagatcactgattttggcctggctcgggaatggcaccgaaccaccaagatgagtgcggcagggacgtatgcttggatggcacccgaagtcatccgggcctccatgttttccaaaggcagtgatgtgtggaggtaaggtccaggggggcagggacagcatttcctaggtccatcttggtggcacacacatttcaagacttggagaattgaggttacctaggatcccaggcacctgaagtaggtctaagtgacctcccccaagagtcatctatgccaattcccatattgccaggggacagtttctaatgctttcatctaccaaaaaaatccctgaagtgctatacgcaggccactttttgctggtgattgctccctaggaaaggccagtagattccaggggcaacatgtactcccatctctacgctgtaagatgggaaggacactcggtccttctcggagagcttcgtgaggatcagtctggcttgctcagcaatgctaggctttcgtggctgttactgctgaacttggggaggggattaacccaat

SEQ ID NO: 76520 - DNA, 2382 bp, Homo sapiens
tgggcattcactgaaggcagagaacacggcatttgagcgttttcccagcagtttctgggtatgcctgttatgcccaccttccaggtagcagggaaggaaggaaaggactggctttcacctggaaactgaggtgtaacatctagagaatttgtatagttttgaattttccctaccatggtgagatcctcaactctgtctcatggggaacaggatttgtagagtaatattcagaggtagactaggaagatgctaggaagtctcatcttccccatgcaatggacatggaggtgggaggaaggaattagaaaagcatccatatcatagactgaaagacagtgagtcagagcaaagctagtcttggcctgaggaggtacttgaggttggttcctccctgctcttacatggagaggttgaaaagtgattcataggaaactttaattggtgtttcatagctttccagggctattaaggacttgtggttcacaatggcaactcccagtgtttcgagcctttgtggttgggacttccttgcctgcaaggtgatgggatgaaggtggtatctgtggtggcttgtaccgcttcctcctctgccctcaaatcctttctcctctgcaatgcctggggtgaagtgcaggtcacagagcctggaatgttttctttttgtatagatcatgattctcaaccgatgtgggtaattttattacccaaatgtcctcataagaaattgacgtgcctgctattgcatacatgctgtaagaaatacggtcaatttattatatacataacatagaggtcacttccactgcattctttccatccttaggagttgtgctatgtaaacacatcctaaacaaccagaacagtgtgatgtagtagggggcagcgtgtcaagatacatgagatggggtctggagaaggcagaattccctgggaggccttgatggaacaattaggcctcaaagaaggggtaggattcaagagttggtaatagggcaggtaggccatagctatgacctcccagggaaggcggcctgccccagctcagacagagccaagtgttcactgatgccatgtcccatcacctgggttctttaggcaattcccagacctggaatgttgactaggaaagccatgctcccaagaagttgagtcttccatgtgaaacagctcctctttctaagtggccagagaacctgggctggtacagttgtgggctggtacagttgtgggctctgaatcaggcagacctggctttgggcaaagtcctcgaccctgagcccatttcctcctctgtaaaatggggataattctagtatttactcatggcattataatgaggattaaatgaagttatgtgtgtaaacccttagcataatgcctggcacaaagtaaatgctcagtaaaaggtagtttttcctttttaaaaaattcaagagcagcagcagatatgagactagactcacagtgtatcacctactgtttccattactatttcttcagaacaaacgaccccaaacaagaacattttattaagctcatggagacttgggtcaggaatttggaaagagctcattagggatggcttgtcaatgtctggggcctcacctgggaagacttgaaggctaggggaggctgcagatggaggcaggaaccatctgaaggttgttcacacacatggctcagtgcctgagctgggagaagctggaggccaggactgctgatgggagtgcccatgtgcagtctgtccatgagcatggctctcttagggctcttggccttacatagtggctcaaggctgcagacccaagtgttccagtgaacatggggaagctgtagcatcttttctgatctagcttagaagtcgggcattgtcatttcttctgcattctgttaaagtgagtctcaagaccactcagcttcaagtggagaggacacagacccacctctcagtgggaaaagtgtcaagatcacactggggaaaagcacagaggatgggagatgatggaccactttgaaaatgcaaccttccatgcctgctaagggaactctgctagcagagcttggggatacaaggccctggagagcctgtgcggcggctgcaccccatggccacctgccaagaaagaactgctttctgttgacaaaaccatcgagcatctgataggcttcctcttttttggttatttttatctggtatgtagctgggtacttcagaggtatgacggagatctggcagctcttctcagtcagtttgagctgatacgatgagaaaattcaggggaggcaggtgtttaaggagatgttctttagtaaggaaagtggctgcacaaaagcctctggctttctgtttcctgctggtgatatctgcgcctggatgaggtg

SEQ ID NO: 76521 - DNA, 1059 bp, Homo sapiens
acaataaataagaggaaggagaaaaggactgtgggtagggaaaatagcgatagattttggattctggtcattcttgactttcttttttgcttatagatatgattagagcttactggaaccttacagttgtgaactagagaagctgagtgacttgcctaaggtcatcctgatgctcatgatagtgttccttcttttagcccgacaatggaacactgttactctgccaggctttccagctaggaccaaagtatttcagacaacagtggaaacaggatctgtaccccattcgaggaaccagggggacaatttccttgtaaggtcccaaggtcaaagtttggggtgaagtcagtgtttttcctggttactaacatgaactcggtctttggtatgttatgtagaaggataacagtgttcagtattcttctaggtggtacaatttttaggaagaaaagaataataaaaacattttttatttcttaagcagtagactcctggctccctgtgcttagagataggaatccccgctgagagatagatgggaatcctggagtggattgttaataatctccctgttattggcacagttgtgtgatagagagttgttttcccctctcccctgccttaggagacctacccttactaagtatttggattaaattaataataaaatagcttgctttgcccaaatgcacagcagctagtgacaaggggagatgccacatcacatcccatggatggcaatggaaaatcaactaaggacgtaaaattttcccacataagcttcagatgacttaagattattagtgtaacctgatattatctgatactctccttggcttattattcatggtgacagtaatacatggccctcatttccttcatcccccaaatagtcctagaggtagtagaaagagtatggtagtcccctcttatctgccatttcactctccctgtttttagttactcatagtcaactgtggtccagaaatattacatggaacattctagaaataacgattcataagttttaaattgcacaccattctgagtagcgcaatg

SEQ ID NO: 76522 - DNA, 1024 bp, Homo sapiens
gccagttttatggctctgctggactctcagttgataattaaaatgcttttgccccaggaggaaggcaatatatttatttccctcccttctctgctgcattagtctgcttttttcacatcttctcctggcctccctatgtcaacttagctttcttgttacacagtgtcatttaagactctggagtattcagggtggattgaagagattttattttgagttttgtggtcttgttttggaaggtaaacggagcatgtctggccctttttcatctctgtataagagctttgtttcctacagctactctctaaatctggttgtgtccagcacttagtaggtccttaagaaatgtttatagttttgataatcacagattctagcactgtgtctttcccatacatacctccttcccgcatagacattctccaaacaacaccacacctcttctcctttagagccctcatttaggatgtgaaccctctcttcttttggggatgagcccatgtgaactgtgggtgaaactggatttgagtcttacctggctctgttacttgctagctaaggaccttgagcaaatgatacaccctctgtggcttagcttttgcagatgtaaagcgggaataatgataataccaccgatctcatcttacggggtagaagtgaggattaaataagatcatctaggtgaagttcttaggagtgcctggcacgtaataagcacccagtatattgaccattttaattataattccatctgctacacttattcccttagtatttagatcacaattggtgattatatttttgggtggtatcttttgtcttgtacttgcattttcattgttttagtcatattctttccagttgtactgtagaatttaaaaaattcaaaatgtagtggatacacatgggtaaaaataggacaaaattgaaatacaaagaaaagtctgtctccagaaaaagagagagaaaaaagaaaagtctctgtccttccctcccaaaccctaagtttacttcttagaggcaa

SEQ ID NO: 76523 - DNA, 1381 bp, Homo sapiens
cagtggtctggttgagtcaggagaaaaatgtagcttctatcccaggtccagggagcccaggtctttactgtggagtccccttcaatacccctgacagcctcttgtagaaccacactttgttcctcttataatgtaaagattaacatagggccagggaaccacgcaaaatggttccatgcaaaatgtggatacattcattttggagggaaaaggtcagggctcttattattgtaagactcagagaaggttatgaatcaatatcattacagataacttaaattgggcatctgtgtaagaggtgttctggtgcagtggaaagaacgtgggccccagggctgtccttgacactgactggccgggtggccttgggcacgtctgtgatctctctggacctcagattcttcatctgcaaaatgaggggtttggacaggtggtctctgaggtcctgcccaggacttaaagcatgaatgtctgtgtatttgggaatgttagtgactacacggtttgtctgcctgtgcatgtcaggctgctatgtgctcaggttccccacttcggggcttgttctggcttgggctgaatctactgaaagggaatctttgctgagtggtttagtggagaaaacagttgacaggagcccacaagtggtccccttcccccactgctgctcagggcatgacagatggccttgctgagagaagatgctctggtcacatgaaccatcctggagattcacaataatccaaggacagccttcctcctagaagcaggacacagttagtcgcctgctactctgtccttggagctaagcaaggggcatcctggtgtctcggagctttgctgctgctttgatttacacttgcttcctgctcacttttttgaaacaacatagggcttttccaggtggggctcaaggtcacttaggcgactttaattgtgtgcctcatatatccccactgacctgcagaataacaggaagaacatgtcccctgtgtgatccactatactgtaagagtgagacatatacattagacatattaaaagctgtgggttgcatgtccctttccctcctaacttccctaaagtttttgctctctataggaaacttgaaggttttgatctgagaagaaaacattttccccttaagattggttttgggaaccaccgtggtctaatggaagaaacaccgccttgggagttagatagacttggatttaagctacttcttgagcacttgacattgggcacgtggccaacctcttggagtcacaggaaatctcatccgtaaaatatgaacaacacagaaatgagcagtactgttttaagatgatatgagctattatgtgtcagtatcacacaggcactgcattcagtaaatggcact

SEQ ID NO: 76524 - DNA, 2064 bp, Homo sapiens
cttttcctgatcaccagccctggctaactcactggcccacgtctccactgtagccagttgccggctgctaggagctgctggagccgaccactgcccggtgctgtcgggtctactcccagtctgttctgtccaacctcagtactccctttgttcccaacttggggactgcctgtcacgctcctcatggtgcctgttccagttttgttgaattgttggattggctgctcctgttggaactggaggtccatgtagcatctccctctccaaattctgttcacttgcaccttgtcctcgtctccaaccttctcttggagttcacaaggtcaggaagctgaagacatgctttcaccagtgtgaggatgatagagattttgtcttcccattggcctcagctcagcaggctctaacattctaagccctggagtatacctggaccacacactagccaaagctcctgactggttttcctgtgtgggatttctcatggctggtgagtttgctggctgccagacctgtggcaccctgggacccactggatcccagtctctagtgtcgtcctgcacgcatggtagagcccattctgcctgatggaggaagcagctaaggctcaggcaccctggtcagggatgatgtggcattagacttgcctcgaaaaaggatgaggagtagctgtaaaagcagttttttcctacaagagaatgaaataggcaggaaaacattcccagagtggacctggaaggcagtgaagtatcatctggaaaacccaagtcttggtcctttttgagaggtaagtaaatgactttttgtatgcttcatggaggcctctccaaatgaaatacttctggcattacctggctcaggtacttctgaatttcactccctgtttttttccttagtcaggtcctttggtggtttttgccacatgttccttcttaacagagagttggaggatgatggatgtgttttgaggattttcccaggcaaaagtgtacaagcgctcagagaattggatttatcttttggttgcaggaggctatgccagaggttagctagcagccacctggcgtgtctcagagcatcctgttcagttgatgggtagcgtttcctatgaatacagagatatgttctgcaagccaaaataaatacgtaagtgaataaagctgaaatgaagcaaataaccagccgggtgaacaggactcagcagaagaaaccattgaggccggagatctgacttgcaagtcctgttgcatctttcagttcttgaacgtggtttgggaaccttgcctttcccttttgtcctgtgcctttgtggccatctcctgcacaaagttggttttcttttatgggccagtctaagtcctggtgttaagaatacagcaggaaacaaaaaagacacaggccctcctctccaggagctccctgtggggtcagggggaaagaccttgatcaaaataaagtggcacaaaatgtaaagtcaagactgtggtgagtaccatgagcatggctgataacgggacatgcctcgagaggagtgctggagaattctctgaggaagttttgtttccgacgtgatctgagagaggcaagagtggagacaaagtggaaagggaaggtggggcaaggaggttccaggcagtgaggccagcaggcccagtgccccgtacagtgtggcctcctgggaggcaaattgcgtgcttggattctcttgcctccatcctttcctgtggttggtggagaaggattcgtaaggggaatggatctctttgtgggccacgtgccttcatttcccagcggttgctctagagttctgcctgcctcttcttcctatttcatcaccgtggaggttctctgcagcttactcagtggggcagcaagtagctcaggacaccaggcaacttttaagctctcataatgctgtgctggagttggagcagaagcttgtgctgtatgaagggccttggttggggtttctggaccatgagcttttagttgcagaaaacagccttggtgaggggttgagttcagggcaagaaaggctttgaaaggcgtgtggggtctgatttc

SEQ ID NO: 76525 - DNA, 1020 bp, Homo sapiens
agctgaattttctttattttactttttctaatatttttatcatgttgagagaagtaggcaaagtactgtaaagttacataattgaacccatttagaaagttgggctaggataacaaagttgtaaaagttaatagtttacttgatgaagttttgaatttgagtataattttaagctcttcatacacgtttttacctcttatgagatttgtatttaggagtggaggctcttatgcaggaaaagttaccctgttaaggttctgctgtttgtaggagagggcaagagacctgagtgtcattctgttattcaggagacaaaactctggtcctttctttttccttatgtgggttttaggattgccaaggggagccatcaggattgcagaagttgtataatacttaaacattcggcagtattttaaaggacattctcaatacagttgctgcccagtaatgtttatggtccattggactgcatggttggcgctgatgttgatgctagttgtaaatcttacatgtgtggtggggtagcactttgacgtttgtctgtgggtggatgtttgccaaggattgtatacgtctaatatgagcctcgatgataccaccattcttactccattgcaatgtgtacatgacttgaaaatgattgtattttatttatttattttttttagagacagggtctcactttgtcacccgggctggagtgcagtggtgtgatctttgcaaccgccgcctcccaggttcaagtaattctcctgcctcggcctcctgagtagctgggattacaggagactgccaccacacctggctaatttttgtatttttagtagaggtggggtttcgccatgttggccagcctggtctcgaactcctgacctcaggtgatccacctgcctcagtctctcaaagttctgggactacaggcgtgagccagtgcaccaagcctttttttaaaaaattttattattattattattattattttaatagagatgggagtcttgctttgtggcccaggct

SEQ ID NO: 76526 - DNA, 1007 bp, Homo sapiens
aacacctcaacttgagatacccatcacagaagggactgtaagaagagaatgctattctttaaactgtgagctgattcaggtggtgatgtccatttggagagcatgacttcctggtaatatcaccaacctcctggtagcccaagggtggtattaattaaatgccataattacctagtgtttaatagcagggaactgagaagtaactctttattaaatatccagaatccataaactggatttaaagcaagtgttaaatattaaatggtgagttggtagaagctccagtccttcacgttggctgactcagcagggctaggaatacgcttcttttctgtggtagtttgtgctctctcttgcctaaactgggtggtaaagaggacacaattgcataatggtatgtacttaaaatcacttggagcatcctgtcccagagaggagggcatttgagttgaaggactttgggtgggggaagcatgggcccccagggacttcactctctttgcatccttcagctttgagcctggaaatccttcagactttgttttgctccaggctgttccagatgtggtttatttttctgttgatactatggtgaatctgtttactttaaaaactacattttaaggccaggcgcggtggctcacgcctgtaatcccagcactttgggaggccaaggcgggcagatcatgaggtcaggagatcgagaccatcctggctaacacggtgaaaccccgtctccactaaaaatacaaaaaattagccggacatggtggcgggagcctgtagtcccagctactcgggaggctgaggcaggagaatggtgtgaacccgggaggtggagcttgcagtgagccgagattgtgcctctgcactccagcctgggtgacagagcgagactccatctcaaaaaaacaaacaaaaaaactacattttaaaattatgtaagtagtggtggggtgcagtggctcatgtctgtaatcccagcactttggggaagctgaggcttg

SEQ ID NO: 76527 - DNA, 2106 bp, Homo sapiens
gagggttcaaatatccaaaccatatcaagtagattttttttccattttatttcaaggatctcttggttacctacaaaatgtttggcatggcaagtgcagtggtgaatagggcagacagaatctctgcccttgtgggtctcataatctggcctggacaataggcattgaacaagtaattaagtaattataatcttgatgcctcttgtggaatggaaactgccatggaagtgtttgataggggcctgacctcatttggtcttggtgatggagaagttccactatgaaactgatatttaagacctgaggtatgagtatgaatcagccaggtaaagacaaaagaaaaaagaagatagagaacagggtttcatgcaagaaacaaaacacactttgctcatatagcacttagcaccacatgtagctcgctttataatcactggcagctattattatctacccatgaaagcctttccacacacaacaaaatatataatcaagtaccttaggttcaaattctggatttgggaaggagaatgattggttgggatactgggtgggatactgggatcatcagggcttgaactgaggcacagatgactgctggagtaagatatctcttatgaggctcctttcccatgtttcagtctccaggtccaggtagaaccaagttctgaaagtctcccaaattgactgcgtactccctatattcactgctgctgaggttcagacctctgagctgcaaggcctccttagggggtccttttgctgttgggtctgtgtcctccaggttagtttccagtggctgccagagttgatttcctttctaaattacaggtctaacaacattccttttctgaaagatacatgactcctcttgtttacaatgtgatgttcaagcccctcagaatggctttaaagacatttcctggcctggttaccctcaacaaggctttgagcctcgtctccaatcctgatgcacatgacctggccacagcagactccctggaggtcctaatataccgtatacttcgtactccatgttcttggctcctgtccttccgtctgcctgattgtccttccctgccctgatttccttcatcgcctgagatctctcccactcactctttagggccaatttcaaatgttgccttccctgagaatcctttccccactcacccccttagtgctctgtgctgctgtgggagctagtgattttcctaagcctctaatcatacttctgcagaagctcttctcatcctatggtttggttgttgggtgtctgccttggcactgagttgggtgcttctcaccactgagtacacagtaaagctgagtaagtctcaaagaaaggatctcggccaggtgcagtggctcatgcctgtaatcccagcactttgggaggccgaggctggaggattgcttgagctcaggcattcaagaccagcctgggcaacatggcaaaaccccatctctatatttaaatgtattttaaaggaagaaagaaaagaaaaaaaaggacctctcccatattccctttagtgacaatagttggttttggtacaggattctgcatgattttccaggtgggattttttttcatgaatgtttatagaatgcctaccatgtggtgactgtcactaaggaaaatgcaaaggaaaataagttgattgcagttcctgcccttatggaatttgctttataatggggagacagaaaggcccagtaaacagacaacttgccgtgtttacccactcaggtaaatgaaaggttaaatacgatgttttcaagatgtttttgacttgcttctttttttcttccctttctcagtgttagaaattgattttgcggagctcaccttggaagagattattggcatcgggggctttgggaaggtctatcgtgctttctggataggggatgaggttgctgtgaaagcagctcgccacgaccctgatgaggacatcagccagaccatagagaatgttcgccaagaggccaagctcttcgccatgctgaagcaccccaacatcattgccctaagaggggtatgtctgaaggagcccaacctctgcttggtcatggagtttgctcgtggaggacctttgaata

SEQ ID NO: 76528 - DNA, 1038 bp, Homo sapiens
gggaaggagagccccacatactctgctgcagctgaaggtctagttccttcgttcctatccacagggactgagcagggaaggaaaaagaaggtccttcctccctcccttctttctgggttctgtcttttatctgcttgaaagttgtgttctatacttttcttggagtcaggtcataatatttgcttaactaaatagcaagaacctgagatttttatgttctactcaaagagaggttattgctttcccttccctgcagaggtttttagaggagctgtcctttcagcaccctagtactgaatcatgtcttttaaacctccctgcatttattttttcaatccctcctgcatttaaatgaatatttaacacctactgtgtgtttacaactatgcttaagactggaggaaagaagggagggtacaagagaaagtacaatagttaaaattcccttaaggagaattcagatactcagttgaggaaataagaaaacagatacaaatttgttaagtaatcacacatcttttcatatgtgtaaaagctgctagaaaaacatgaatgttcctccctccatgaccaggaagactcttaacatgtatttctccaagagagtttctaatctttctttataacataggcatatttttctcattcatatagatgacatcaggcacaagttagtaataagtctggattcattctggggctcagaaactctcaagctattttgagcaagaaagagatttagcacaggaaattctgtgcttgcagaattgttggaagggctgagagaagaggctctcagctggacctatgtgaacaactcccagaacatagcagaactggcccaccaggtcagctgctacttctctaattgggaacatacagaatcaggagctgccattgaagctgttggcttcaaaaacaccctgttgtgtctgcagcccagagattaggcaaccacttggctatgaaacattcctctccacatctacagacttagtgattggacaccaacatgctgatgcaaaaaatccctgcagc

SEQ ID NO: 76529 - DNA, 1048 bp, Homo sapiens
gcagcggcgggcaccggctgcgcgagcaggtaccggcggcagaggtgacgaggccgcccccgggggggcgagcgggcaggcggggactcggcccgctgcgcccctaggctgcgcgaagagctcgcgctcggcgctcttctcgtaccgcggtaacagcgccggcgagccggctctcccagccctgccagcccgggccctacctgcggccgccgtcgttgggggggggtcctcccagctctgcggaggcgcatgaacaataggcggcggcggctcctgcgggcggcggcggccccgcaccctatggatcggccgctccatggagccctccagagcgcttctcggctgcctagcgagcgccgccgctgccgccccgccgggggaggatggagcaggggccggggccgaggaggaggaggaggaggaggaggaggcggcggcggcggtgggccccggggagctgggctgcgacgcgccgctgccctactggacggccgtgttcgagtacgaggcggcgggcgaggacgagctgaccctgcggctgggcgacgtggtggaggtgctgtccaaggactcgcaggtgtccggcgacgagggctggtggaccgggcagctgaaccagcgggtgggcatcttccccagcaactacgtgaccccgcgcagcgccttctccagccgctgccagcccggcggcgaggaccccagttgctacccgcccattcagtgtaaggcgaaggcggggccgggcggggagggggaatgacggaggcctggggggcggtcggggaaggggggagcactgcgcgagggctgggatgagggcggggggtggggaggacgattgacctgggtgtgggtggcgcgcgcttaggctgcccgggctttgcttgctggataagctcgagacgcctcaggccctgcccgcacttcagacgcttgggcttcttcaccttcagttggccacctcagcagtggctcccgatttccacatcctgaagtcccagtctgagaatttgccagtttcccagtcccttctcttacccaccccccc

SEQ ID NO: 76530 - DNA, 1107 bp, Homo sapiens
tgctaggattacaggccttagccacctcacctagtcctctgaaatttctaaataagccagtgctgaaggatctagcccaacttctaccaaactttgttaccttttccccttcagtggtaggaatagacatgatttatttagcaagggtgagtgcttttgttgaattttagtttggggtttattattacacaaactaaagacagcggggcaatttggaaagataactaggcagctgcatgacttcaggcaggtgtcctaacactgtactcttaaagtgaggggagtgaactggaagatatcctgtgtcctcatagtttgaacattctgtggttcgctcatcaatatgactacactgtatagtcatagcacacatttgaggtcttgaagaagagagatgaggcttgttctaaaaagcatccagagtaggtcttgaaaaaggatttctgtttaagtaaagacctaaaacaatgctcagattcctattatacataggatccatgaactggaaaagatatggatgagtctgagtaaattatctaggttttgttttagacaaaaccattccactgtcaagcagcagagagcaagggagtggggatggaggtatattgtgtttttttaaaggccataagaaaataattgtcttgataaaattttaacttaggactgggtatggtggctcgtgcctgaaatctcagcagtttgggaggctgaggcaggaggatcacttgagcccaggaaggagaccagcctgagcaacatggcgagacccctatctctacaaaaaatgttaaaatttgccaggcatggtggtgcaagcctgtagtcccagctgtttgagaggctgaggcaggaagattgcttgaacctaggaggtcaaggctgtagtgaacagtgtttgctataccacattccaatctggtgacaaagcaagaccctgtctcaaaaaaaagaattttttttaacttgagggaaaaaaagttttacaaactgtagacacacagcaaaacagaaacaggaaaaaaagtactaaaaagagaaaaatgtcagtagtgggtctctaagtagtcggattatgagtaattgggtaagtttattgtcattttg

SEQ ID NO: 76531 - DNA, 1067 bp, Homo sapiens
gagcgcgggggaccgtgcggctctgctccgagtgtgtgtgggggtcgtccgggctcgtcctccaggggtcctgggtggtggctgaaaacccggctcggaaccctcctgcctctaaaaaaccgttgttgtgcttcgcagcggttcttctctgttcggccccgtggccggtggccgtggtgcttcctggcctccctggggggagggagcggggagataacggggaatctggctggcatttcagcagatttgtttggcttggttcaaggcctttggcggataggagtagggagagagagtactgcctgttgctgaattcggtgcgatcagcttctctgaatcatctgtgtttttaaagcaacattgaaagttgttaagcgcagtttctaaagcacaggttagggtggggcgttagggaaactcgtgtggacagagatgttacttaaggcttcatataaaattttaaagtagtcagaggggaggaaaggatctgaactttttattttaggagaattcctttgaatgtatttctgctaactttgaggttctttgtggagctagagacagggtgctgagttagaaaatcccggaggaccactatgagaagtgcaaaaggtgaggacacccaattcttccctaagtgaagttcagtttcactaattggcaggaaaagtgtctgcttgagggaagatgtgcacattctcaagcagattcacatttttcgttgaaattgttttgaagggacttattgtttgaggttaaaaaaaaaagccattaagaaatgctgatggcttgtggcttgttttattagggggacttgttcagtcttgttgcattctgaaaatttatcgtgaagtattataattttcaattaattttggcctagggagttctatttgcactactataccttccaggaatatgacatcattaatgaacgggttaattactttgggtttaagaatcctcaggctgtcacaaaattttcaaagcaaatttcttctatgtccagaagaattgtagatttaaaactgaaaatgatttttgagaggtaaggattagttgctggg

SEQ ID NO: 76532 - DNA, 1929 bp, Homo sapiens
gtgctagttgctttgtgttacaagaaagaaaagaaaacttagggaaaaggaagtcatttcctttgaggttttaagggggaaaaaaaagttgcattctgtagagctttgaacgagccaaatagaaccctgagcgccaactgccctgagaacaggcaggaagattaatcacaactttgagaagcttgaatcacgtgtctggctgttttccttttcctacccctcctcactccttgtttgagtgttgtctagacatatactcaacagatctaattattgcagttgtcatctttaaaactttacattttgttataattttagatttacagacaagttgcaaagatggagttcctgtatacccttcacccagtgtcctctaatactaaaatgttacataaccatggtttcaaaaaattagaaattaacattagtgcaatgctattaatggactatacactttatttggatttcatcagttgtactttttctgtttcaagatccttcagtccaggccactgtgttgcatttagtatcatctttactatggctttcttcttttcccctcacaggctagaattctgttctttgaggatgtatacaatttgtcaaatgtatcttatgagaaaaatttgcaaaaggttttacatctatgatagatacatttcagatggacaaaagagagggagagtattctgaatatttttgaataacctaatacaggctaaccattaacctatattaggctattttaaaactgaggtattttacatatgacaaatttcgtaaaatgaaataattccaagatgaaaaagactagagctcatttatgacagtatggacacctgtctcttggctctctgtataatgctgtttttactaatttataaattgaggctatgagacaagtacacagccatattataaggtagaatatgactaatgccttgtgtgtcataaagtgctcaggaattggaaggaggatgtaattatttcctagaatgctttatgcagaggatattcatacattcagaaccttcactgtgtgctgggtgctgtggtaggccttatggtgggacctttatgaggttatttgtgctggaatagtgtttccataatcttcccactgggcaaattaatctttgttctggggaaaagattgttccttaaaagaatgtatgttcttggatgtagtgttttgctctgcttaagtattctaatttatctaacacattaagggtttctcagtgagttattttttagcttctgagaatattatttataacattcttggtatgtatctggaatggttaaaagaaatgatataaaaacaaacaattcagaaaacctaaataaaccaatttcattttcactcagcagtatttatgccacaaatatacattacacgtaatttccacaagcctcacagaccctcatgaccctcatgacaaaactgaaatgaacttggatggggaataaagaggaattttgggttgtttttggcattttactaatgaaatcctcaatttcatatgtatttgatttatatatcaagcagtcctcccatctgagtctcctgagtagctaggactacaggtgtgaaccaacatgccaggctaatttttgaatttttgtagagataagatctgcctatgttgcccaggctggtaaagatattttcaaagtgagaataaagatagctaatcttaacaaaaatatgctttgttaccaaaaatcttactttactcccttaatgtcacagtattgaatattgaagaataccaggatgtgttattgaaaaatatacttaaaatactttaaatatacttgaagtgatcttttttcaatttctgtatatgaagattttcaaatgtataagaaaattgaaagaatgcttcatctagattccactattatgaacctttttgaaaaatc

SEQ ID NO: 76533 - DNA, 1149 bp, Homo sapiens
tcatttaatcctcatcatagctttgtgagatgaagatactgtaaatccccttttgcagaggaggaaacagaggctcctaggggttaaatcactggctcatgtttacatagattgcccctgccgttttttccttttgaccgccatagccaccttccatcaccctccaccatcatacaagatgcttctttctgattagtctgcgtttgaaagcctacctgtgattgatttgacatgaactgagcatctcctgatctttttcagtgtattccgggatccaaaactcagagctgtccttcccatctccatctagttatatccttaatcttggctctccttcttgaccaacatattatgtgaatacagtggaagcccatttagtacagtgttttcccagggatttagttatggttcttgcatatacttaaagtgagataatttgtgtcactggtcatttggggccagggttagccttgttctgtggcacacattataaatggatttcattaaacttttatgtgctttcacttactggtctaatgtggggttctttccttgctgtgcttatatcagatactctcttgccattgcccctgccgtctcacctgctccttcactctcgctacagagatgcagcatttacagtctgtgtatatcctgcccattccagttcaatatgaacaaaatttgtactgtagcccttatgaatatgtaaatagcagcaagagaagcacttgctgccaattggctgcatgtttcaaggaatgtaaacctcttttgggagattttaacctaacttgaaacagcagtgctgtaggcctctagtgggtagaaaccaaggggattttaaacctcctataatgcacatgacagcgccccacaccaaaggattgtctggctttaagtgtcaacggtgcccacagcgaggaacattgccccagagtttatgttctcagtgggtgtggtgttaccctcaagggggcagaaattaactcttgagggatgcatgtgtgaaaaaaaaatcttattctttttacatataaagtacagatgtacatgcagcacaaacaagtgtgcagtgtatctggtattaaaatttcacagggagcgtgatgaggaaaagaatgtctgaaaaggctacttaggaggaca

SEQ ID NO: 76534 - DNA, 1683 bp, Homo sapiens
agaattgcagtgtcatgttgacagaatttgttaatgaatgcttacttttacttaattgtgaatcctgaaaaaatgttgcaatagaatatatcaggaacaaatgggagaaacaggataggtaaagctatttaagttggacttgccatgagacagctttggtcctcatatttaccatttagaaattcagtgtttatcaatttactgtgggatttacttagactgataaataaaagagtgatttatacagtaaaatattgttactaatttacaaaaggaaatattaatgaagatagttcttagtgtagggcaccttttcctttttccagaatggttaggtttactaagaaaatcacatataaatcaaaacattgttagtgcctctcaagttatattcctatatagccattctttcagtttttactttgggaattttggggtaaagaatggcatgcagtctccagatgataccatccggataatactgggagacaaatctgtaccagactatttctttaatatgcatacatacctctacctttctgctttattttaataaccagttataattctcagacatagcagtttttaaaaccgttacacttttggcttgctgctacttgatggtttgggaataggtaccttaatctcatcagaaaaccatttcaacacataggataggatgagttagttttgtaaaaggtttttgtgaatcaccatttctatctataaagtttagattgttgggtatgttctattccggggcctctttgttaccttcatttttgaaaaatttcaaagtgtgctatctttaacaaatgcttctagataggaattgtttggatacccttttgggattacatgaaaattattatttcttttgttctctacagtgatctaaagatgcttttggaaactcggggaaagctctgctgtacattcagtgtttttttttttcccctcttaccgtcttgctcttgttttgaagcattctatctctagtctaccatatgactatatatatttgattattaggctaggtgccccctgacccaaaagtatccctcagccaagaaggaattatattatctgacttattacaaagtcttttgtattactttccacttgcccagttactgtttttcatccagttgtttttcttgtgtgtgtttgtagcaacatgacttgatttttaaacagttttttaaaatttagcatagctaatcataactgttactagggttataacttaataatttgcaagtgttggatgtcattaacacttgttggattaagttaaaaagtagcttatggagataagaatatgtacttatgtgatgagtgaaaaaaagaaaagttgtcctaattaagtacaaatggacatttggttacacagaattcctaggaacagcatcatacagaaagtgttagaactcaaacttatactgaaatgatgatgtagatgtgctatgtaaacctgtgttaggtaactcataatgacttctgtgatgaagaaacttctgttgctaaaaatatgtgaataaattggacaaaatcatttcatgaaatagagtagaaaggatatacgtaacattttaattatgaggacattgactttcaccagaatttatagattcaaattgtataaatgattttctttctttaaataaaagtataggaaaaatt

SEQ ID NO: 76535 - DNA, 1044 bp, Homo sapiens
attacccagtcttgggtatttcttcatagcagcatgagagtggactaatacagtgttcagctcatcctacagcccctcttccctccctggaggttgagagttgggacttcagtccaaccctctaatcaggaggttggttcccctggaaaccagccccggctcctgaggctatccaggagtccccaggcaccagtcaagctaatagtgaacaaaaagacaccagtttggagattccaaggattttaagagtttttgccagaaaatggggatgaagaccaaatacatatttcacaatatcatacaggtactcaactcttccaaatctgatatttatgcattttgtaaacttctaaatatatttcccaacttaaaattataagcccaaaccagttattcagtaacattttaagttggaatcagaagtttaattttttagatacattaatatgcaggacttcttaatccaagtatttaaaaataacaaatatttaatatatacctattatgccgacactcaacacaaaattattaatttgtggactttatgtttttccatcctaatttcaacccacactctttccctctcaaaaacttttcttttttttttaaagaaatttgatcatacctgtattctaaacctgtctggcccataaagacctttttatttttgtctcaagtgatttgaggttaacttttttttttttgaaatggagtatcactgtgtcacccaggctggagtgcggtggcatgatcttggctcactagaacctccacctcccaggttcaagtgattctcctgcctcggcctcccaagtagctgggattacaagtgcccaccactacgcctggctagaggttactcttttaaagccaatttggggtcatgttctcagataactgagattgaatcttgtgaaaacatgtgggatctagagctatagatgtctgggtgatttttctcatgaaattgggataagttgagcctagttgtattacctctgccagtagtgactctaggccttgccttcccagtgagctgttctc

SEQ ID NO: 76536 - DNA, 1852 bp, Homo sapiens
aaagaagaaaattggctgggcaaggtggctcctgcctgtaatcccagcactttgggagggagagatgggaggacagcttgaagccaggagttccagatcagtttgggcaacatagtgagaccttgtctttacaaaaaataaaaaataaaaaaaaattttagctaggtatggtggtgtgcacctgtagtgccagatacttgggaggctgaggcaggaggatcacttgagaccaggagttcaagagttcagtgggctttgatcacaccactgcactccagcctgggtggcagagcaagaccctgtcttgaaaaaatttgccattcatgaaatgtaaaaggtgtctcattgtgactttcagttaagctttctgattactactgaggttaaacattttatttttttatatatggtccatttaggttttttcttttttccaatgctcatttatgttttgtttcatttttctttggagctgtctttttcttaatgattaataggaattttttatttttttatatattcatgctattcctttattagttatgtatatattacagtcatctcccacttgtggcttgtcattttgctttccttaaagtttcttatgattatcatatactcttaaatttagaacaatgaaatttaccactttttagtaatcaggttttttgttttttgtgtttttttctttctttttttttttttttttttaatgaattggagtttcacttttgtcgcccaagctggagtgcagtggcacagtctcagctcactgcaacctctgcctcctggattcaagctagtcttttgccttccctcctcagtagctgggattacaggcatgtgccaccacacctggctaattttgtatttttagtagagttggggtctcaccatgttggccaggctggtctcaaactcctgacctcaggtgatccacccgcctcagcctcccaaagtgctgggattacaggcgtgatccacgcgcctggctagcatttttgtgtctgaattattttctacacggagatcagaaaggtattctgtattgtctttttgaagtttcatgtttcttttgttttcacatttcaattctacccaaagctatttaagtctgtagtatcaggtaggttcttaaggcttatttttttctttatgaatctctgatttacccagtatttgttaagtggactatcttttccttagtaatttgcagcagtctctatggcataagctaaattttcatttctggtggcttgtttctgggctctctgttctgttctgttctgttctgttgatctgcttgcctgtgccattaccataccatccttatcagctttaaaacatgactcttgatagccagtgggttaaacctcctaccatattcttttttaggagagacttcgctattcttggctctttgatttttgatgtaaacttcagagtctgctagagaaagtctataggaacttggtatttttattggagctacactaaatttgtaggtccctctgctgagaatttgcatctttacaatattgaatctctccatttatttagtctttttaaatacctttcagtaatagtttttcattttctccattaaaaggaaatttatgattttatagtatttatgctagtataattttgtttttccccctaaaatgtcgcagtttattttgtgtctagcaatcttattaaacccccttattaatgatgttcccttgtctatatgatcacaattatttcttactttctagtccttatacttcttgtttaatttttttcactggctatgatatgtagcacatggttaaattgaagtattattggtgtacatccttgtcttttt

SEQ ID NO: 76537 - DNA, 1055 bp, Homo sapiens
atatttagtatgctataattgtaattaatgccagtttctaatgttggatttgatgtagacagtttggaataagagagttatacatattttcaagtagtgatgtggttataaaatagttccaagtatcagacttgtaaatgaagaatgatcgttgtttaccttttttgctatttgctggattaaaaatcagaacctcttagttttgtggaaaaaagtataacttaaaaaattaacaaaggaaaagcattggagtcagaataatgacagttactctttttctcatttttttctccacagtgatcctggtggagggattgaaatgtctgagttcatccgagaggccacacccccagttggttgcagttccagaaattcttatgccggtctagatccaagcaaccaggtaggaacctgcgctgttttattttgcctttttccctcctcctgatggtggtctccgttattctcgtgtctttaagtcggctgatgttttgtcatatctttctgattattatttttaattgcttattaataacatcttttattaatattctttttaagttacttttcacattgattaattacagatttgttgagcattaccacagactcatctttgggtgtatagttttgattatgacagttgtgaatagccttaggaaatttagcttctagcttgcgctatcttcacatcatgtgtattagagaggtgtagatgtctgtggttacccccagtttaaacgtggccaaaaaataaaaataaatgctgaaaatctctcagtgttcaagatgtttaatggtaaggctaaaagtaaaatacaaatttgcttttatcaattttaatgtctttctactatgtaacttttaaaatggtaactcttgaagttttatttcaaaacttggctggacctttgctgctctagtcctcttattcatcctaaatacccgtacactaatcaaagccccagttactcctgctgtccttctcagcagatgatttcattgggtagagtaaaattctatgaactttgttggaaacgttcatggtcttctct

SEQ ID NO: 76538 - DNA, 1050 bp, Homo sapiens
tgaagacaagggttactatccttgatcctgtttttttgttggccttgtgtttctctgtctctttttatagaatgaaataactcaattcttgaatatggctgcatgtcttgtattcttaattaaccctgggctttcttcttattgacagacgtaggtagtatcagacccccagagagtaagcctacatttctccaatcatcttttggagaccttttttcctttttacaaaaaggaaagatgaaagggccagcagtggccaggcacttttggatcctgtgaccttggcatcgtgtctgttggaacttgcctgtttgttttagggagggagtccctttttgactgtgattaaagcatgtgtgcatgttgttaaacacacagcataccttttacttaataactttttaataaaaatgggcaaatattggaggttattgtgctacttggattttagtgttttcgttttatactgtttatgacaaaataaatggttgacataattattcttacactttagagaagctgaagtgaggaggaagagtctggctttttgcatattgctggagatattaccattatagacatactgttgtttcttgtatgtattttattatataatgtgtaagatactgctacacattatcatattttatataaatttgttgggtactaaacagtgaacccactgaccatagtagctacatcgtggtcattgttactattctttccttcacctctgcctttctccctttcatcttctacccatcatttccattctttcttttcattcctctccttacctccttctctttccttttgtcacttttctaccttcaaatattttagcgcccaatagtattcaaggcattctacttagtgtgggttggggagtgggtcttatactgaaagagattgtgatctcatagtaggtgtgatataagtaaccaaagataaagatgtgatatatgttaccaaggggccaggcacggtggctcacgcctgtaattccagcactttgggaggccgaggtaggtggatcacgaggttgggcga

SEQ ID NO: 76539 - DNA, 1029 bp, Homo sapiens
cctgtattcccagctacccaggaggctgaggcaggagaattgcttgaacccgggaggtggaggttgcagtgagctgagatggcaccactgcactccagcctgggcaacagagtgagactccgtctcaaaaaaaaaaaaaaaaaaaagataacgaagtaaaaattgccataggaatggtagagaagaagagctaatgatttcataggataaaataattgtttccagctggagagacaggcatggcttcttggggcaggtggccttgcctgatatgctctctagttagaagtaacctttcttccctggtatccataatccttcctatggcacttgtcatagagaagaaacagtggaatattttagtttatgcaaagcacttaaataaaaaacttcaccctcaagtgtaaaaagatactgttttttcttaatctttacattttcatttttaggaaatttaatgagtgagggcaaacaggaaaattaaaataatctatgtcataattgattgtatcatgagcattaatatcattaagtgtttttctacagtgacactttggggaatgcattgcatttggatatactatagtttatattctggagccctgttgtttcacttgtaaatagtcatgattctttttgaggggaagcataatgcagaaaagtatgaagaataaaatataaccactctattatacctgttaagaatgtttttgtcaacaagtaatagaatactcaactaatagtgacttaaagaaatagttgtttttcacctaaatctggaggtgattgtgtggcatttgtgttcagcagcctaacgttaggcctctggattggcatctctgcagttctctaggcttttttctcagggttgcaggatgagcacagcagcttcaatcaagaccctgtttgaaaagttaggaagcaagcagtagtgtgggacagagattttccttgatcactttcttctcagacacacaaagacgttttcctgaagccctccagcagattctcccacacgttcattcacca

SEQ ID NO: 76540 - DNA, 1014 bp, Homo sapiens
cccttgagggaaaacagttttgtgggttttagtggggttcatggaaaactaagtaatttgatgtgaaaccttctaatgtgaccacaaatgaaagaacaaaaaagagcaagttattttctgctatttgatctattcagataaattcgtattgttttcaccctatagttttttaggttaataattttccctgggaaggaaattcatgttgggtcaagttatgtaatttgcattcctttttaaattccacttgtttttaaagaaatagttttattagtttacattttgaagctttccacattgtttggtttgtagttctgtgagaataattaagtgctctgatagtccatgatacttcctgctagttcagtgcatcttccattattgtaacctttgatacacaaaaactactttagttgatagacattagtactccttgatgtattaatactccttggttatgccaccctacagccttactgttaatataaggtcctcacatgtttctcttaactttgtaggagatacagacactgctaagacttctgatgatatcagtttaagtctgggccaaagttctagtctttgtaaggaaggaagtgaagaacaaggtaagaacgttatactttaccatgatgtcatatactgtggtgaccagagttaatttgtagaatatgctgcatacaatttggcagaagtttataacaatttaatatgatatttaaggaaacattaacataaaatgttatggtgatagtagtaatacagagttacacatgcttttagcttacttgaactcagttatacatgttctgccagataaacatggagagagaaattctatgagcatatgccccagagtgaatatgagatgggagataagaatctgctattcttttagttggtcagaccaactagcccagcttagggataacctagtatgtaaaactgttactttccattcagtacgatctctaaatgccagctgcttcatctcttgccaactgcaaaaacagc

SEQ ID NO: 76541 - DNA, 1078 bp, Homo sapiens
caccacgcccggctaatttttttgtatttttagtagagacggagtttcacagtgttagccaggatggtcttgatctcctgaccttgtgatccacccaccttggcctcccaaagtgctgggattacaagcgtgagccactgcgcccggcccctttgtttcctcttaattttattgttgatagtctatacaactctttctgaggccagttgaagaactcaaagatttggaagttcagttcatttcgtgagtagaatgctttctttgtgcagctgtgaaacagaaagcagctctttggagaactacttgagaaattatttatacttgatttactgtatgcagtgaattctttccattgttaaacagtagaaaagcagatcatacatttattttaacatttcaaaatatgtgtttgaaacagatttggcagctgatcggaagctctttcgtcttgtctccaatgactccttcatctctattcagccttccttatcctcttgtggacaggacttgccaagggacttcagtgacaaagtgaacctgccaagtcataaccaccaccaccatgttgatcagtctctgtccagcgcctgtgacacagaagtagcttctcttgtacctttacactcacactcttatagaaaagaccaccggccgcgaggtgtaccacggacttctagctctgctgtggcttttccagacacttcactgaatgattttcccctttatcagcaaagacgtggattagatccagttagtgagttagaatcttccaagcctctttctggatccaaagaatccttggtggaaaattctggtttatctggggaatttcagcttgctggtgacttgaaaatcaatacttctcagccacccacaaaaagtgggaagagcaaacctttgaaagcagagaaaagcatggacagcttgaggagcctgagcacacggagtagtgggtcaacagaaagctactgcagtggaacggaccgggacactaacagtactgtcagcagctataaaagtgagcagaccagctcaactcacatagagagcatcctgtcagagcatgaggagtctccta

SEQ ID NO: 76542 - DNA, 1707 bp, Homo sapiens
tttgatacagtaatgttcagtcatttattaaaagttaagctggattttgtttgtacaaacattatgaaacatatgaatatatgctttttctcaaagatgttaatttcacccgaagtattttaaaagtccatattgtggtaaacattttcttagatttttttgggggtcaagtttctagccagattaatttctaatgggaacgtaaagaaattttctagtacctaaagaagaatatagtttatcaaacctaaatattgagaactaattatatctgaagtggttataaccatttggtgacagtagagtaattaaattccctcgagtctttgacctggatatagttctctctttttttttttttttgtaaacaacctgaaatgcttgtagtgatttctcacacaaatcatatcagatatgttcacagtatgcaagaaaccattggattttaaaatatagcttaatttttaaagttatcaaaatgaattttaagtcaacatgctatgatagaaaaatattgctgttctgaatattgtggaaatgtaaatactgaaaaaatgtgtacaaaaatatgtagtaaattcatgcgtttatatttaaaatgtcatttccttttcatggggactgtgaggtgttctgttttttaggaaaagttacctgaaaggtgttatttgcttctcggtgctgttctttaagctatattagcccttgtttttctaggctctagcttttgttttcttttgtttgtactgcttttttttaatttaaataactcaattaaatgttaataagagataatgaaataaaaatatctgctttggtggaagaaatgtaatagtctgtgggctgtttaaaaacatttttttgcctggggcaggcattgcacaggcttttttaatttgagcttcattgggtttagaatacaaataagagcaaaactaaagcacttaaatgtgttgggggttttttaattggtttttatcataactaaatataggggttttgttgggagtttacttgggctttttgaaaggttggaggtggtagaaggggatttgttttggttcttattatttaaaaattacagagactctcaaatactgtttaaagatacttgtttatgttaacattatctgttacagtcctgtctgacaatttagaagaaatgtttctgggctatccttccttacatactgtactactgaaacctgtcaaccatcatgttactgcttggccattcatatacctatgcataaaccataggtagattttatcctaaagaatatgaaggtgtcgataagttctccaacgatttcttttcattttattttaaggtaggtggtggtggtagtgtagagagatggaatttaggaaatagactttaaagtactaaaataaagtatgctaaaataggaggtaatctagtttagtgacatggagtcagatacctttgttagtatgtgggctccactgttgtgactctaggaaagctacttacaaacctcagcttcctcatcttaaaatgagatgattatagtatctatctcatagggttgttgtgaggactaaggagttaagttcctggcacacagtaaatgcttactagtgctgctgtgactgttcaaggccagttagttatgctgcacagtgtagcctgtcgtttaaccttactaattcagtggtataaaattaaagtagaagaaagtgatt

SEQ ID NO: 76543 - DNA, 1991 bp, Homo sapiens
gagccactgcgccaggcctgaaggttcctcttaaacttattatgattgtgaagtcagtctttttaacacaaataaatgattagaaagttgagatttgtacgttagaaaaaatacatttcaaaatatacaactctctggatatatacccttggaagtattttatacttcttgtcattcacggtttttgaattgcttgcatgttttttcttttttacctacacatgcataaagtttagttgtactagagtgctaatttttcactatctgcattttatgctcttactattgaattaatttcattcttctttgccagagatactgggttttaagcagtgtcaaaatgtcaactccaaaaacagtttttaaagtattttctcccttctctctgattccctagttaaaagattaaattttttttttttggttcactatttttcttctataaagttaaacaattcaaaaagagtttattacaattggattctggaagggaatatttatcaagtgtggctataacatatgtgactgtatgtgcttacagcaaattattttaagctttaaagacacattttccctctttggctggaatagaactggacccctactcgactattccaaatagagatgttctgtaagtagcacattcccaggggcatggcttaatcttacatactgtgaccataaattgtaatatagcattttcacttgaatgtgtgatactgttaaagcagttgccatagtcaacattttgaaaattcttgtaacagtaggtgtttaccccctgaatattataagagacagcatagacagtaatcataattccactttaacattgttcactggatgcctaaactttcctcttgatgtgtttccaagactgttaagaaagtaagtgcatcataatatgcagctattttgcagataacaaaatataaatggtgtattactagcaaaaaaaattgttttcttaagaaaccaagaaacattttgactaaaagtggacactgtagtttgtcttttcaccccagtactatggaataattagcttttacttaagattaacaccattaagtcttcagtagaaggaagatagtaaagaaaaccgtctcatgtttctcttcttcctgttctgtatgattacgtactgcttttatcccaaatccttcagaataattttggtacattttatggattaaattatcttctataaattatgtctgggtaaattttactctgctattttggctgaaacagtatctagaactagaaaaaatgtttgaaagtttcttgatgtagttggattgacctgtaaattgagcatagtagtttgttacaaataatgctttataaataatagcataatagtttgtaacaactgtagaatagaaatctttaatataatatttcacaaaataattcttgaattgagttttaaaatagtgatttaaattccataacctgagttaaaccttattggtgtctaagaactgttagcaggtataccaattgttcatctgatttttcatttcttccctcaattggcttgttttcttctctgctttgtttcatccttcatccattgattgcccttccctaatacatgttttctcctttgtggcaatgctgattgcattttcatttcattgaagtcatggttgtcaggaattggcaaagtatgtaatgtgccttgtagctgtggtcacaaaaaggcaaccttatctttctagataagcactgttcaatataactttgtgtgatgatggaaatgttctatatctgcactgtccagtaatggtaaccactagctacatgtagcaacggagcacttgaagtatgattcatcaatctcaggaactgaatttttatttttatttaattttaatttaagtttaaatagccacatatggctaatggctactgcattggacaacagttgtagatgaccggatttaatcagcatcttttgctgtcataggccatatataattttt

SEQ ID NO: 76544 - DNA, 1036 bp, Homo sapiens
gctatgagttcctgtgcttgccaatttgccaatatttgcttcctaaagttgagaggaccagagccaggggcatggagttgaataaagtttgatggtaatgaagtacctttagagtaaaatatattcatgctatgttgaattaacacactggttttgcagcttcacaaccagaggtttcatttaatgctgccaaaattatggcacagggtactgtgagataaacttactgccttactccttgtcatcaacagtgaaatatactgtctttgctgcttttacaatacgaatataagaaactaatgtcctcttcccattagtggaaactaatcaatactgtgcttttaaggttgacttaattaacggggtaatagaggaatatgggaccaaaataaatgaaactttcaggaaaagatttaaacaacagagatcttaaaaataggaaattgaggttgaagagaagatggcaaggctagataataagtcaaaaacattatttttaaagaaacaattttctttaaataaatgacagatactttttgtgtattacctgatatgatagattgacagtatacatgtgaaaacagtttggattaataagttcactttacccatgagggtgggaagtcaagggaaagccaggctcagctgctatttacatctctgacctaggctcttgtttgacctaagtctgtcttgatgcagcagcacaagccagcgaggaggcagtgtcatttcgccgtgaacgcagcacatttaggcgccaggcagtacggcgccggcacaatgcagggagtaaccctacccctcctacattgctcatcggatcacccctaaggtatggtattttcaattccaccaagtttagcatgcatgtaacaacccttctaatctgttccgccagtcccaagaaagcatttgaagagctttgtttttcttttcctttctgtttctttcctatacatttaagccctttttggctttttctgcatgtgaccatgagcctgttgcattatgcatgctttatgttgcactgttt

SEQ ID NO: 76545 - DNA, 1185 bp, Homo sapiens
gctgtgattctgggggctgcccagttcacaaattgttcattgctcaattaaaactcttttaaattaaaaaaaaataataataaaaaggctgggcgctgtggctcatgcctgtaatcccagcactttgggaggctgaggtgggcggatcacctgaggtcaagagttttgagactagccaacatggtgaaacctcgtctctactaaaaataaaaaaaaaaaaattagctgggcctggtggtacgcacctgtagtcccagctactcagggtggctgaggcaggagaattgcctgaacccaggaggtggaggttgcagtgagccaagattgcgtcactgcactccagcctaggtgacagagggagactccatctcaaaaaaaaaaaagaacttcgtctttcatagatcatgttcctaattaattcttcagtaagtcaaaattctataaaaagtaatatggattaattaaaccaatatttaaaatagaaaaatgagaagacaatcaatttaacagaaacacttgttctagaaaccttttctgagccctttgtttttgtgagccttcctgttctttttcctttctactttgccttttcctgcctgaagtaacttttctttctgctgatggatttggagcatagtctcaacatgtagaaagagctcagcgttttattttactttttctattttgtttctaacctcttctttttgccccttgaataatacttgccaaaggcaacttttttgctttcttactccatgtttatataaaacttttttttttaacttttgcttttcagtttttaaaaattatttcattctttgccactaatgagcctgctggataccacttagcaaacatatgcagacaaattagttttttgtcctctactaggtggaatattaaagagctgtgttctaatgttctaactccagccaatcacatacaattttcccatgtttttctagggtttggaatacattaccattcaaatgaggatgttgtgtactacctttttttttttttttttttgagacggagtctcgctctgtcacccaggctggagtgcagtggcgcgatctcggctcactgcaacctccgcctcctgggttcaagccattctcctggctcagcctcctgagtagctgggattacaggtgcccgccaccatgcccagctaattttttg

SEQ ID NO: 76546 - DNA, 1029 bp, Homo sapiens
ctcggctcactgcaagctccgcctcccgggttcacgccattctcctgcctcagcctccctagtagctgggattacaggcgcccgccaccatgcccggctaatttttttttttttgtatgtttagtagagacggggtttcaccgtgttaagccaggatggtctcgatctcctgaccttgtgatccacccgccttggcctcccaaagtgctggaatcacaggtgtgagccaccgtgcctggccaaattgtctaaattaatttaataaaaattaaattgatagtcaaaaccctgatgtttataatcacatggattctggctaattttatttatttatttttaattctggtgttgatttttatgcattgtctaatatcttaaaaacctttttgtatattggatatacattgtgcatctctgtgttgaagatgagcatatactcaaatgcgttcatgccaaaatacatctagctgccatatggcaacttggcttatgatgtcaagtgaaaaaaaatcgatagaaaaatttgttgagtacgtattttgtaaaattctgtgtcttctgaatcggaagggacacagggacgtggtacctgaactactacttaaacatttttttctcagtattttcttccttgtgaaatttgtcctttttggtaaggtttgtggataagtttagatagattctgaggaagagtaacaaattatgtatgtatggaagatgaaaaccttatctgattatattagttcccaagatttatctgttgatttatatctattctacaaatattccagtctgaagaaattattaaataaatacttttatcattatggcttaaaaaataatgccagtaaggactgacaagtccacatttgtagacttagttttttcatatgttgtgtgcattcctatcctctgcctggaatgtgtacttttcattggtgaaatgaagtagtgcaggttaataggacttcctgggatgatggaaatattctataatctgccctgttctatatggtagacactaactac

SEQ ID NO: 76547 - DNA, 1703 bp, Homo sapiens
ttggttgagtcagttattctggttttcttgctagtttgtgattctttttgattcaagattgttattttggttgcatttgataagattatttggttttcaagtgcatataaacttgttttattgtgagtttgagatctcagaatatttgaaagaacaattctagagttattacaaggctataaatgaaagtgcatatttaactgaaacatagggcttatctgttggggccagctgcagcacacatatattgaatgtacttatgattcttttttgctgctttctttttcctcacactagaatttagttggcttgaggtggaaaaaagtcgcagattgaccaatttacatgtacatttaatgttgactgcatttgtctcttcaaatcaaatttgtaaggaccagaagatttaagttggcaatgtaatctgtatattttgcaaagtttgttggcgctttcttaggttatgttgaaaaaaagtgcctttttgaaatcagttttctatgttgacttcattctaggtattgttttctcttttcttccctgtaatgtctccccaatccatgttttttcctagccttcaagatggtcagcaaggccagcagtccacagcccaggtcaaagtccagtcccgccccccttcccaggctgcagtgctcagtgctagtgcctccttgctggtgagaaatgggagtgtccacttagaagcatcacatgacaatgcatctgctgtaggcggtagcagtttgcacgatgaacttggtatgcaggccttatgtaatcttgatgatacaaaaactttaatgcagcagatgatgggtaacaattgcagttcttttttgagatagtttcattttggaactatgcataggagcactttttacataggatttaccctatgtgttaggaaaatgtgactttttgctttttccttttctgtttctctctactcttattctgcattttcttttggtcatgtccatttttaataggtagttaaagtgttaatatatgttcacactcaattctgtttttcccaggcatttgtaccatgtaggagaaaacgttgacttttttaaaaaaaaagtttcttactaaactttaatttctttgaatattttgaatgtgctttaggaaagggaaaagtgctttctaattgtctgccactatagaatctttctttaagatattctatatttcacactatgttcgtcatctgtagtaggttttattttaattcaaaatacagtactctaaggacatcatggctccgtactaatgtcacataataactttataaagtttatttcttgttcttgtcaatatatctataaacatataaattattgaataattaattctcagaagtgtgatatcattaaacatcagtgatacatacctactcagatatctgtcttatgcattatttaagggtgatactttatgttactttggtttctgtgtctctgtataatctagctgtcttgttctcagaatgcaggttagtaatggtttaagtaaatataatgaagaaaatctagttattcagaaataattcacttgaaagcatttactcattgtgattttgtttattcatgttataattgctttttacttataaacatgataatccagttactgtttcaactggaaggatatgaggtataagttgcccaaattaggatttaataaaattttatatgcta

SEQ ID NO: 76548 - DNA, 1050 bp, Homo sapiens
cattcactgacctttcttagatacacttggacacttttcttaagaaacacagctcagaatgcagtcacatgattttgtgggcttgtagtttgagctattccaaatttaagaagctttgcaaatgggtactcaccccctgcaagtagttgtcaggtgatttttaaacattaaattcattcatatgatcacctgaatagagaatgtgccgtgggaaaaagaaaaaagagattggtattgcaaagctgacttaagtcccttccttttaatacctgattatgtatgttgatgttttaccctactgtccaacgttccttttcaactcacatcttgctgaattacatgcagatcattgttttaaaaaaattttttttaaaggttatggtgtattttcttaagatgtagaaacttacgaaatttagtatatcatgaaggaaaaattctgagtattctaatggctttttaaaataatcatttatttgctaggtaagttctcttctacgctgtatgagactggtggctgtgatatgtcacttgtgaattttgaaccagcagcaagaagagcatccaatatctggtatgtgtgaagtcatattaggagtgtgtgtactttcatatgtttgccatatttaatgtttttaagcctagaactataaaagttaatttttttgttttttataatttaatgttgttaattgacaaataaaaatcataaatatttatggcatacaacctgatgttttgaaatatcatatacattggcttaattgagctaaaattaacatgtattatctcacatacttataatcttgtttgcggtgaggacacttaaatctactctcttagtgattttcaagtatacagtatgttgttaattgtagtcaccaggtcagatataaaagttattttgaaaacatctttatatttactctaataatttgtcatagtgcatttgtttctaaaaacttaaggtagaattttttttgctatggaaaaaagaaagtattgtttttaaaacaaaagctattctgtgttttaaaaactaaatcaaga

SEQ ID NO: 76549 - DNA, 1078 bp, Homo sapiens
tgcactttgaagcctattcttgattaattagttttctttcccctcaagagttactgattcttattttaggacttctgtttaatgatggatcacatctgtttaaatgttagacatctgtgggctgtttacttatttttttgttttgagggaccatttaaagcaataaaatcttgcagtcatttagctccacatgctgaaaaagtagaacatatagataaccatgctctttaagctcctttggtctagtttcagaattcaccctctcaaaaaattattaaattgtactgttaccctgattctgtaacaatggaaacagtaggaggagggagggatagaaatgctgttaccatgtttaatgtagttcaagagaacaattccttacactataaatgtggtaaagcctcaagttttgaaatccaaacatgactgaactgtggaaactgacttatgttgtaggttattacattatagcttaagtttattgtgtctttactgattcctggcaatatgtttattgctttctttgcattatctgatttaaacactttcacaagaaccttgtgatacagatactattgtcatatgttactgaagaggaaacgcaagtatgaagagggtaggtaacttgtccaagatctcattcagtggaagagatttgaatgtagtcactgacccagagtctatgtgcttatcacaactctaggaaaatgctattttgcattttgaagttaacatggaaaagtgaagatatgtgaatctcatctgaatgttaaaggatatatttttctttctgcttgacaaactgttccctattttttattttattttagtgacacagattctcatgtatccagttctacctcagttcgattttatccacatgatgtggtaggtttttctttatttttacaacatgataaattttcagattaaatctgaaatatgtatttacatagatagctataaaagccataaaaattgatgaagttacacaaaaattttttgaaaactatggcaaaatcactttgctgccctccagtggctctctttttctaagtcctttgataagaaacaaaag

SEQ ID NO: 76550 - DNA, 1050 bp, Homo sapiens
taatcataacatattcataaagagtaggctgggcgcagtggctcctgcctgtaatcccagcactttgagaggccgaggcgggtggatcacgaggtcaagagttcaagaccagcctggccaagatggtaaaatcccgtctctacaaaaaatagaaaaagaattagccgggcatggtggcaggtgcctgtaatcccagctgcttgggaggctgaggcagagaattgcttgaaccggggaggcagaggttgcagtgagccgagattgcaccactgtacttcagacaagactctgtctcaaaaaaaaaaaaaaaaaaaagtgtatgagagaagaaaattaaagggcttagataactgataagctaattgagtaactgttgaattatgaagatattttattttgaataaacatattaaataaatattgaagatattttaagcctttcaatgctgactttcttttagctctctctcccacagattcgattgaatagactattgaccattgatacagatttgttggagcaacaggacattgatctaagccctgacttggcagctacttacggcccaacagaagaagctgcccaaaaggttaaacactattatcgcttttggatcctaccccagctgtggattggcattaactttgacagactcacacttttggccctgtttgataggtgagattatagtgtgatattaatgatacgtgtggattttatttttaagatgaagtgtctttaattacccactgaggtttttacctggttatcatgttgggaaatgttttctggttttgtcctctggatataaaacttaaggtaatgggtttctaaacagtgactatcttaaatccattaaaaatgttttggttgcaacttcaatatcttttacaaagaaattagttttgttaatcagtgagactcatacaactgctagtcaaaagccaaagaatatgagttttgatgatctttaagttataggtaatatgatgcaaagttctatataacagttataagaggaaacttctgtttccctggttcttaacact

SEQ ID NO: 76551 - DNA, 1037 bp, Homo sapiens
actccacaattcactgtagcatgttttatttgtatataagaattcatgttatgtccacatgaaactagtttgttttcagtatgatctaaaaccttgttcaaactcagtaccaaaaagacatcttggcataccatgaacttcatatttatgtcttcccttcccttttttccatttggttaatttcttatacttaagatatacttacccataagtttttctgtccgtagaaatcgtgagatcctggaaaatgtgttagctgtcatcctggctattctcgtggcctttttgggatctattcttctcatacaaggattcttcagagatatctgggtcttccagttctgcctcgtcatagccagctgtcaatactcactgcttaaggtaccagcatctcttcttttcatgctacggaattatatttgtgttaaaaggcagaggattttgtagcaattactgaattatagtaagataattatttttaggcttacttttcttgcatgtttacataagattgtgtagagagcaaaagggggatataaaccttaaaaataattgtatgtaaattagcacttcctaaaaacaagttttttgtattaaaagaaaactgtgtttgttttgtttgttttattttgttttttggagatggagtattgctctgttgcccaggctgcagtgcaatgatgctatctggctcactgcaaccgtcgcctcccaggttcaagtgattctcctgcctcagcctcctgagtagctgggattacaggcgcatgccaccatggctggctaattttcgtatttttagtagagacggggtttcaccatgttggtcaggctggtctcaaactcctgacctcgtgatccgcctgccttggcttcccaaagtactgggattacaggcatgagccactgcgcctggcctaaaagaaaactgtatttgttaaaataagaacttgcattctttttttttttaatagtagtagttttttttattattatactttaagttctgggatacatgtgcagaatgtgcagattta

SEQ ID NO: 76552 - DNA, 2183 bp, Homo sapiens
cattaggagcaagaataaagaagtaatacctgagtctggtgttaagaccattgaataaaaactttgttattcacttcgtgactttagacaaaaatattatctgcctagcactatttattgtgaaatgggatccaattttagatgtaaattgaggttttaatagaacagaggatattctatttaaagtagttcaaaaatagacttcatgaatagtttatgatttttttccttgaatataatttttttaatcctttcactggaataatgaataatgggaatggatgagcaaaataaaacaaagaggcaagtgtggtttttgtttttgactgattactgttttgtaagaatatttttgaagtgtaatgatatatggaaacattgcttttcaactttttattttgacgtaatttcaaacttaaagttggaagggcagtacaaagaatttcagatactattcatccagatccccaagttaacatttatgatatttgcttaatccctttctagcacatgatcatttttccttctttctctctgctagctgacatgatgcccctttatctctaaatatctcagtgtgtttcttagaaacaaagatattcctttatgttagttaattcaagataattatcaaaattagaacattaacattggtacaatgctgtcttctaatatatagatcttattcaaataggttttgcccattgtcttcattggcaatagaaagtccttgattatgtttagtctcttaaatctcctttaatctggagcaattctttggaagctatctttcatgatattgaaatttttgatagatataggccagttattttatagaccatccctcaatttgagtttgtctgatgttttttctttaaaaaaatttttttttttatttttcaccctgtcttatggtgctgatgatgtttctgatttgataaggccgtgctttttaaagtaggaatactgcaaaagtgcatcatattagaaagcacatactaatttatcctgttactagtgatgttaattttgatcttctggttaagggtattgtcttcaaggtgtctgaaatttctgcagtattaacattttggccagctaattctttgcttgagggtgcggaatgctgtccaatgcattgtaggatgtttggcatcctctacctacaagatgctggtagcaccacttccccaattgtgacaacagaaatgtgtccagatattcacatatgtgcactggggagcaaaaccccctcccactttcttaagaaccattactctactgtaatgttactgtttttctcttacagataataaatacttaaaataaataaataaatacctcatagagagataccctgagattgtatatgtgtccttctccataaatttctatccgattgttttagtatctactgatgtttcttgcctgattcagttatcatttattggttgccaaatggtgatttttctcatcctgtcattccttctacatttattagttgactatttattaatactataaggaagagctttcccttcttatatatgtaggtatgtattggtgtggataaatggatgattttattcaatggactataatgttactaatagtatttattttgatgctcaaattgtccctgatttagccattgggagtccatcacgcagctttctgtgtccttttgacatatctctgtcattctttaagtactttctacctttttgtcacaacaatatgttccagggtcatcttatactttccctgttgtagccagaaaccagtcttttctctatggagcccccccaccttttttggtaggtaatggtatttataaagtaagatctagttgctagtaatcattattgctagaatctcattgcatctaggtcctcttagtggataaagctaggaagtgtatgtatgtatgtacatatatacacacgtatatacatatatattacccattcctatatctatttatatgcatattaaaaataatgagactgtgggagcccaatgtgggcagatcacttgagaccaggagtttgagaccagcctgggcaacatggtgaaactccatctctaaaaaaattaaacaggtgcagcgatgtgcgcctgtagtcccagctacttggaaggctgaggcaggaggatcacttgagctcaggaggctgaggctg

SEQ ID NO: 76553 - DNA, 1648 bp, Homo sapiens
ttatagattacagtattacctttatagatcatgaagtaataaactgaccattaaaatgcttttccagttttcacttcaggcttgaaattagaaaaaaaaaagacattaagtgattgaagactgagaagcaattaatttgtggataggaaaaaatagtcaagtctgctactttagagaaagagccaggtataatgaagcagatgtttaagaagttataaaataatgtctgcaactaaaagttctagtgaatttacatggagcctacatatacttaagaggtattcataaaagatcatctatcctgagtagattgaggtttgatacatagcattatatttggattttaaaccagtatgtgcatttagtaggtcttcatatttggtttcagagccttgttttatccttagaatggtaacaccaaaaccagaatctaaaagtattttagtaataaataagtttttaagaactatctctgttcattgagtagaatatgtggctatgaattgatacacttagaaaatctatttccatattaccctggaatagataatggtttgtagaacttgaaaataatcatatcagcatacaccatggttaaaatataccattatttagtttaaccatttaaaattttactgaaagatgagtttgcaactagagaaaatgaaagggaaagaaattactgtaactttatagttcatttctctacacgtttcacattttcaggcctcatttattttccaagcatatgcattgaaatcctctctgctgataaaatgtcaatattatggctttcattttaaatagaaactgagtttttgctatgttgctgtatatcatactagagaatttttaatgttttgaaaattttttgaaggggtatgaattaagacagaactggtttcatcaatcagcatggcttaatgggtagaagacagtttgaatatttagggactattactggtgttatattactgtaaatactatggggagggcttagtgtaggtaatttatgataatgggcttttgtcatactataatttacaaacttatgcaaggtattaggtttctgatatctcataaggaattatttctgtagatttcttttattattattaaattactactaaagaaaatctgttacccatgttttaaaaataaagtctagatatcttagccatcccctattccttattactaataactcccattggagtattagtaattatctatttcattgttgttgctattgttagcaattagagctacagtgtctaaagtatctgttattagatctaaagtatctattttgttgttgttattgttagcaattagatctacactttttttctgaaaattaacacatgggcatacagatttacttctgggggtaacacaggttctgtttacatagataaatgtttttcagtgaacacttaatacatctccagttcctgttcaggcctctgaaaacttcatttttccacattttttgttaatataagatatattcttgaagcataatatagataaaattttttcttgctacatataaatgtttattgcttccaagatgaacatattttatctcgtaacaaagactcaggatagcaaatctctgttcatgtcaaaatctttttgaaagaaa

SEQ ID NO: 76554 - DNA, 1063 bp, Homo sapiens
tagtttattacatgggcaaaggcatcaagaaagtaacacaccaaatgtcagacttttcttttgcctaatatatcatgtgttgtcttttcctactcttattattgtatctaaaatttactatgccaagatatcttattcttccaaaaggaacacagtttaccacaaacaatagcacttaaaatgtgaaagaattgatagcctcatgcatcaaaagcaaattattcctcatgtatgagtagagctttagtgccctccccccaaaaacatctgtagctttagtaccaaagacatttagtggccagattctaactcatcagaaagtaataaatctaaatttttctggaataaaatgcaattaataacgtggctaaaaacttttgttgaatttaagttcgttgtctttttccaaaatacgtacataaaaggattatgtgatatattacaaattagaagcatattattctgttaaattcatttttccgcaggattcttgggatggccagcatattccagtacttttctccattttttgtggtttattagtggcagtgtcttaccatctcagccgacaaagcagtgatccatctgtacttttgtaagtgaactcaattgttattgaattaaaagaaatttaagtaagttggtgtttttttcaaatacctttgaagatctctttttcccaatgcctttccaaagtgctttggcctaatctatattaagtttcaaaatataataattttgggttattcaaatcaggttggctgagaatattagtgttttccttcccaattattgaaactatgttttaataaaaatattttcactgtatgcttatttatggtatcctaaacattttagaatttctcatttggtaatgattaaatatactcgaatcatttggttttctatcataaacttcattgcccgtttgaattactggttttcagattatctatgtattttctgtttttttttcttcacataaagctctttagtgcaatccaagatttttccaaaaacggaagagaaaaatccagaagaccctctatctgaagtaaaagat

SEQ ID NO: 76555 - DNA, 1137 bp, Homo sapiens
ggaaatcatcattctcagtaaactatcgcaagaacaaaaaaccaaacaccgcatattctcactcataggtgggaattgaacaatgagatcacatggacacaggaaggggaacatcacactctggggactgttgtgggatgggggtagtggggagggatagcattgggagatatacctaatgctagatgacgagttaatgggtacagcacaccagcatggcacatgtatacgtatgtaactaacctgcacaatgtgcacacgtaccctaaaacttaaagtataattaaaaaaaaaaattaaaaaaacaaaaaaaaccaaatacttattttctcatgatttctctgggttatgaatctgggagtggctttgctggatgcttctagctcaggatctttcatgatgctaaaatcatctgaggttcactgtttacatgcctcagttccttctgactattggctggagacctcagttcccctccatgtggtcctcaccataggctgcctaactgtactcacaaaatggcagctggtttcccccagagcaagtggtccttgagagagaaagcccaagacaggagctgtactcttttataacctggtattggaaatgacatgccaccatttcttccatattctgttgtgcacatagactaaccctggtacattgtgagaagagaatatactcaagtacaaaagcaagaggcaaggatcatgggaagcatttcagaagctgactaccacagtccatcagtagacctccatgatcgacatcccttctatatgcaaagtgcacataccctctcctaaaaccccgaaaagtctcattccagtacagttggaagtctagaatgttattatctaaatcaggttcaggtatgggtaaggcttcttaggtgttgttccttaagtacagctcatcaaggactatgtctttcatctgtagggcatgtaattaccatgtttagtgccctgcattattttgtgggtatccatgtttccatttggtgtcatttttcctcctgcttgaaagatttcctaggacatttctcttttatttagggatgaagtctcactatgttgcccaggctggtctagaactcctgagctcaagtgatcctcctgccttggcatcccaaag

SEQ ID NO: 76556 - DNA, 1022 bp, Homo sapiens
ttgatcttattttttaaatcttagaacatgtagtctacaaattttgaatcagcatatcattttgacatttatagtactaacagcaaagttgtttttttttctggtactgattttagcaactgaaagaaaaaatattatttcttagagaacttcctaaagccaggtgatgctattttcagatagccaaagaaccatgttttaaatcttttagtttatcctagacactttccccaatgaaataatattgtagcattggaaaaaaatattattggcaatgaaagctgctcttaagtatgtgaattcaaatcataccatatttttatttattttgggtggaaagagcaatctaatgatcttcagtaatcttttttcaataagttataagcataaatgagaaaagttatggttaaaaactgaggtttcaagaattaaagttggaaactcatctaaatgttaaatcatgtctaagttgcaaatttgtaagtatctcagagctcatagaagttgacagttgattaaagtactggctttttaaaaacagtttatttgtagtttggtactaaatttgttgtaaaatttttctttctcatcacattgacaaactatacatttgatgacatgtagtcttgatttatactgccttgttagatgcagccactatgatgtggtttgagaaacttcatgtgtggcttctttttgtggagaagaatataatctatccattgattgttctcaatgaactgagcagcagtgcagagacaattgctagtccaaagaaactgaatacagagtaagtatagtagtcttctaatattgtctgactactgggggctgttataaacaatgtcttaagttgttgatcaaatattaaataattgtttccttcatgcaaggcactgtgagattaaaaatttaggtgacattttgtccttgacttaccttttttaaacatttgtttctgctgttggcatattctgtactccagacatctcattgtcaattgatattttatgagaggacat

SEQ ID NO: 76557 - DNA, 1034 bp, Homo sapiens
tagcattattttttaataaatgaaggtacaaaacattttttcataatatgattatgaaattgatagaattaaacttctgtaaaaaattttctactcccacgatttcttagaagtattttctaaataatagtaagggttagtaaccacattgatatggaaagacagacttatggtatctgcaagttttagttttacccttgtggaaaattgaactctaacatctcttcccaagattaatatatgaattttaccaaatacatattagcaaatactgatttggctcctttgaaagcagcataccaggttgtactttatgtatgtctttctgttggtgaccccttaatgactgcccagtgatataccttcttttgtattcttctggtgaacctcagttctctaattgaggtaatctaaatgtgtctgctaggtttttgcgagggtttgtttggcatctgtgctcagatgaatgtcagtgtccttaactagttttcccatagattcagccatgctgtttattcaggctgctgtctcggccttcttctctactccactgaacccctttctgggaagtgcaatattcatcacttcatatgtccgacctgtgaaattctgggagagagactataagtgagtaaagtaaaacacttgaaaaacaatttttatctttcctactgggaaaaactattgacagcattattattagaatttatggttcataatttattgtgttgaaatatttatttttgctaaaacttaataaatagtcttaaaatttgaaaagtatataaaagaagaggccagaggaaattactttttatttttctttctttccttttttttttttcatacagggtctcattctgttgcccaggctggagtgcagtggtgcgtctctgctcactgcaacctccacctcctggggggctcaagtgatcctcctgcctcagcctcctgaatagcgaggactacaggcttgagccaccacgtcggttaattttggtattttttgtagagatggagtttgactgtgttgc

SEQ ID NO: 76558 - DNA, 1099 bp, Homo sapiens
tgggtgtggtggcgggcacctgtagtcccagctgaggcatgagagttgcttgaacccaggagatagaggttgcagtgagccgagattatgccatcgcactctagcatgggcgacagagtaagactctgtctctaaataaataaataataaaataaaataaatagaattgttttgaagttgctttgttgaatttatggttgtgattttaaagtattagatgttttttcatccagtaaggcctgaggtatattattatagtattcttaaaatatatatgtagaatattgagggggaataaaatactttttagtcagactaaaaagtgttttactatttatcattataaataattggaatttatttcattgagtaatctgagttaattgaaattgtaatttaatctgaattcttttttttttgtcttgttcatgttagggtatcatttattatgttacgacctcgtctaagctagaggagtggctagctaatgagacaatgcaggaaggacttcgtctgtgtgctgatcgcaattatgtcgatgtggacccgacctttaatccaaacattgatgaagactatgaccaccgactggcaggcatatctagggagagtttctgtgtgatttacctcaactggatagagtactgctcttcccgaagagcaaaggtagagtttatttcatttataactctttgaatccaggtttttccaaagatgcaaagaatgtccctgttagttcttatgaggtcagtttttcaagaccttcctctttctgatcttctggttaagataacctaactggttcattatggttgggccaaaccagctctgccaaaacaggttaaaggaagtggcctccctctttctttcatttgcagtgtcccagtctcactgtccaggtagcacctccttcatcctgggcatgtacaggcatgcacatacattcacattccatgcattaccctccaaaatctagtccttaagaaattctacctctgtctgccacacttaaggataattaaatgtctttgtcccaaatagaaagtctagaccagtgctggctaatggactttctgcagtgttggaaatatgctgtcac

SEQ ID NO: 76559 - DNA, 1048 bp, Homo sapiens
gcagtctttgtccagggtatttatacttctaatatagtaatatattagattcggggattctaaatctaaactgaatttcctaacatatacatccaaatgaatcagaattaagaaataccacatattttaaatttttttctgtgataactacatgttttccgttaagcttttcttagtttattttaacttataggctctttgcctgttgtttattttcatggactcactattacagtggtttataaataagggtcccaggtcggacaggccctgtctcttgtgattctggttcagggttctgacattagttcctggaatctgtattttcaaaacactcccaggtgattctgatgcacacgcagatgtaagaatcagtgtcatggaagacctttgtcaaaacatgtgaacttttatctccaatcttaacagtaatttagagtcattcctctatggattgcatgccctatttaaaggagatttccgtatttcttcaattcgagatgaatggatctttgctgacatggaattgctaagaaaagtagtagtccctgggatccgtatgtccattaaacttcatcaggtaagaagatgagatttttctaattcattactggtgtttactgatccttcttcacatgatttcaatattagtccattctcacgctgctgtaaggaatacccgagactgggtaatttataaaggaaagaggtttaattgactcacagttccacaggggtggggaggcctcaggaaacttacagtcatggcggaaggggaggcaaacacatccttcttcatatggtggcaacaaggagaagtgccaagcaaaagggggagaaccccttataaagccatcagatctcatgagaactcactcgctatcatgagaacagcagcatgggggtaactgctctcatgattcaattacctcccaccagttcccttccaggacacgtggggattatgggaactataattcaagatgagatttgggtgaggacacaaccacaccatatgagcttccaagttatgtttcttaggaacctt

SEQ ID NO: 76560 - DNA, 1092 bp, Homo sapiens
cacaaatgtcataaacattctttcaaccgtaaatatttatctctcatttctataaaagatgtctatagtcttatttatcagtgctttgccaagttaaaaaactaaattgactttattttacttgatactttaaatacagagcatgaagaaagagctgtgtagatacttattatttagcaacctgctaatgacaaagggaaattggctacctcctatttaaatgtgacctacttatatttgttccccgcttttcacaactggttatcataatatcttttgtattcctcccatttctgctcttctgtttctgtgaattttattcttggccccttaacctaattcccttgtgttctggttttcaggtgaataaggaatgtgtccgaggtctttgggcagggcaacagcaggagcttgtttttctacgtaaccgtaacccagagagaggtagcatccaaaatgcaaagcaagccctgagaaacatgataaactcatcttgtgatcaacctattggctacccaatctttgtctcacccctgacaacttcttactctgacagccacgaacagcttaaagacattcttgggggtcctatcagcttgggaaatatcaggaacttcatagtgtcaacctggcacaggtgagccaagggattgtattattcagtgctggtgtattcctgaccctcttaatctaggcagtgtgcatcacctgggaagcttgtagaaaaaattacaggtgccatggtacaatatgaacccattatttctgaacttcaagaagtagaatctgagcattcttatcttcaaaatcttattagataaatctgatgtataactggttaagaaccattgctccattacttggtagaatcttggaaaattccctttatttgtttaatttttttaactttctgttgtatattaccactattagaatatttgaatatttgttctgtacaaacgggaagttaagagaaaaacataacatgcaagttgattactttgtctagtttaccattctgttccaacactagggggagcactctgtacacattgaaacttgatggcaatgcagagatactactgccttttt

SEQ ID NO: 76561 - DNA, 1106 bp, Homo sapiens
gcctggtgacagcgagactccgtctcaaaaaaaaaaaaattccatttccagctgtgatcttaatggtacaactgagttatatacagttctttattatggtgcaggacagataatagagcatatgaaagatttgaggcagtgaatatgacgggtatagttcttaagccactctttgaaaacgtaatgagtttttttgttcctaatattgattgcaccataaagactttaaaaggtgaacattagtagcatttgcagttcagaatagctggaaaaagaataaaatacccattttgaagtgatcttggaataatgcttcctactctggtatttgttcctaggcttaggaaaggttgcggagctggatgtaacagtggtggcaatattgaagattctgatactggaggtgggacttcctgcactggtaacaatgcaacaactgccaacaatccccacagcaacgtgacccagggaagcattggaaatcctgggcagggatcaggaactggactccacccacctgtcacatcttatcctccaacactaggtaatgtgaaacaaagttatatgtctaatgttagcttcttagccatagaggctggttagtatatgtgtataaagaggattacatgtggtccacttggaaattcagaaatagaatttttttttttttttgagatggagtcttgctctggctggagtgcagtgtcacagtctcggctcactgcaagctccgcctcccgggttcatgccattcttctgcctcagcctcctgagtagctgggactaaggcccctgccaccacgcccggctatttttttgcatttttagtagagacagggtttcaccatgttagccaggatgttctccatctcctgacctcatgatctgcccgtctcggcctcccaaagtgctgggattacaggcgtgagccaccacacccagcccagaaatataattttttttattccaagttgtacattattccatttgttcatattattttatatatataaatatatattttatatatttgtatatatacttttaaaacttgataattcaacataaacattttaatatattaaggattctttgaaaatataatt

SEQ ID NO: 76562 - DNA, 2961 bp, Homo sapiens
aggaatttaaaaagtaattcctctctgtgaaaagcattttgtttgagattacataatttttcatcatcaagaaaaaaatgaattggaaatgtttttatttaccatgtagattgtggatcccagtcaaattctggaagggatcaacctgtctaaaaggaaagagctacagtggcctgatgaaggaatccggttaaaagctgggagaaatagctggaaagactggagtccgcaggagggcatggaaggccatgtaagttcttttacaagctggcggtctggggctctgccttttttgaagtccgcctcacttggatgcatggttttagctgatttatacttaaacgtataattttcagacaaaattgctactactaatcctaggtaggggtaagagtttgtgagtatattccaggtctccagtgctaacttcttgttttattctgaatcattaggtgattcaccgatgggtgccttgcagcagagatccaggtaccagatcccacatcgacaaggcagtgcttctggtccagattgatgataaatatgtgactgtaattgaaactggggtactagaacttggggctgaagtgtgagccagtgtttattataaagacatttctttttccctctcaattccaaggcattggaaaaagagaggaacaagcagaagatgcctgcaggtatcactttgatcctatgtgggagcgactgaaaatagaatgagcttggttaagcacctctcctttgcccttcaccctgactcctgtcactgtctccatccccaaataaagctgaaatatttttttaagttagctgccgagaaaacattttgcatgaaggataaagttctgttaaaatacatccttaaaaaaagtttttcctatgcattgcctatgctttaaatcaacaaactcttcatttctaaactatgatctcatatttttctaatttctttgccaaaaataattgccatgttttgtcatagaacatgaaattcatttaccttgatttttaagaacagaccagtgtagaaatgttccttttgacttatagcagtataaaagtttaatgtacagtgaaagagactatgaacagacatagatttatcttattccttgagcgctaaaaactttaataaaaaaaactgcactaattttttacagcaatgcactaaagtctgagatttctcagaacatttatttatatataaaaataaaataccattatttaaattgcctttgggattagccccttccctttccttataaacacaggtagcaggaactgtgctgctcatttttctgttagtagtgtgtacttcatgccaggacattgggtattttctttaaagtgaatatagaatctcaagatatacgtagcttcatcattgacatttcccagagccaatagtcagcggatcggtcttgtgaacaccactgccagctcctgtgtctacatctcagaggagcccatgtgctctgcttctctccaccagagcaagctctgctgggcgtgcttctgggaagaaaacaattttctttaagaagaagatgaatgtccaggaatttaaagaaaggatcgattgccttttatttatgagtttctagctcttgaagttattcacatgcagttcagttagtcaagtaaaattttttttcaaataaaagtatccaagtggtgcagttattattatatccctctttaataattttgctttttatttttcccctcttctttttctgttacttgaattttatttcctgtaatttatagtgtgtagctgtaaattgaaatatttataactgtgaaattgacttaattcatatgttgtctcataactttattttttttaaatgcatattcagggaaatatattactcatatttacaattgggcgatataggaacttcaatttagatttaatttgcaactcttagcattttttaaatccttgataaaattttcccttttggtgtgaaactccaaagaaaattgtacatctcctctgagcatttaggagcagccatctttctaccccttgtgaataaatcattgaaagaaacaggtaaaattaattttaatgatacattttgtttcacccagtatagtcaaagtattactatttcatcatatgtcactagccatatttcaagtactcaatagctacatgtacctagtggctactgtattagacagtacagatttaaagtatcttttgttgaggtgacagaagagagaagctgtttttcctaccaattctgatgtagatctcacattatagcataacattacagtagaaggaatgaaaactaagaaagtaaatagtgaacatacagaacttactgcatttccactttaaaacctatttattttccctttttctaattttaaacttttgtggtcattcagaacctaatgtgccttgtgttgacatttccatagacttcacactttacaaaatttactgtttaaaaatacttgtcaaatgatttactgaacctttatacaaaagtaccctttctaaattgaccatttaaaaatgtatttttgtgataccgtcattatgttctgcatttgcctcattttggcagatctacagtatgccattaaagtttagtgttgtttttggttttggagggtttttttctgaaactgaatttataatctatttctctgtatacgtatatttttaaaatcttctgaaaggaactatgttccctgctgcttcttccctttctgaagtgaatatgatcttttcatggtcattgcctagataaaagtagagccttttcaatcttagatggaagataattcattttcccacacagaaaaaaaatctgacctttacatgatttaatctgaagggctagaattttttaatttctagcccctcctccaaaaaaattttaaacacatcacatactctgaaaagtcagatttcaaatgcaagactagacttta

SEQ ID NO: 76563 - DNA, 1057 bp, Homo sapiens
atgattgaaaactttgctttttcttgtttaattcttccgccaccccctcttttgagagaaaggtaatcgtggaatgagttataaattattgcctttttttcctttatttctttcattcagtggcaaaaaacattttataactcctaagtttttggttaatcttccaacttataccttggtgtgaactctctttttacaccattttcaacactggataaaactttaatgttgactttttgctaaagaactttaatttttccaagaatctagattaacataagatgttgatatttaaggaacttggaagagtaagtggtgaggctgtatgtatattttttaagagattaccttttaggaaattagtgaacaaacttaaccagtgttctgccttctttgactttgttactggaggatgataatctatttctattagattcgaagtattttggaaaatatttcaagtatatctgaactacttataattcttaaaacagaagtagtcagacaatatttgtatcctaagtgagatatggaaaattactctgtatactaaatgtcaggcaatgaaaatgtaagtttttgtgtagaaaacccattaagaagatgtgtttttctttctgaattagtttatttttccatcacataccaaaatataaaaatcagcctcacatttttcagcaagtttagcttatagccttgataaattcctctgtgcttctgagcagcatccttctgcctctgcttagcagctctgcatttggtggattgctgttgtgagtcattcatccagcactgggccttttaagctgaagattcacccagtgtctaaagttgtccttttcttatagctagctttcaagcatctttcctcctaaataaatatgtgacttgagaaaaaggtaataatgattttgtcagaattctttgaatttatatttactagctacttaaccataaactgctgtccagattgttaatttcatttatatttattttaattaatttgtcatgaatatggacaaagccttttctggggtgtgtgtgtgtgtgtatgttt

SEQ ID NO: 76564 - DNA, 1610 bp, Homo sapiens
gtcattattcattcgtattctttttctgtgtaatgtaatcatataaagttactttggacagagacccagttaattttctcttttgataggatacatggtttagataaggtataaagtgtccctttttattctagaggcttttcctttaattcagagattagtggagataataacgtcagtcaaggctaatgtggtacatggaacttgctaatggaggttggacattctgtttcagtcttacatggatattgtttcattggtgttgaggaagaaaaaaattagatactaccatgcattgggacagcataattctaatattacattgaatatggctttttaaaaataagtattaaaaagccaatcgttttctccatttatctatcttttttgtttgtttttaatttggttgattgatatgcacccaggccgtcttatttttacttgttaaatgtctgtctaggaagaactgtgattggaaaggaattaattattatacaaataaatctggtaggatatgagtggagtaagtttgcttgaaacagaagtatattttctactttgaatcacctcaccagagtcatctgtcaagaattatgtataacaatttatctttattgcctacatacaacatactttttctgaattaagataacttctatttgtgagttgaacttcattatctgccattttgtggaatcaaccttacattctttggtggaactagagctgattgtcaccacaaggttatatgacaactctgttctaagacttatacctattatatagggttataccttttttcttatgcctcagctctgtacctgacaatttatgattcagtggagccaagctagaaggaacaaaggtcatctaacactgtgatggggatgaattcctgagttttacctgcacaatgaggtggtgccccggaattcacaacagagtagtgatagagcataagatggctgctccagatgactcttgggtttagtgtacttgtgattgaacaagattttttatctatgaagcttgattctacaaccaaaataatagaaatgggggggggggggggaatcatgtctgcttatgctttttaaaagcttatagtttaagtaaaagtaaaatgtaaaaactgattaaacctatacaagtctggcaatgagctctgcatgaggaaatggaaggaggaatattgaaaatgattctaggaaagtgaacgtaagaaaggaaaatgggttttccttttctgatcatgggctctggaaagtattcatggcctttaccagcattcagtataaaccagagataaggacatatgtacttacgtgtgtctgtgagtgtgtgtgtgtctgagtgttattctgaacagcttgtaaatattgtagttgtttaaaatggaaaataaaagctgagttcttttggcaaatatattgcatcaaaaatacagtattgacagtggataaaacactgaggaaataaattttttttcattttgccttctgtccattttttgtcaaactgagaaaaattagagtacactatattaagttctgtatggcatgttcacacttggttctgaaatcattttaaacaagctttggcctgtaaac

SEQ ID NO: 76565 - DNA, 1021 bp, Homo sapiens
agttcctgcttctgctcctcgagtttgaaattgcaattctggtacagtgaacttttaaaatctgaagtatcagtcagtgatagttgtgatttcattggaggagtctatggcaaggttgacttcaactccaggtaataattgcaaagcacctctctgatactttgtactgagattcatttaactcttcttttgtctctgtccttacactagtattttcaggcttctgcatttgctttgcttttgctttgaagtatgtgtgtaattttggtatagtgcccccatcttcattgtttaggaacttttaaaaaacactttctagtgagtttattgaagtcatagattgaagattgcttgagattagcagttttgtagacttcggggggatcttggttgagttgtgatgtatatatgttctatcttaagttgcaatctgaatttttagataaatgactgtttttctttttttaaaaatctgtttgagctgtgaaatgggagcatgaggagagctgaaatggtatgagagtggaatttgatggaaagtttgtcatgattaataatgtgactatgtgcctcttatcagtccttaccgttgtattatcattgttattggtccgtatcagtgcacaaatgaagtatgaatatcctgaagattttttgttgacatctcagatttgagccttttggttcactgaccatattagattttctctatggaagacaaatagactcattcccataataaagaactagagcgctgatagagcacacttttttttttcccctttggatcaaatcatggaagttcaaatctgaaaataaattcagaaatttctttttttccccatagcatccctatattcctaaccttttgagtggtgagtcaagcaatatttattgaatgctgctatctggcaggtgcacttttggtttctgtgattacagtgatgagcaagagtgtacctggccacatggaacttgtagtccagtgggaccatttgtagtaatattttctggcatggag

SEQ ID NO: 76566 - DNA, 1028 bp, Homo sapiens
agcagagaagaaacttccctgctggttgggtgaatgcccttgaggtgagggggtttccttcttccgggagagataagcattgtggtattctgccattgctcacacagaagtttgggtcttattctacagacagacgcagtaaaataagggtgttccactatcccttgagactgacaatctgaccttctatctgctgcacttctacttttttggtatgggaaatcaattggcctcattgaatttttgcttttagtttttttctatgcctagctaatcaaaaacaaaaacaaaacccacatgctttgatgacaccttgctttcaaaggttatatttaagttaattattcttaaatgatagctcatttatttttattcagtggactgttgatgagctctggagtgagtcttagaagcatgggaaagatttgtggcttctgggtcttttaaacatggatgatttgcataagggacagagcaacacagtgatttggtttgtgatcatgagggtacaaaaaaccatcagggcagatcttttaatggtaggtaatgttcaccagtcaacaaccattttctccttttattctggcctggagagagtaagataaccccatttgcaaatagaacagagtgttttcttaaaggcatagagagatgacaccaaaatgacatggagggatgtcaggagctgctttagctggcccgtagtaagtagtagtgcattggtgggtgtgccacaaagtcaggcgaagccatttctctttgcctctggagtctgggatgagaaatttcaacctgtagatttccaatttgttgcttgtcatgttgcactaagttctccctctaattaggatttagtatgcctaagttgaaattgcgggaagcaggcaattacataatgttagatttccctttttccaattcaggaaaggcaggagaatgtgtgcttgttatgaatgccagcttggggagggagaattgctggttcacacaaactcgggggtcactcaaaggcaacttgagcagaactg

SEQ ID NO: 76567 - DNA, 1076 bp, Homo sapiens
attgttctgaaggccattttcaaggtggtggttaaaagtgctgattttctgtggtttgggtgggatgtgtgtttggggaagcagtgagtgcttgagtagagaatcacatgaaccttgaggcttttctcctgggggagaatgctagatattgaggttgatgggtgatttgaagaagctcagtaggtgattctgttatgcttctcccccacccagttgaaaacacagtggcttttatataatttttagatctatgcttgacaataaggtaaataagtagtggacttaaaccagaatgcagccaactgaggattgtagaaacttcattttggatgggtaaaaaggagagcctctggatcttttgtagaggcccattgattcaaaaagataacttggaataactcctcaaatgactgccaacagtttaaagggtcagactgcttagactcctgcagtggagatgggacatgtacatgcaatttgataattgtatgttggcacttcttttaaaaaaattgtggtaaaaacagaaaaagttgaccatttcaaccatttttaagtatatagttcagtagtgttaagtatattcaccttgtcatgaaacagatttccaggactttttcatcttgcgaatctgaaactctgtaagcattaaacattggcccccatttccacctcccacagactctggcaaccatcattctttctgtttctatgaatctggctactttaggtaacctcatataagtggaatcatgtagtatttgtctgtgtctgaattatttgacttagcataaaatcctcaaggttcatcaatgtttgtagcatgtgacaggatttctatctttttaaaggtttaatagtattccgtcgtatgggtataccacattttgtttatccatttatctgtggatagatatttggcagttgtgattgttgctatgaacgtgggtgtgcagatatctcttcaagatcctgcttttaattattttgtgtatatacccagaagcgggattgctggatcatatgatagttttatttttaattttttgaggaacctccatactgtttttcgtagt

SEQ ID NO: 76568 - DNA, 1095 bp, Homo sapiens
gtcaactgcattttggtttccaaggagatatatcttggcaaaatttattttatcaagtgcttttctaagaaagagtaccaaaggaaactggctgtaatgccttttggttaagattttcctgaggacccagatagggtttttaaatcttggtttcttctactcccacacccaccccaaaagaatctggaaagctagttatgactagtcctgggtttgatattgattgctggagctttgaagagtcatataacccttctgcatcttcattcattcattcatttcttcattcacttaataagtcttcattgtttacctgttatgtatcaaataatccttgtaaaagggagaaaattgagggttgaattcagttttctttaagacctactgtaaaaattctataaatttattactatgatttagtaagatttaggcctttttatagatagtagaaatatttttgaaagaactgaagaaagaaatttagagtatttgtttttaactctaaaatattttagtgagaaaattctataatggtggataattttagtgttagttcattctgagctgaaaccaatcaacatttaaactcagctcagagtttttctttttaattttggtagtagacagttctgaatctaacctttctgttgttacaggtagcaccctggaaacttaatgcctgtttcagatgattggtataatgtgtgtgtaggagatttggaaatgcttgttacctcttctaggtgcttggttctgaatcttttagactatggtcatcttttatgtgtagtcgtcttgggataatggtaacatcatgtcactgaatgcagaacagtcacactgaagatctgagtgccattactgtgataattaagcaggtatttgctcatgctgccaaaaaagtaatattcagagttcctagtgtgagatttcatggctttataaagtgatattttcattttaacttgttggaaattcaacatagtattgactatacatgaaaagattcagttatgcaaagtaaaatgtaagaatttcctcccatgtcgattgttgcttttcgtaaatctggtttcagtgttaccaaagaacagt

SEQ ID NO: 76569 - DNA, 2152 bp, Homo sapiens
gaaatagggggatgttagaggtttctagcaatgctctataggtgagatatgatagcagctgtggaggtgatgagaagtgagtggtttctggatatatctcaaatggggctaaaatgattcactggtgggtgagatgatgtggagtgtgacaaagagtatactcaaggatgacaccgaggtgtttagcctgagcagctggaataatggggatgccatttattgaaatggagatgcctagaggagcaagtttgggtgtggtattaagagttgatctgtgcatgttgggtatgagatgcaagttgacttgccaagtggagcagtcaggtaggcagctgggcaggtctgtcagtcttcatgagctttagttttctcatctgtgaaatggggagagtgtctgcccttctcagaattcttgagatcaaatgagaaaaaaaaagttaaaacttgtaaagctgtgtcttacattatttctggaaagtagactggctaccatcttgtgtcctttgtggtctcctttgcactatttaactcataggccacattgtattgtggaaagttagcatatgccctccaaagcctggtttctttcccagtagatgtgaaagctttctctttgatccctcctgcaattcctgggcagcttctgggagaacttggtatgtatgtatttcagttatctccagggtgtcagagggcttcattttgtgtagaaccatacttgagagtgtggtaccagacttgcctcttaataaacatagctttgggccaaagtaatttatttaggtgggagggtattgtagtagaaaaatggctcttatctttctcaaattctttattttaggctttttccataacttgaatccattaacagatagggtctaataggtcagatgattttgggagaccgctcttcatgtttcttgattcagaaaacttatatattctagtttttttgactgctttactttttttcaggcaggtgaaatacattaagtatgtatttgaatctattgaattaaaatttgcttaggatccaccatgttgaaagcatcagtcttgtatttttatcagtgtcattttgaatttattaaatgtctgtcattagaggtagtagtaaatagttatatatttgaaatgtagtacttttataatctatactttcctaccagttgattgttcctttaagaatgtcttggctgggcgtggtggctcacgcctgtaatcccaagcgctttgggaggctgaggcgggcggatcacgagctcaggagatcaagaccatcctggctagcacggagaaaccccgtctctaccaaaaatacaaaaaattagccgggcgtggtagtgggcgcctgtagttccagctacttggcaggctgaggtaggagaatggagtgtgaacccaggaggcggagcttgcagtgagccaagatcgtgccactgcactctaccctgggcgacagagtgagactgtgtctcaaaagaaaaaaaaatgtctttagccaacagatgtggtggttttgggttcttctaatccacaagcagttttgaacagaaacactatcactcttcactgctgtcctcgtttgattatcagtcagcaaggttccactgggcatcagcagtgtgcgcccattgcaggtcctctgatttagaaaggtcctgacacatgcagtgaatataacttgatgactgccatctaagtaagtatggtaaccgttggaataccatctaagtaagcattctaagtgttcagtggaaagagaatggtaatcgctttaataatgaaggcctcagggaggtaggaaccatgtttttcaggagatatcatgggggcagaagttattttggatagttttcttatatgttttgagcaaaaggacctctctctacatgagggtttttgttaggtcttcagatttataaaataggtttacccatccgcttaataattgttaagttacatagtcttttgcttttcattgaattggcttactgtacattattttgtttcagcctctaagaaactgaaccataggtacccagtatattacttgacataattgttcataattgttgaagagaaacctcaaaccttgtctttcctttttaagtacatattagaaaattttggtcaattgtaacaactaatt

SEQ ID NO: 76570 - DNA, 1636 bp, Homo sapiens
cttatcagtatcttgtctcccttttccctctgggcaccagcccctgaacactagttttatccctgtctttctcatccttcaagacccaccttcttcattgatgtcttgctggttaccataacacaccctgatttctcccttctctgacatgttgttgtattgtgttgcgcacttaaagagcctagcacttaatgattaatgcatagttcatcaagggtgtttagcctggagaaaactcagaggggcatcatcctttgtcgcaggagtcaaaagtccatcaagtggaaggaggagaggttaccttttgtcttctcaggcctcacaggacagaaccaatgagtagagtaaatacagatatttgagtaaacattagaaaggactttgctggtccaggtgcttgcagttgtgataggctgtgtcccatcgttggaggccctaatgcataaggctggatcatttctggacagggtcattgtaaagggcgttcacatgattcacatgggctcagttacactagtgattatctgtctcgagtgtcacagtcatccgggggcatttaaatacacagattctcagcctccaccttgagagtttaggttgagcagtctgtgaagccaggcttggaaagttttgaattaggtggctcttttagtcctgagatcctatgaggctcatttggttactagatttttatttattttatttttatttattattattattttttgagacagagtctcactttgttgcctaggctggagtgcaatggtgtgatctcggctcactgcaacctccgcctcctgggttcaagcaattctccttcctcagcttcccgagtagctaggattacaggtgtgcaccaccacacccggcttctttttgtatttttagcagagatggcgtttcaccatgttggccaggctggtcttgaactcccaacctcaagtgatctgcctgccttggcctcccaaagtgctgggattacaggtgtgagccactgtgcatggccagattaccagatatttattgagtgcctgtattatatggcaatataaagtttttggtttttgccttcatggagcatagagtcaagggagtaatgcagacagagagctgaaaccatgtgatttctcctcaggtaggtatagattctctgaggatagagaccatttctctttttttcatggttctttatttgccccagaggaatgggcactttgggattccttcttgactggcaagatgattaacccgatgtttactgacaagccctccttgtggtagggcttagtactatgttctttatctaagtgttttctttacttttctttctttcttttttttttttttgggacaaagtctcgctctgtaggccaggctggagtgcagtggcatgatctcggctcaccgcaacctccgcctcctgggttcaagtgattctcctgcctcagcctcccgagtagctgggattacaggcactcaccacttcacccggctaattttttgtatttttagtagagacagggtttcaccatgttggccaggctggtcttaaactccggacctcaggtaatccgcctgcctcagcctgtaaaagtgctgggattataggcgtgagccaccgtgccaggcctat

SEQ ID NO: 76571 - DNA, 1037 bp, Homo sapiens
atatacctagtagtgggattgctgggttgaatgtagctctgttttaagctctttgagaaatctccaaactgctttccacagtggctgaactaatatacattcccaccaacagtgtataagagtcccctagaaatatacagatttttaaagagatgttgatggaagtgaagttaattgaaaataccgaaaatacaagtgtaagttcagtcttggcttttccaagtattcatctaggaagcatgttcagttgatcagacagaaatgaaattgctggtaaagttcttgtagttaacttagattatgatgggaaaggagtactttttttatacctgaacttttctattgagttttggactgtgtatgttttttgaatccagtatacccactttaaaccttacgtacagctcatttctccaaaccaaatatttgagatttctctttcatgtttataaatcctcaagatttttgctttggtttattagataaggatttttggtggtataataactaggttgggtggttttatcttaatctctcgtttgctttaatatttagttttatttaatctcctaagaacgaagattaattttaaaaaggattgttaaactttcgtggccaaagaaggccacgatgtgccttctaaatggcagagagctccaaaattatttaatgaattccactcctggtgcactcatttatagcaagatgtgcaaggaccttagcctatttatcatcctgttcttggtttaccattgcaacaataaatcaccttgattggttcaccttgacttcacgttacagacttttcatgttgacctgcttaagagtgtttgaaagctaccttttaaataatgtcctataaccacaataatccaacagtattgaggacatgccaccctcaaaccttggtccacccaccatcaatccacaaagtccgtttctaaatattacctaatattcatcatccactcagcaaatactttttgagctgtttcatgtcaggcgctggctgtggatgagctatgtatttcgtagat

SEQ ID NO: 76572 - DNA, 1329 bp, Homo sapiens
ccagggcccgggggtcactaacattagtgagacttgtcttgaatcactgtgccgagacaatgcatacttgtgctttggcagagcattgagatgcactgaatcattatcagtgtcattaagggccttcagaaacgtgtaagcgatctttataaagttttgcctttgagtattacctgaaaagtaccttgtgtagtttgacagtattagtcaaagatatcaaatgtcctttgtaagattctgttgccactttaaggaccagtattattaaccgctgattactttttccgtctttgccaagtaattgtataggacttaatctttataccaagaagagaattttaacatgcataatcacttctcagtgcttccagtctgcttttagtattagataatagtgtcctattttagttgcctgatgtgtctgtggttttaacgtgattatcttaccctgagggatggaggaaatcagtgaaaagttcactgctgctttgtgaattaagttatgccttggcacgaagtactgatcattttggcattcaaatacggcattagatcaccttgcctgcagttggggaatgttctgaaagtgctacctaacactgcaggattctccataaacttgagctggtatagaaaatgatgtttattgtatcctcttctcaaatatcttgccaagttactgtcatcagactctttattgatagaaaattagttaggcaaaaaccattttcttctccttgcatggcagaggtgatgaaatttatgagaaagtacatataagggaaggttcgaagtgttgattgtgaatataagccctggcttgaaacaaagaattcttggcttgtatggtggaatgttttgtgtgttgttttcttttcaatctcagctcttgtatgtggaaataatgaaatgaatatttgctatgagtgttggttggggttttttgttacagatactaagagttattctagtagtgtaagcagcaagtgatttattaagggtgatagctagtttagcagattgggcaggctgacaaaagagactgtactctgagtttctgggaatggttgccagttctgcactgtggaacaagcctgctgaggagctgctgctactgataaagtcagggtgctgcaaaccaggaacccaagcaagactcaccccccttcttccactttccctacataacaccgttctgaaggagccccatgtggtatgtctggttggtggaacctaattaacatgtctgcttgtatacccccaatttgcttatttgctttctttttttaaattctatattgggaagtgaggtttacacagtaaggaagt

SEQ ID NO: 76573 - DNA, 1090 bp, Homo sapiens
tgttgttgttgttgagacacagttttactctgtcacccacgctgcagtgcagtggtgccatcttggctcactgcaacctctgcctcctgggctcaagcaattcttgtgcctcagccttccaagtagctgggattacaggtgcacaccaccatgcccagctaatttttttttgtattattagtagagacgaggttttgttacattggccaggttggtctcgaactcctgacctcaagtgagtggtccaccttggcctcccaaagtactgggccataagccagtgtgcctggcctctattttttgtatttttgtagagacgggttttgccatgttgcccaggctggtcttgaactactgaactcaaaatgatctacctgcctggacctcccaaagtgctgggattacaggcatgagccactgtgcccggccaacactggtgctcttttatgtttcaaatgaatagtgggacatttatttttgaattttgaggaaaatgaatcacagaagtaagaattttgttcaaaataacacttggggtaaaaacacaccaagcatacctaattgaagttgtaagtttcacttggtaaaataagctgcaaaaatggaggggatttacacacagctctcttctattttagtcctctgggttgtttataaatttgctcatacataactcttttgctaaagcatttgccattacgtgtatagtcggtacaagttaagaattactaggaaacttcagtctggctcacttcatcatctccttcatgtctttgctcagacactgcctttgtagtgagtcttaccctgaccccgtcctgtttaagactgagcccacctgccctccattcattcctgaatccctttttcttaacagcctgtcctttttctttgcaatagcactgtattagtcaattcttgcactagtataaataaatacctgagactgggtaatttataaagaaagagatttaattgattcacggttccacaggctgtacaggaagcatgacagcttctggggaggcctcaggaaacttttagtcatggcagagggaagcaggcacgtcttgcatggctggagcaggag

SEQ ID NO: 76574 - DNA, 1070 bp, Homo sapiens
gtgaataagtctcatgagatctgatggttttataaagggcagttcccctgcacacgctctcttgcctgccgccatgtaagatgtcactttgctcttccttcaccttccgccatgattgtgtggtctccccagccatgtggaactgtgaatccactaaacctctttttctttataaattacccagtctcgggtatgtcattattagcagcatgagaacagactaatacaccttatatgtacatctcctccatataatttgtctattatggtttctatttatggtgtgtcatcttcttcagtagagcatatgaaggcagggacttttgtctgtttatatatccccaggatgaaaaataaaaagtgcctgccacatagtagataataaatgtgttgaatgaatgaacttggcaaaagcagctgctttttgggattcctactggtaaaatgacagattctcagtcctactggttgtttttttaattgacttaattgaggatggcaaaatcatcagttggtatataaagaaagtaagtgcatgagttgtgttgtatacagttttctggaacctccttgcttgtttggcaataaacagggaactcagattcagatgaagagtcatgagattatgcagatattatcaatggaactggttctttagatcttaaaatcgagagtactaaatgataaaaatgcatacagagattctcagatacagacttggacatgtagctgatttttaacataagtggtttaaaaggtttttgttgtcaacattgtggcccaaaaagttgagtttcagggtatgagggtactgtggtgatggaggatggatgaggaaggaagtgaaggcatcaagatctcccatcttgtgagagttgaacagtgcttcggggtcatctagatgtgagagtacatttctactaatctaaactttttacaaaatgctaaaacatgagacaaagcgataacatttaatgaagataaagcttataatgttctaaaggtttcagataagctgatggtagtcttctattgagttctagggcgtaaggtagtttatgaatggttat

SEQ ID NO: 76575 - DNA, 1109 bp, Homo sapiens
ttggtcagtatatactgggtgattgcctgacagaagagaatgagtatgctggctcaccttcctgtgtagacttgtgcactcagaattagtcagcttccaggaagcaattgggtggtaatgacttttagttgctatcagtatgcatagattcaaataaaaccttgggcattctgctctgaacaatacatttaaacaaaattctcaatttctttttttctcccgtatccagattaatttacttgaatagactcagaaacaacattatactttattgccatctacaaggagctgttttttgagatgacattcctcttagaggaatttacttctttttccaaaatttacaattcgctatttctgtctgtgttctacatttacgttttcagtacgtagaatttaaatattcatgtacattctgtcctagtgactaaggagcattatgtaaggaatttttcttcctctttcagtatattgacatcacattccttggcctagtattcattttgtgtttgtatttcagtgtaatcctaacaagtccattcaagcagtagttgaaccgaggttaagtggtattatggttgtttggcaagttatagccataaacacttacttttaaacacagaatggcctggggtgtctgtaatattcagttgcataatcacagattatgctttacaaacacaggaataagtacctgggtcacataaatcttcagtgagaaattgctccagaggatggagcctacatctgtagagttcccttgagtgttttcttaggtatattaacatttttcatttaattgaaatgtttctgattggatggaactgtggatagtattttagaatttccagataatctcctaacaaacatctaaaggaatgggttgaaatgttaccagtgttgggctgggtgcagtggcttatgcctgtaatcccagcactttgggaggccgatgcaggcggatcatgaggtcaggagatcgagaccatcctggctaacacggtgaaaccccatgtctactaaaaatacaaaaaattagccaggcatggtggcacgtgcctgtagtcccggctactcgggaggctgaggcaggagaatcacttgaaccc

SEQ ID NO: 76576 - DNA, 1121 bp, Homo sapiens
gggaggctgaggtgggagaattgcttgaacccaggaggctgaggcaggaaaatcgcttgaacccgggaggcagaggttgcagtgagctgagatcacgtcactggactccaccttgggtgacagagtgagactctgtctccaaaaaaaaaaaaaaaaagttaccagtatttaaaaatgtatatacttttcaaaattttatattttttctcctctcttcttccttcctgatacctttgtgatttgaaagctatttaaaatgaaaccctggttgggctcagtggctcatgcctgtaattctagcactttgggaggctgaggcaggaggattgcttgaggccaggagttcaagaccagcctgggtaacataatgaaatgtccctacaaaaagttaagaaaaaatccttagactcagttcaccctctgcacactggctggagtggagtttagagtcattctgtttgaaatgactggtaaagtgtccattcagggcagctctgctatgaatgcaaggaagtggtctttggagctcttgtgtagtatttgaaagtacttcgtgttactgcagacagccaaagaactgaaatagaatgcctgtgatcatgtttagaagatcccatgggcatattgtatattctttagaatgatgtcagtatttttgacaaaatttttttacttaactgccatttgcagtatttatcaggaaaccggagatatttgatataggactgtttttgtagtattttactaaatgcttttattgaacgattcattcttcaatttatcagtaagagttaattttttgtaattatttatatactcttatatgttttattccaactaattttgtcggtaaacttatttggagaaatcgtattcagttaaaagtattttcttgatagagccttcaaggttgcacactatagatttttatttatagtatttattattttttataaatctatagttttattaagacagaaactgacagtgtggtatgaagtttacatttaaacaaagttttcacagaaatctaaagtatattatttttaatttttaattttagtaaagtggtcatgcctggtttaaattgtaagtaaatagtaatacaaggcttggaaaga

SEQ ID NO: 76577 - DNA, 1148 bp, Homo sapiens
tttttgagatggagtctggcactgtcgcctgggctggagtccagtggcgtgatcttggctcactgcaacctccgcctcccgggttcaagtgattctcctgcctcagccttccgagtagctgggattacaggtgcccaccacggtgcccggctaattttttgtattttcagtagagacggggtttcactgtgttagccaggatggtctcaatctcctgacctcgtgatccgccctccttgtcctcccaaagtgctgggattacaggcatgagccaccatgcctggccccaatatgacttatttaatgagtttggaatccccctcaccccgcccttcatattcgtatatttgaaagaagctagattatagagggaaagataaatttataatgattttgctaattttgtgataatggtgatgggtatattaaaaatagtttaaaaaatggaaaatagagttatataactgaatgtttgtatttgttgacataaagtatagacagctttagcacttgaaaaatcgggtggattcttgttttagaagctgttccagtgaattccctttccttatgatctttttgtcctagaaatattcaaaataatctttatcataaagtaacattattattgaattgaacagacttactttggtcctttgttggcaactgcattgtggtgattttctgtatttctgatagactgtgtgtgctggtcaggttgttaattcttggtgccctcttctctgtgaatatatttctggtatgataaccttactatctttctatgcctaattcctttttgaatccatgatacccattgtgatattatgaaaataactgcatttacagattttagagatggggtagtactgtctgagttctgctttatcctattttctctttttttgtttaaatttttgaggttctttttaaaagtcatcagtactgcatagtaaatgaagaatgtctttgaattccttgagtgtgcttaaatgtgagaatgtttctacttgtaagaggaagccaatccaagttaacatttttttctgctaattaaagtttagaattttaatcaagtaatacttagcaataattatgctgtctagttagaatagtgttagaggacagtggtaatttctggattaggtgct

SEQ ID NO: 76578 - DNA, 1178 bp, Homo sapiens
tgtggtttgaatttaaggtaagtttctaacacatggaatatgaagttcaaatactcaacatgccttttttggtggtaaactgctattgaaatatgggcccatttggtctaaattaaactcattctttggatattctctaaaatcttaaaaccgccagtaatctcacatttaactggcatgtcttctgtagtcagcctgacccgcgtttccttttgactgtctccttcagatcggtagggactttcagcattgctgtaatggacttgtgttgtttaattcagctttttgctctttatctggaagcactctggctgtgatgtggggaatgaaaggtattgaggagagtcagggttaatcggacttgtggagaggacagcgataaaggactcttgtaataaaggaggatgttagaatccaggagagggtgtcattgttaagacacatctttcaacagttggaaaccttttaaaatatttttaaggcacaacccagagtactaaaaaaggatgccttgaaactaccgatgccccagattaaaagctttctccctcagaagttctgattaaaattggtcgtgctctcagaagtgcccaacagggtagagacagtcttcctcaacatggtcaaggtcataactcacaattttactgactctgattattctggggaccataggccttgtctttggtggagtgaggactaaaggaaagtaggtaggtgtgggtatggcctccatcccagagtcttctctgcaacagttgctggtttttagtttttgctgctgattactgaaaaatttagtgctacagatgttaaaacaaaagctcctcgaggatagggacttggttttgttccctaataaaacctctattgaatagctctatccaatagatgtatgctgtgccttcattatatttaaatatttctagttgcattaagacaaagtaaaaagaaaagtgaatttaattttaataatatattttatttcatctgatttatgtgaaatattatctcaacatataatacatataaaaaattatagagatgctttactttcttttgtacattcttttttttttttttttttttgaaacaagtcttgctctgttgcctgggctggagtgcagtggcgcaatctcggctcactgcaacttctgactccctggttcaagtgattc

SEQ ID NO: 76579 - DNA, 1096 bp, Homo sapiens
cactctgcagagcaaggtgtgttgttaactgagatatcagtgcacagcacatacttcatacaaggtgttcaaatatttgaatttgtgagaaatgactctggtgtgcagaaaatggcatttattgagaaggcctaaaatatgatttttaattttccctaagtcagtagatactgcaaaatactttgttcattattgttcattttaggataatgtaccacaagtttgaaaaagtaatgcaaaaattattcaataaaagatacagacgcaggtttttgtcaaagcagaatctaccatctagactttaattgacccaagctacaaagaagttaagtctaatttatcttatgtatttgggagatcattcacaaggaattatctgcaaaaccacatgaatattattatctactgtgtacattaaggatttaagagtgcatagcttctacacatactttagcttttcttttcatagcctggggaaatgctatgaatgcacctaactgagattttaacgtaattgaagcttaccctttccgtgtcaaattccagactctagaggcactttgttggcccacacgtcacacgtgctcttcttttttaataggataacttaggatccgcatggatagagagaatgagaggctaaagatatttcctgcagaaaatggtagaagcttaaatacacgattgcatgagtgacagtctgaaagtctctgaaagtggttgtcagccctggctgaacatcagaatcatctgtggagctttaggatcttaaagctggccagatttatttgtttttaaatcaaaaccctccctagtgctacctacattttagccaggattcaaatttttcattgaagaactttctgaggtttgttgattctgtagtcatagtgtgtcatatgtattttttaccaccttacctatataaataggtttttagtttttgttgttgtttggtagagatagggtcttgctgtgttgcccaggctggtctcgaactcctaggctcaagcattccttctagctcgacctctcgaagtgctgggattacaggcatgagccaccgtgcctgacctgtttattagaattgatttct

SEQ ID NO: 76580 - DNA, 1042 bp, Homo sapiens
tatgagaacagttcatatgaacaagaattaggtgttttatttgacaacagatttaaaatgatccaggtcctgtagttctgtaaaggtcagtgctagccaagaaatagcatgttctgctctgagaacttaatgtgcctatggtactctaccatggttagagaacatgggggttctttttgtcgtcttctgaccaactagagtacattctaaagagtgactctctaaggagagtacattttaaggagagagggagacagtttcagaaaggaattcaagtaatgccaggttgggaggaccgtagcaagtgattctgaggaaagaaggcacagggaggacattgtggttgtccagtgtgtagtagtagatcaaggtgtattgagcagattcttgcagagttgagaagtagactgctgtactggttctctttccattctaagattccacgctgttaaagattatctgaagccattcagcatcaggtgggtataagaggaccctgaggatgattttcagcctatgtccatttaggtttggaggaagagtatccacccattctccttgccctcaagtctcaactctccaagcaagaggaagccagagaggcttggggagcgcaggaaagctataaatcccaatacccattatctcctgaggacagacagtctccggtgcaggcagatgcttcaggagttccccataatctgtaggatggaagctgagtgccttaatatggcagaggccctctggatgtggcttctgccttctctgttgatcgctttcttctcactcgcctgtcaccgagccttgtttgttctagtggtagtgaagtccttgcataatgtgatttcttgcctttcagtgccttgctgtttcttctccctaaacattcctctgatttgctgaatacattcttattttcctctcaggaccagcttaaaagttaacatctgtagagtttttctgctttgctcaagttagttacttcataacacatacctctgttacagtactattgaaacttttttttttgaggagtctcgct

SEQ ID NO: 76581 - DNA, 1037 bp, Homo sapiens
cattcagtaatttttcaatgaatgagtataattctcacttgccttaccatattgatactttattgtggctgtggctttggaatttaacatcatgagatataataaatacatagttgaacttaccgattggttgatttaaacctttgaagtgtgtaagagtgtacttttcttgactcccttattaaatattccaataggatatcgatatatggaggggcattcctagtttctagcaagaccacgttgtattttggattaccttcttttaatagtactccttaaaaattgtcaagttattataatattttcaataagaaacacatcttaggtctaaaaaagggtaaaatgaggctaaggaaaatttaaaataagtaattgtgtaaagaaagatgatattaatatgcatttgaaagtgcaggaaatctgtggtaagaaatgttccaaattaaattgggtgtacactatggacaactaaagaacagattgtgttctgatatggtgtggagctcatagtttgccaaagccgatttgtaaagtcttattggaccacactcatgctagcaggacttgctttagtaatagctttgtggctgggcgtggaggctcatgtctgtaatcccagcactttgggaggctgaggcaggaggatcagatgaggcaagacgttcaagaccagcttgggcaacatagcaaaacctagtctctatcttccccacaccccaccaaaaaaaacttcagctgggattggtggcatgtacctgaagtcccagctacttgggaggctgagatgggaggattacttgagtctgtgaggtcaagactgcagtgagccatgatcatgctactgcatttaagcctgggtgatacagcaagaccccatctctaaaaaaataagaaataatagcttcgtagttcaggtaacaccagtggtctggttatccagggctgatcagatcctggaaaatctgatatgcttaaacagaattttttgaatattgatgtctactagaaagtcacttgttaacaagcaatgagag

SEQ ID NO: 76582 - DNA, 1151 bp, Homo sapiens
ctttcttttgttcaggcagccttttaatcataaaagccactatttcatcttgtttgtacatcttatgtaagtacacaggcatttttagcatcttaggtggcagagtttgtgttctacttttaattgacctttataagatgtgacaaattcccacacagagtttctttttttcttgaaaggttgatggcctaactggaattaaataaccaaaaaaaaaaattttttttttttttttttttttttgagacggagtctcgctcttttgctcaggccggactgcagtggcgctatctctgctcactgcaacctccgcctcctgggttcacgccattctcctgcctcagcctcccgaatggctgggactacaggcgcctgccactgcacccggctaattttttgtatttttagtagagacggggtttcaccgtgttagcataaataaccaaaatttaattgcatttctttagattaattttcaaaggttattatgttccaggtattacttgaaagttctgaactatttttgtgcataaaattatgttttcactacaatcatggcaatattttttgtcaacagcggttcacctagtgaatgttgatactttgggtttgagtgaaaatgaattgtagcattttcttttgcattaataaataccgtactcacttaaactacctgatagaactacaagtcctccaagtttcattcagattaatgtattccctgtatttaaaagtagatagttacacatgagcagtgactccgagtgacacgccttgtgtggctgacactcttgggatgctgagatttgatgatcatctttgtaatctcggaatgactgatagcacacaagttcatggatgccagaaatgatgtagaagtaggcacctgagttccctggctttctgaagggtgaggccaaagctagatgacagacaccagatagatagtaaggacaaagtagaactttgtggtcttttgctgtccttgaagtggtacctatttacactttgtgtccttgctgcttttacatatctttctctgtgaattaggttgtgaacttttcaaaaggaagttcaagatcatcatgatctttggagctccacagctttttgctcagaaccttatacccaatagatgtttcataagtgtt

SEQ ID NO: 76583 - DNA, 1053 bp, Homo sapiens
ccacttcttaatttatcttgggtaaattttttttttttttttgagacaaggtttctctctgtctcccaggctggagtgcagtggtgcaacctcagctctctgtaacctccgcctcccgggttcaagtgattctcttgcctcagcctcctgagtaggtgggattacaggtgtgaaccatcacacctgaccaatttttgtatttttagtagagatagggtttcaccatattggccaggctggtcttgaattcttggccttatgtgatctgcccgccttggcctctcaaagtgctgggattacaggcatgagtcactgttcctggccttgggtaagatttaaaacttcactgattattatactccttcctaaaatagagataatgcccatgtcctaggattgttgtattggttatgtgatgtaaagaatatgtgcctggcatattggagacactatcattattatttataagggaaattacttaattggaagacaattagatatttggtatttaaaattaatatcaaggaggaagtttctagatgtcctagattttatttttactattataatagtatttgtggttattgaggactgtgtgaacagttttataactgccgctgtccccctctccctccacatttggaataggtagccatctttaaaataacatgtaaagatgcacgtttttgagagaccttcacatgaataatgaaaagcttctgaatataattatatatattgaaatatgtgcccctattaatgccacttatatgttcattgtagatcatctgtctccattcttcttaaactgggtatctttcatagcagtgccaaacagacttttcatgtacttctctgcctcaatattttctttttgagtttaagttttagaagtaccaattcatattccttctttttgctagcacagtgtacctattagttatttacatatatgtataatgagtttgaaaaatgttacataaaaagaatcttggcctggcgcggtggctcacgcctgtaatcccagcactttgggaggccaaggcaggtgga

SEQ ID NO: 76584 - DNA, 1388 bp, Homo sapiens
gtaccatgttgcccactttcttgactgtctcatatatttaaaatttgctaatagtggatttgaacaaaagtctaaaggaaggaatcagaaaataaagaagagagaacatgaactatgtggatgtagttggaggtcagggtaggaattgtgcagagctcagccccaccccctactgtccctatttgacttaaaaagttgggtgacatgagcatttttgaagacctggcttctgagacagcaggtcacacggcagaactggagaagaagcttgggagaagcttgcatttgccagttgatcatgaattgctaatgtttctcgaagggcttaggaaacagtgatggggattttattttaaaacctggacttcattttaatgtttgtcaatccctcagcatattttatatataagaggaagttgtaaatgtcttcactagtatttaagtgcctttccccaaaaccatgtatggaaaattaaggccatatggtgggtaaagtcttaaatgtggggaagttcagcatgccacgttctggagcttttggtgctcctgcggggagggctttattgtatctttttggaaaagatttttaataagcaggagaatgtagcgttgaatgtccttggcttgaaggccattactactcacatctgcacaaaatgggccaaggtcttcagtgagtagatgataagggaaacacagtggtatgggtgggcagcccttccgcctgatatcagcctctcagagcaggggtgtttcctgaaccgttgctgtctcagcacatgactagccttgagttctgcctgtaatagtttccttaattaaaacggtctgattggcactctggatgagcgttcagtaggttaaatagtgaatggttgctgtagagctaacggactttgttttctttcagggttttttttttttttaagtctatagcttaattcagtaactgacccttgtctgctaccgaccagtgtttttttccagtcaactgaaaagtaaatgttttgagaaattgactaggtaacatttgataaatatctgtctttgtgtagggactttcagggctgttctggcctgaaatgaaagcttttgggccaggggtgatggcccacacctgtaatcctgtaatttgaaaggctcaaggaggatctctcttttttttttttttttttttttttttttgagacggagtctcgctctgtcgcccaggccggactgcggactgcagtggcgcaatctcggctcactgcaagctccgcttcccgggttcacgccattctcctgcctcagcctcccgagtagctgggactacaggtgcccgccaccacgcccggctaattttttgtatttttagtagagacggggtttcaccttgttagccagga

SEQ ID NO: 76585 - DNA, 1055 bp, Homo sapiens
atcttttaagaaaataaaaaactgtaatacttattttatcaataaattattttcagaagctttggtttttgaagttatcagtcttcatatgccacttctttctccacaatagttacgtctgttccattttatctctacaatcctctagctggagatctcatcagtattctgagcctcactctattcatctaacaaatggggctaataagccaggagcccagcagggtttttgggagcatgaggttgtcagtgcagtgcctcataggaaacaagctgcacgggaccagagaaatcacttaatccagccttctcctataacagatgagaaaactgaggctgagtgtcacataatgtgtagcttctctcccttttgtttgtgcttaactaatatctttctcagttgtgggatcactttgcgactctgcttcttgagaaaccacaggggcagcttttgcacagggcattttccttgcttgcaatttctctttcttttcaccacctgtcaagtcaccttgccctccctttgaaacacattcaaattcatttcctcagggaggcttttctagttcatccttaaagatgggtatttcaaatcctgatcaactcagttttatccttcactgtggaaatgtgaaggacctattattgatattattataaaggtcctatatagatatacatatacacttatattttttgttatttagggaaaaaaaacttcttgagaacaaatttgttagcagcgcagtgttatttgtgtattttgaaagggacagtttcagttgatgagataattaaatgcacgatatgcttttagcatgttaactcctactcacagatccttgttctgcttttcatacaatcagctttcaagctagtagtccagagctaaggattatgttaaataagttagaagaaaaccacccactgctaattcacatcttttcatatgggtgaatattcttgcaactttcccctactgtgctttcttccacactatgaaaagaggcaaataaagtaaaaatgtcaagtagcagtatacactcctaaagata

SEQ ID NO: 76586 - DNA, 2235 bp, Homo sapiens
gttttttccagtgggtttgtattttgtcgtttatggtaatttttgctatatatgaatttatttttggatcatcaggtttattactattctacttcatggttttggaattttatgtcttacttaggtcttaggctcttcaagattatgaaaaaatatcttgcttttaatactttgtggggttttatgtttaagactttaaatcaatttgggatttattttaatgtgagttggtatcccatcctcttttccatgtggctgtatagttgtgccagcaccatttattgaacaatttatcttttccacactgatgtcacattttatcttatcaaattcctgaagtctttttagaatgtttgttgtatccattgatttgatggcttgttcatgaaccagttttagaccttttaaattattatatatttataacatattttatactatctggcaaatattaaagctggtcccccttattactcttcttttttataattgccctcattgttcttgtttattttccatataaactacagacataccttctgaattttttttttttttttttttttgagacagagtctcactctgtcacccaggctggagtgcagtggcacgatctcggctcactgcaacctctatcgcccgggttcaagtgattctcctgcctcagtctctggagtagctgggactacaggtgcgtgccaccatgcctggctaattttttgtatttttagtagagacggggtttcaccgtcttagacagggtggtctcaatctcttgatctcgtgatctgcctgccttggcctcccaaagtgctgggattacaggcatgagctgctgcacccggccagcttttgaatttctaaaagaatatcctgataatcttattgggattgcgttaaatttacttattaatttaaaatttttaaagcattgatcctctaagaatttgttttgtgtagctcaaatatttctcatctgcttttaaaaaaaagttgattttacaaaatttgctgggagtggtaggggcggctcatgcctgtaatcttagcacttttggaggccgaggcaggaggattgcttgagcccaggagttcaaaaccagcctgggcgatagtgagaccctgtctcttagaaactacatatatattttacaaatttatttttctttgaggcagagtctcgttctgtcacccaggctggagtccagtagcatgatctcgacttgttgcaacctctgcctctgtggttcgaggtatttcggggtgcctcagccacttaagtagctaggattacaggtgtgtttcacttcacttagcaaatttttgtatttttggtagtttcaccatgttggccaggctggtctcgaactcctagcctcaagtgatctgcccgcctggacttcccaaagtgctgggattccaggcgtaagacaccgcgcctggcttattgtacaagcatttcattactgatactacagagagcagttactcatcatactacctctatcacaacaaacatttctgttttccctttacttttagtgatgctgaatcatattttagggcctttattattatatattctgtaattagcaaggcatcatgcatacagtaggtaaaagtttagagagcttgtccataccactgtgggatcctcaataggaagtaatttggaagtatctattgaaatttaaaatatacacaggcatgtaccgtaactctttagttgtttactcagcatctatcctaaagaaaacatgggccgtgactcacatactgtttttttcagtaccttctgtcacccttgttatctccttacattttagccattaaattctgttaaagaagatgtgaaaccttttagaagtggttcatagcccatgctgtgcacttttaatttgattctctaccttactttttagttaaacaaaacaaaacaaaacaaaacaaaactcgtcaccatagtaattctttagatgttagaatcagctaggtatgcttttttttctctcaaacttctttaatcatcacccacatttcaccccagttccgataattccctctttccctgttgaaaatcaccataatgagccttggcccccgattgcacgtccttgatgagtgtgttggggacagaagtactctcaatcccctgtggccttcctgctcttgttcccactcctgaccagcccacataatgaatcctgttctcaaagcaaagatcatctccaccca

SEQ ID NO: 76587 - DNA, 1021 bp, Homo sapiens
tacagaaatactaggagagcaggttttttttttgccctctgctttcctgcttactgttttttgatttgatttaactaatgtggttttagctgaagagagcctttccaagagctcacctgtggtaccctgaggaggagttgagctgtcatcactctaacccaggaagacctcatggagaggagggcaacacaaaggatggctagtttctcagatgaatttctgtttcagcaactggcttctcaggcttcattgaactcaaaattaaacccaagcctctttttatactgttaagaaatgtgctgcagacaggagggggaaagtcagtatttaattctctcttcttcactaccgtcttcttcactaccactcctctccctcttcttcactgccaccaccccttgcaaggaaaaggtaggtggagcattctgtgtttgtcataaatttaatgattctgaaatgttggaaatagaaaacagatgttttaatggggtgatacccacattggaaagcatcaaggtcaaaatatattttatgagtcaactttaatttgattaataacttaaaaccctctaccatagtatatgctactttattttcataactactcatgagtatggaatggaaaacattaatttatctttctaagaaaagtatttggctggaggagaaaagaatattaaagtgtcatggacattataaaatttggtagcacagtcttttttcccctacatttttagtttcagttcactgtttctgttgtttctaaatattttaccactaatgaaaaccttatttaggtaaaacgttttcttttgatttaaaagatttttgttgaattccttgcccagatgtgagagaagtgtctacatctattcaaactttaactttgggtcttagaggtgatgaatcacttggcagaacaaccatgagatgttgaataatctcatgatttggttgacttatttttagaagccactccctattaactcatttaattcctgttatacgggaagagggacag

SEQ ID NO: 76588 - DNA, 1350 bp, Homo sapiens
tcgcgtcactgtactccagcctggatgacagagcaagactctgtctcaaaaaaaaaaaaaaaaaaaaaaaaaaagaagtaacttaaactgtaaaatcttgcgggctaattaaaaaaattcagaacatatagtattgacattctcttccttttgcattagaaagggtcagtatcctaaattatttaataatgtatgtcttttccagccaagatttcatttacttgattcaaagcccagagtatagatggaagcataagaaggtttgccaaagcatggaagagtaatgagatttttcccctggcaacttggaatttatttttttaaattatagtaattaacatgaaaaatgttattttgttaacatctaatgaagagaaagttgaaataaatggagaaatgtctataaatttttttctttgtgttgtactttttttcttttgtctataaatattaagttttttctgatagggcaaaataggaaaataggagaaaacagtgattgtttaaagatttgatgattggctaagtgtggtggctcatgcctgtaatccccacactttgggaggctgaggtgggaggattgcgtaagcttaggactttgagaccagcctgggcaacatagtgagaccttgtctctataaaaaaaataataaaataaaaattagccaagcgtgatggcatgtgcctgtggtcctagccacttgggaggctgagatgggaagatcacttgagcccaggaggtcaaggctgcagtgagctataattatgccattctactccagcctgggtaacaaaacaagactgtgtctcttaaaacaaacaaacaaaaagatttgataatcataaaagagcctatgtttttgtgacgtcttacattttcttaaggataatgtatggcatgttgcacattgagatggttattggaatatcatttagaaacctctggacataattcatgttggaaccagtttacagtattagttagggaggtaaactttgtgcttacagtgcctgtgttcaaaatgtcctgagattcggtttttattctgtaagaaatctcagtgttactctgtctgaaaatatttagcctttcagaattccattttataattttgtagtccagtatctagtgtgaaggaggtaattgttgcatcatacacaagactttagtgatattctaggtacttgtctgttgctgatcatattttttataaaagtaatttttggggctaatcaatacacgaattctggaaactggtaatatttaatcattgataaagaattttatctttttgtgcttgtttgtatttatagttccttgtaatcctttttatgggcttttgaataaat

SEQ ID NO: 76589 - DNA, 1910 bp, Homo sapiens
ttctgttacagaggtgccacactgtcccccactggggacccactgtcatcctcttgctgcaaataacttgcataggaatccccctctccacaggtctgtggagtacattccttggcacctgcctaggtagaagggagaagagcctagagtcacacatgttgtatcttggacccataggagataaatagtatgtgaagtccagacaatcttgtttttcttcatttattagtttctgtccaggcaatcctatcacagccactaaagcaaagcagaacaaaaacatttgtgaaggttagatgtcagcggtgttaggatgttccatgtcttatgttcagttaccctgaagtctagtttctgcatatacctagcaagtacattagccaattcacgttctcgaaagtaataccgattgttgcctcttaggtgctcagagcgtttacaaatagcacggagctacagcccttcccacctctctgtgaacacaaagaatgatttcatttacttcaatgagaacactataaaattctcaatcaaattagcattcactctcaaaaaataaaagtattccattcagtacttttttggggggttataggatagcgttttgaaatcagagcaacttcagaagaaggtaaaaagttcccagactctcctaattcatggttctcagaatagggaatgaatatccaccgaatttttcaatgcctgagaccatttcctatctacagttcccagattggcatttcttttgctcatcctgggagcttggttgtggtttacttttttgtaaagacagtaagtgttctcagtgtgactgtgaaaagcaagactgacctctttccctttggtccctggagaatggtgtcatgaggtgtttttgagccaggcccaggtaggtgtctgctgctccctcttattggcactgagagaacatagttggaccctttagactttctacctgcatactgttgagttggagtttttgtattatgtgaaggagtcacaaaggatactctcagctttggaatgttataaagaagctgatgaagtgctctttgccactaaagcctgtatagggagctactagctagtgcttgttctgtgcctagaagagacagttcctaaacatgggaagatacctccaccccaggaccaggtggttccaggtggttctaggctgagcaaaagctaacagataccacatttaagtataaaatatttgtgatatgaactttagaagcattttatttggagaaagaaaacatgttcatatgaaataattatagttagtggaagacaacatgcaatctaattgcttcattgacagtttctacttatcctggcgtaagaaaaaatccatttattaagctgaaaatcttctgatgtcatagaaagaaggaaaactttgttctttcaaaattgtgacctcctgtatatttcctgatatgtagagaactctcaattgtctgaggccttggtgagagagtaggattagaatcagaattcactttttttgtcttaagatgagagaagttatcagctggagctgaaatttaatcttgtttagctacactgatcactgtttctttctcgggaattttattttaaaataaagtctaagtttttttttttaattcttgtatctagaaacaaagtctgattttagcctggcagaatttgtctgtactaattttagtttttagatgtgcatgggaagagagactggataatctctctcaaatcggttgtactggtggttcacttaagtgcatatgtactatatggagtcatgcatttgatattaatattacacaattatctctcaaatgtaaaacactctcagtgtaaatatttccaacatttgttgattgtaacatttggatgacaaatatttcttactcgaattacta

SEQ ID NO: 76590 - DNA, 2722 bp, Homo sapiens
tggagacagagccttgctctgttgctcaggttggagtgcagtggcccagtcatagctcactgtagccatgacctccttgggctggagtgctctttcgtctcagcctcctgagtagctgggtctacaggcatttgccaccatgcccaactaattttgttatttttgtagaagatggaatctcactgtgttgcccaggctgatcttggacttctgggctaaagtgatcctcccactttggcctcataaagtattgggattacaggcatgagacaccatgcctggctcacactttttgtttattttaaaggaattgttttttgccaactaagtaagtaaaagaagctgattttagctaattcagaaaataggaatcaaaaaagaaaccatgctcatttgggtttctaatatttttttcttatatttcttttactctttttctatgcatatgtattttctaaaacaaaattggaattctattgtatgtatgttttgtattctgctttttatgtttagcataccttttgaattttttatcttatttaaataatttttagaggctggatatggtggctcacacctgtaatcccagctctttgtgaggctgaggcaggaggatcgcttgagcccaggagttccaggctgcagctgagttatgatcatgccactgcacttcagcttgggcgacagagcgagacactgtctctaaaaatataaagaaagaaagaatttactatttcatcttgttatatatttgtgtaatcacttgttacaaatcagtcttcagtgtttttttgtgtgtgtgcatttttatataaatgcttgattgttttcttaggataattatctaggataagaattattaggtcagagtgtctgaatgactttttctgttgcagtcccaaattctccttctgaaacagtaaggggtgaaactcttgccttttcttcatctctccttgacaaaccatatttgaaaatacatttccaattgagttaagtagatcctgcaaataaagagagatgggctctgtttttttttttgtttttttttttttttttttttttgagacaggcccttgctttgtttcccaggctggagtgcagtggcatgatcatggctcactgcaaccttgacctcccaggctcaagtgattctcctatctcggccccctgagtagctgggactacaggcatgcaccaccatgctcagctaattacattttttttttttggtagagatagggtctcactgtgttgcccaggctggtcttgaactcctgggcaagtgatcctcctgccttagcctcccaaagtgttggcattacaggcatgagccaccacgcttatcctctgttagcttttatgttagtattgtagtgaaaggaaaatttgtaggatataataaagaacaaagcttgaaaataactttattcaaatgttcatagcctaaataagaggcagtttagatctactcagctggatttgctgtgggacccctaacaagcctatggtgctatggtgtacttgggtttcacagctcactttagggttgccttttaaaattgatggcagatgcttcctaagagttctgattattctgccagtgcaaaattatggggatgctatttggtgtcactaggtagtggatactttactatggtttacttaatctgattttttaaaagcatgtactgtggatttttttttttttttttttgagacagggtctcactctgttgcccaggctggagtgcagtggcatgatctctgctgactgcagcctctgtcttctgtgcttaagtgatttttgtgcctcaggctcctaagtagctgggactacaggtgtgtgccaccacacctggctaattttttttgtatttttttagtagagacgggattttaccatgttgctcaggctggtctcgaactcctgagctctggcaatccgcctgcctctgcctcccaaaatgctaggattacaggtgtgagccaccatgcctggcctactattgatttttttgttagagtggtatccagaatattcatttaatgtgcatagttatttgactaatggctcattgtgaaagttcatggtattccaaggtttgttgagcccctctggtcagtgacaatgcaagacatttagctttctgttctgtggccagagatattttcttgtggcttccagaacagtcctgtgaggagggtgatggagcaagtggatgtcatctccgttttgtagatgaggaaactgaaggaacttgtctaatgccccttggctattacatggcagctgccattcttctttctcttagttctctttcctttattttgcacttttttttcctacgcttccatcgctttcttggttgtctttctggtagcaataacatcatccacaccaatgattatagtaataactgacctttattgatcaatcagttgccatgtgccacagagtttcctaagtgctctaatgtattgaccttcacctcagtcctatggagtaggtattatcctctttttagagctgaagaaactgaggcccagagaggttaagcaacttgcccaaggtttatggggctagttgtgttcccaggcatctaactctagccactggaattctatattctgaaaaccgtttgacatttataacaagtataacatgaattttcaagttggaataaagaagacatttctgaaatgggctgaaataagtgga

SEQ ID NO: 76591 - DNA, 1789 bp, Homo sapiens
ctaaagactttggcatgtagtatttaatctttaaaatcatcctgtgagatgtcagtggatgttctcatgttactaataagggtaaattggtttctacaaggtcacatagttcgtaagggcctgagctgagatttgaacctacatatgtttgctttcaatgcctgagtcattatgttaaattgttccttcttgttttttccaagtatttatgatgcctttcccttcacatattacggtagcaggatgtattcttacttatatattacttgtttaatatacttttggtggttattgttggttggtttgacatcttaactagtttggacaaaactctttcatttactattgtgtttatggtatttagaaattgtgtgcgattttgtttttacagctaaagggaaaaacgtaaattattttatttcacatgcaatatcattttttaattggcaatttggtctaaacagtttttaacaatcctctgagacagaaccctggtgttgagatatttcttttactaatatgtgtaaaacaacatctcaagttgttgtgtggtataactgcaagagcatagtacatggatagcacaaaagcagccacggtaaaaaagcaaagagacgagcaaatcagatgagagagaacagacacgcattaactgatccatcattcatgatatgcttagatttgtgtttgaaaagcttgcaataaatgtaagaaattcttattgatacaagtattcaacatcttatattaaaaatacaaccctatcaattttatgtactaaaatattacagtggataactgtttattatacattggtctgccagcacttgtgtggtagtgtggtatgttttatgaatccagctgaatagcatgtctaggcagaaccaaatgtacaattatataaaatagcccaggaattacagccaaaaaacattaataattattggcaactctatattactttgtttgcatccttatagtgttggcttattattacagaagagttaaagtttattttcagacaaaacagaatgtctaaagtgtgttatatattaatccagttctaaaaagcttttacatttttaagtttttaatttttcagtctttactcactcatttttcctggtggacgaatccagtttttaaaataaaatatatttttcttccaaacaaccttttgtgtttcttgatctggagaattgaataaatctaaataagaattattgcttccagcattaagtttgtgcagaagttttttgaaaccaacttaataggacatcagtattgccatctgaaatccaaatttctcttatttatttatttttaaaattgaggacaaggccttgctacattgctcaggctggtctcaaacacctagcctcaagcaatcctactgccttggcctcccaaagtgctgggattacagtaaatatcttttaaatggagacttactgacactgtgtagaatatattttttaatacttcaaactgccctagcatccatctgacttttatttcctgccttcttcaaatagtcttctgctctccttgtctagctagcaaccctccattcttccattccttgtaaaagagaaattgtcagcatctgcttttctgttgacctattctctccaaacaggctatatggtaaacaaactgcaatgaacattttttttttttttttgagatggagtctcgctcttttgcccaggctggagtgcagtggcatgatatcggctcactgcaacctccgcctcccggttcaaacggttcttctgcctcagcttcc

SEQ ID NO: 76592 - DNA, 1749 bp, Homo sapiens
gtctgacagaacaccaagaagtaccagtctttaaagaatgctatagcatatacttcaggcttgaaatattgtaataaaagcaggtttgttaaaagcttatctgttcctgcatactgttctccagcaagctaaacacatcaagaagcagtctctcccatttagaaataaccagactttccttatgtttgtaactgatttttttttattaattggtgagaacaatgttgttggaaagtttagtgtatctttccccctcctcctctttgtgatgatggtggtgggggattaggtaataccttcaaacagtaggatttttccttgtatttgaaaaccaatacaagtcactgtcataatttttggcaaattatgtcaggagtagaggaaagggaattcttcacctatcttgatgtttcaatattgggaacatttgaaaaatagagaaaattagaaagaaaaaaattatccgtagcttctccattaaaacaaaaattctgctttcaaaatgtcttccaatgtaacacatttgtggttattttatgaattgaatggccagagctatgtacataggacacagctgaaaaagggaaggcgcagtcagtgaaagtggaatgagggcaacatccaaattgcccttttaatggttattattgtgtttccttgaaaaaggctaaaatgcctccagtggaagactaatagtatttggacagaaagagtgcagtgttaagaaattattttatcatagcattttgaaccaaggctggatcatttttgtttaacagtgtaattgagagctgttcctcactttcatttactccattgaggaaagcatcatttctagcaggaggtttacagtgaggtaggtcatatttgggcacgttgtagaggcaccgcagttgtggtggtcttgatgacacagtgcagatgctcctgctgaaactggtttctgtgaccttttccttttgtatacacactcttcaagttttaaaacaaactgtatgtgtattgggtgcttcctgttgaggaaatgaaggaggtatgtataacccggtggggtagagatgggcctggattgtagtggacaaattttggatgactccgagttcatgcatctgtttcccggatgtttcacctgctttgtaacatcagtgtctcaaaagccagaagccaaatggcaagaactgttgggctctgttgaacattagcgttcttgctgttaaacagtcatatttttgtggctgaacagttaactttggaaagaaatggttttgtggtatctctaaaaatattttataagtacactggtttaaataacacttaatactacattgttccattatctttaaaactcatttctgtggcagttttcagtaccatatttatgtaagttagtcataaaatatgtttttgtaaatttgaggtatttttatgtttttttaaaacttttttgtgcctccgaataacaaatctgtcaatttgttcgttttatttatttatttatttatttatttatttatttatttattttttgagatggagtctagatctgttgcccaggctggagtgcagtggtgtgatctcagcacactgcaagctctgcctcgcgggttcacaccattcccctgcctcagcctcccaagtagctgggactacaggcgcctgccaccatgcccggctaattttttgtatttttttttaagagagacgggttttcaccgtgttagccaggatggtatcaatctaaacacgtat

SEQ ID NO: 76593 - DNA, 1003 bp, Homo sapiens
atttgcaaatttttttccaagtctataccttattttttcatttgcttaatagtgtatttctctgaacaaaatttctctaattttgaagaagtacagtttatcttttttttaaagtacagtgggggtgatttccaagaactctttgactaactaaaggttataaagattttatgttttctcttaaaagttttatagttttacatttagatatatatgatttattttgaattaatatttctgtaagatctgttttaggtcaggtttccttttttagatatggatgtctaattattccagcacctttgttgaaaacacaatctttctccattgaattgccattgtacctttaccaagaatcaattggttatatttgtgtaagtcgatttctccatgacttcctccttccctggggttcccctttttacttttccagccacagagatgagacattagaataggacgtacttcctgtgactgcttgcatttcgggccaagaggcagaaagacagaggaaaaaagcagcagatgtttgctcctacatcttgagatcagagctcctctgatcagagaggaaggttcctttccctcagagtatatgtgactgttgtccccgctgtccaccaccaccttggaattgccttggattgggaagcaagagaattaaaaagaaaaaaaaaaggaaagaaaaatggagtgtttcccccattttctccaggtttaggaattcccttttctgctcctctagctaaaactcagtttgttccctctgtccacatcctggtatgccatgtctagctgccttgagtccaggctggtgatttcttacgaaaaaagtgggacgctcattgccagtttggtagtaccttgagattcattcttcttccctaatcagcctgctatcgtttacttttcagacccctcaaatagctgcttataatctttccaggtattataactgcattcagtagagaaatgagatggagtacccttccttcatcctacc

SEQ ID NO: 76594 - DNA, 1063 bp, Homo sapiens
gcgtgagccaccgtgcccggccagactagtgtttttcacaaattgcacacatcttaaaataatagacattctgtttctcttagtcttaaaaaaaaaaaaaaaaagaagaagtcagccgtgcacagtggctcacgcctgtaatcccagcattttgggaggcctagttgggtggaacacctgaggtcaggagtttgaaaccagcctggccaacatggtgagaccccgtctctactaaaaatacaaaaattagctgggcttggtggtgggtgcctgtaatcccagctactcgggatgctgaggcaggagaatcacttgaacccaggaggcggagtttgaagtgagccaagattgcaccactgttttccagcctgggtgacagagcaagactctgtttccaaaacaaaaaacaaacaaacaaaaaaacaaaggtcattttatcttggctgaattaatatatattgtgtaaaatacaagaacaaactagaaacctttcagttttgtggaaattctgtgctaggatcacagtggactcttttcttgcttttcctttctactaaaaaaattaacaatttaaagtgagcattttaataccatatgtaaatttacatttagtgctatttgattttaggtgcagaaatgcacccaggacacctgtagtcattcactttcctgtttaccttgtggttctcatcttttgttactttaaaaaatgtctaattttaagtcttttatatccaattattgagttgcctttgagatgtgatttgatatgttttcattctgaaccccttgcataagttcaggcgaattagagaatatagggaagtccaggctgggagtggtggctcacgcctgtaaccctagcactttgagaacctgaggtgggtggatagcttgaactcacgagtcagagaccagcctgggcaacatggcaaaaccctacctctacaaaaaatacaaaaatcagccggacatggtagtgcatgcttgtgatcccagctacttgggatgctgaggtgggaggatggcttcagcctgggaggcagaggttgcagtgaactga

SEQ ID NO: 76595 - DNA, 1050 bp, Homo sapiens
tcttttttacgaacaatttcagctgacagctaagcacagatatgatcctttatgatatccagagatttgttttactctctttttgataagagacttcatacttgcaggccaaagacattcaagtctttggagggaaaagtcttaaaagtggtcagaatttgagggctattagaattttattctttacctaaatctaaatatttgttttagatggtagtttacccacaccatgcagaaaaattatagatgtttggggtaccgtttttctttctattaataacagatgattataattagaggcatttgagcatgaaactagtggggaacgtgctctgtggtattttagggtgaagttgcactttgctctttgtgcgcacattgctctttgtgaaaatgtctcctaattcatctttcatgtacagtgttgcttacaacattgtatcatgcattcatgtgagacttcaaaaccagaccacttgattctattcttctggagccactgataattgttgggagactacatttgtataaaacctctgcagaaatcaagagaggcccagctttattgtaattttaacagtttgggcaagtttaaaatttgagttatgtttctgtagccttatccttgctcacctagactactgatttaccatcccatcccacccctgcacccatttcattttctgcattgccaccagagtttctgtacaaaaagcatgtctaaccatgtcactctcctgctgaaaacatttccaaggctcctcacagctcactggagaaagttcaggagtcttcatgtggccttcaagccttgtgatgggaaccttgctcaaccatatcatctatcacttcctgcttggaactaggcccttctgatgcactatgctctctgtcaccggtaaggttttactccttccctctgacatcgctaggttgggctgcatgccccacctctgcactccgtagcaccctgtgttcgcctctttggttgctcatgtctgtacgatgtttgtctgttcatatgaggaagctgtggattcctcaaaagca

SEQ ID NO: 76596 - DNA, 1077 bp, Homo sapiens
gctgctgctcttgcctctgtggaagacgcctgctgctaagagaatctttgtgtgttgtgtataaaatgaactttgtttggaccattccacaagcaacttaaactgcttaggagtccagccagacattcctccccagttgatcatttaaatggaggtcagatttagaacccaacttatattcgtttaaaaatagacattgcctttagaaaactgacctttggtacatttggggcctagggatctgataggctatctcttatgatgcacatcgctctgttttagactctgaaaggcagtatgcctttgaagctagataacgtcagtgtgcttgtaacttgggacccagtctgtgtgctatatgtctgcttcttcagtccacactcattacttccaggaaattcgtgagaagatgagagattattcgttatagaattgagtatggtttctctacactaattttattggatattttccagtttgactaggaaaggttagagaacatggaaagaaaatttaacaggttaattttaaggtaataagaccattgtattgatatattcttcagtgtgatttaggtgagtcaggaatttttcctctggagactgcctaaatcagggatgtccaatcttttggcttccctgggccatactggaagaataagaattgtctcaggccacgcataaagtacactaacactaatgatagctgattagcttaaaaaaaaaaaaagaaaaaaagaaaaattgccaaaaaatctcataatgttttaagaaagtttatgaatttgtgttgtgccgcattcaaagctgtcctgggctgcatgtggcctgcgggctgtgggttggacaggcttgtaaatgttattaaacctacaaatgagaaaggtaagactagtggcagctctcacggggctggaagtcagtttatcatatgttgcaacttaacattattcatttatgcaagtgaataatcagttatcaaaatatggagggattctttcaagcctcatttatcacacacaagtctaaggtttacatagaatgtgttaaacagatatgttaatagggtaagattgga

SEQ ID NO: 76597 - DNA, 1014 bp, Homo sapiens
attgcctaaaatttcaactaaaattgaaacaaagtggtaataagttattttgatttcattaaaaaataaccttgaaggacaatatttttttttcttcatgatttaacagtgttacttaagcatttattttgatgtaggaaaacctgtatttatttctgggcaccacttttcttgtagtcttaatgattatcatcttaaccaacacctttgtgtaatagtttccttgaggctgatgataccttttaatggtgtcagtgcttaacattatgtctttttggtacttttcagcaacacaaaattataaattattttgtgactaactgtgtctaaatttttttttacatcaaaataagtatttttaaaaaagaaaatgtgggtttttaaacttgtattttatttataagaggatgtattgtccatgttattataataattgatgtgtttccaacagaggacctctgtgaatatttttgcattgcccacacaggtgatgtgtgaacatctccaagattgttgtgccattaactagctcctacaaagtgtcatacagcaacattatttgaaacacttgtggaaacatttggaagcatttatcattttttctttgttgtatacccatttgaacaaaagcaaagtaattgcttacaatagttattttttcataataacataaatgctgaatctataaaaagtagaatttctttataaagatgaccttaagttttagctacctgatatcgtacatacatcgtagagaacattttcaaaggtaggggtttaataggaatgaagatgcctgttcctgatactgggaagtttgcttatttaacttagtagcaatgatatttatcatatcctaatattttataatgctctgtatatcactgagtgcttaagtagttaccctttttaatcctcagagtcctcccttcaaacagacaggatgtcgatatttaaaaataaaaagaaattaaattcacctattaatatatttctaactcattggaaaggaaa

SEQ ID NO: 76598 - DNA, 1725 bp, Homo sapiens
acctccttttttgttgtcccggaaggcagaatctgggatctcttttacttatgtaactgttctccaatttccaaatcaatttatatcgaaagaatatatctgtggtgcctgcccctttatccctcccccaaaacataggtatttatttttttagagacagggtcttgctctgtcacccaggctggagtgcagtggtgtgactgtagctctgtagctttctgcagccttgaactcctgggcccaagcaattttcctgcctcagcctcctgagtagctaggactacaggtgcccaaaccctccacgcccccagttttttttatttttggagtgatggggtttcaccatgttacccaggctggtgttgaatcctgggctcaagcagttttccccattcaccctcccaaagtgctgggattacgggtgtgagctattgcacctggcgaaagtagttgttgaagaactacttgggcagatgggaggtcttgttttactgctatgtttgtgaacaatacaaattcaattatttttgtggatgtgacttctagagaaacaattaaattgattaaccagagtgactgaggagactttcattatgtttctccaaggacataatgttgaacaacaaaaaaagtattttgacaaagtatcatcaccaaagtatccctcatcagaatatatagcacaggctggaaacttggattattgtttcttacctaaaagcagtcagtggaacaaaggttatgtatgttctgttagcagtgaagctgatactataaagtctatatgattttattcaaatggattaagaaaattaacgtgtgtttatatttggaaaacgtcagatattttatgaataaattttaattcagcaaatatttgtttttattactccttaaaggatagattcagcattttgtttgttttttaatattatgaaggaactttatactcctgatcactgatgatgtgggcaggccagcccgaagggactccgtggttcagtctttaccatgcaatagcacaggggcttttgcttttaaacatgagttctctgattgggtagtgcttgtgtgagtattgaaaaatctctacaattgaggctttggaaggttatcagttttacaccttcttgtcctattcagatgcctttaatttttgttctgttttattttgttttgccttcttgtaacagttagaatcttcattggattgttgaatagaaatggtgacagtggacgtccttgttttgttcctgatgttagagggaaagctttcagtcttttactgttggtatgatgtttgttcaggctgaggaagttcccttatgttcctggtttactaaggctttttttctttttctttttaaatcattagtggtgttgaattaaatttttcaagtgctttttctgtatatattgatataatcgtgtggctttttgtcctttattaatatgttgtattaaattaattgacttttggaggttataataattgatttttggatgttaaaccatacttgctaagatgaatcccgtttggtcatagtatctaattgagattttcttttcttttctttttttttttttttttgagacagggtcttacttactgtgtcacccaggctggagtgcagtgatatgatcttggcttattgtagcctcatcctcctaggatcaagcgatcctcccgcttcagcctcaatagtagctgggactataggcaca

SEQ ID NO: 76599 - DNA, 1152 bp, Homo sapiens
aaaacaaaaacattaaaaggtgccgagtgcagcggctcaggcctgtaatcccagtactttgggaggccaaggcaagaggattgcttcagctcaggagtttgaaccagcctggggaacatagttagacgtcatctctataaaaaattttaaaaattagctgggtgcagtggtgtgcatctgtggtcccagctacttggggggctgaggtgggaggatcgcttgagcccaggagtcgaggctacagtgagccatgttgaagccactgcactccagcctgggtgacagagcgagaccctgtctcaaaaataaataaataaataaaaataaatatatatgaagaaaaaagataaatggtgaaatcctctgtagtattttgctttccatagcaacaaagatgaagttcacaatgtgaaacaaaagaagacataagaaagtgtacatattctctgaccccatttaaataaattgcttttcccatgttgtaaagtgaccatacaaaaacaggcagaactaatctgtggtgctggaagtcaaaatggttgttagcactggaggttactgaggacttatgagggtggcttctgaggtgttggtaatgttctctttcctgatcgagtagtagttacagtggtcggttcagtttctgaaagttctaaaagatgtacatgtagaatttgtacgtttcagtttttataaaagcttcattaaaaaattaattgaagtctgggcacagtggcctcatgcctgtaatcccagcacattggcaggccaaggtgggaggattgcttgatttccaggagtttgagaccagcctgggtctcaaaccatggcgaaaccccgtctctacaaaataaataaataaataaataatacaaaaattagctgagcatgttggcatgtgcctatagtcccaactgttcgggaggccgcggtgggagggccacttgaacccgggaagtagaggctgctgtgaactgccagtacactctaccctgggcgacatagtaagaccctgtttccaaaaaaaaaaaaaaaaatcttcattgaacatagcttttttttttttttcttctgtgtgtcatattgtagcctggtatgctaacaagtaattagaattcttcagtattagccatggttgttcttaaaaaccat

SEQ ID NO: 76600 - DNA, 1029 bp, Homo sapiens
cagggttttaccatgttgtccaggctggtctcaaactcctggcctcaagcgatctatctgccttggcctcccaaagtgctgggattacaggtatgagccatcgcgcccagtcctaaaagtttaatatttttaataaaaatattcttgtctctgatcttgttcaataaaaaaaaaatttaaagtttttgtgtttaaatgaaagtatgctgttttcattatcctttttccttaaatgtcatttttcctgtgctgtaacatgaccgttactcacatggagtgctgtgaaatgtgtatatgtaagatttatgttctgcatttatgagcatgaataaacgttactgaatcagaaccgtggggatcatttagttatagaatcagaaatctggtgaaatgttcacagtttcctatttttataaaacagagtagtttaaaactgcatatgccagctttcctctctctattctctacctccttttctgttgtagttatatagtaacacgtgagggaagttggtaaggaccaaaagataccatatttttaaaaataaaagataccttctattgtaaggcacaccattatcttatgtattattaaggaaaaaaatgctctgtgaggaattgagttgaatctgggaaaatttttaaaaaagaaaaaaatgcagccttctaaactatggcacattgctaagatgccaggaaatataagatgcgtactgatttcagtgatgttgaagtgaagaaaaatgtgaattttagatccattccaaacattccttgctctaacaaaattattttatttggggtttaacttgggacttctaccttttttagaagtcagtagagaatcattcatttgaactctggctttttgctaaaatgctgttggagacgtgttctaatcagtatgtctgattttaagaagatatgaaaatttttaatgaaggatcacttttgtagacaaatttgagtgctttttgggagcaatgaaaagccatgttgtgcttcatgtaacctgagttcttgtgttatg

SEQ ID NO: 76601 - DNA, 1014 bp, Homo sapiens
atattataatactacagacaggccgggcgcggtggctcatgcctgtaatcccagcactttgggcggctgaggcgggcatatcacctgaggtcaggagttcgagaccagcctgactaacatggagaaacctcgtctctactaaaaatacaaaattagctgggcgtggtggcacacgcctgtaatctcagctactagggaggttgaggcagaagaatcgcttgaacctgggaggtggaggttgtggtgagccaagatcgcaccattgccctctagcctgggcaacaagagtgaaactccatcttaaaaaaaaaaaaagaaagaaatatgataatactagagacatttttctctaatgtctaatttaaaagcaactatttaccttagaaaggctggtttgcctcttctagaacaaagataagacctgtgtaagttatacagctattgtattttagtgaaatttattgtgcacttaaccaggttttttttctaattttatttcaggttataccttattggtgtggacgttgtctaaatttcggtagccatggcacaagaatatagtaagtactatgccatacttcctatgacctacctgctttacaaagtgttgattttctgtgtttaaatttctgattagagaaatgaaaacatagaaacaaaattttaaaaaatctacttttctcaaagagatgaagtcgtttgtcatctgctttttgaatctatagctttatatacaaatacagtgtaatagtgatttatttcgtattctgatacagtattgctcaggctattgcctgtaaatagtactgactgaacattagggttggatccatatcatgcgttgcatctattcctcatgttatggggttgaagaactgactgcagctcgccctgattaggagcagtctcatttctgccttgtccatgattgactcatgaactctggctacatcagtgagtgctgagtgttacctggccagggggatggtttcagagatggtcctgtaatccttt

SEQ ID NO: 76602 - DNA, 1109 bp, Homo sapiens
agattttttcccctttaatttatacatattatatccatgttacaggaaggaaaacattaacatcttttgttgaaattgtttgaagatcttacactttgtgaatgtattggttgttgtgtaatatgttttgtgtgcattttcttttttaaaaaatctgcatgttatagttgggttttaaggggaaaagcctattgaaaattttctttgaaaaatcaattcggtgaactgatattactcttttttgtttgtttcttgtggaatggagtcttcttctttcttatatatgaaaggacttgtatatatattaatggcatacaaaaggacttgtgtaaatatggaaagtggtacaaaaacttggcttgtttttgtaccgccagatgaaatgctgcctttgtggggaacggccccctgggctgagggagcttctagacactgactcagatctgtaattaggtcttgctctccgcacccttgttgacttgaaagcactggccatagaccatttagtctggaaaagcaatactacatgaatcatctaaattggcacaaattatccagaatgctactaaatgttttgtactcctctgtaattgagagaattagaaaaggagacttgttctttaaaagtattatagagggtacgtatacactgatgaaagtaaattttttttccctggatagaatgaaaagcagtggaatatttgacatttgtaagcagttctgatctcatgggtcagttttaggagattcctccatggttcccatactattttcctttgtgagaaggtaggaagtgtggcctgtcttccagctcccgtttatttctccactcagaccttttagacctgtcttgccatctgtagcctctgcttaacctctacagggtggtggaggcaggggaaatcctggaaacatattgtatctgttttgcttcctcctaactagtctcacaaatcagtatctcagtatttagaatggaaatatgatactcctctcttccctttcgaaaatgttgggtcgtagacttattgagacctgttaggtacctggcaatgaagtgggtgaaagtcatttttttggtgtgtttgctaagtagtaagttgacagtg

SEQ ID NO: 76603 - DNA, 1032 bp, Homo sapiens
tctggagaggccaggagaagcatgggatgggaagttgatattttagctatattcataatgtttctttcctttttgatgtgcagcaaacttgacagattaatagttattaaatctggatggctggtatgtttttgcatatgtcaaatattttataatcaatagttttcagttttatcgtgtagcagtttccagttaaatacgttgcattgaacatgtgtagttatttactttccctcatcaagccctatgccagtgttactcaaggaatataaaaaaaatgtatgaagacaggtaagggggaaagacataggagcagatttgaatgatcaacaccatttttgtcaccagagagaggggcatgaattttaatttaactaatttagtgacgtgaaaagagtgtcttgaatggctttactgagggattccaaaaaatgttgactctctgcaaccccaggattggagggtcccaagtagctgggaggattgcactaaggggtggaattagttttaagtagatacttggggtcctttccctaaccatagtgtaattatagaggctctggaaataggaattatttgaaacctttgttgctgagatttgttcccaggatgctggcagtcagacgggaagtggaaccattcttcttcagagacactgaaatgtatcctagaaatgaactacaaatatggcatttgtgggtcccccagtatagaaggggaaaccctctgtctgatttaagaaggaatggaatttatggtaataatatttagtagcttgtagaatcactggaaaggctgtagaactgggttcgaaaaataggaaaaacaagggaggccaggtagccaagacaacactcgttcccacaagtaggctggtgtggtgttgcccatgaacactggatgtctggcttgacattgccactgtcagtacttgcctgaggttgtcagtgtgcagcattggcactgcttctgccaccaccttccatgtaaatggattcgcctctttcctgctttctttagacactactgttg

SEQ ID NO: 76604 - DNA, 1023 bp, Homo sapiens
gaactaatgatggcaacctgtgctctgcgtaggtaccctcatctgattttcctaggtcactacagtcttgggaggggacaaggtgaaggctgctgggcacaagggaacttttatgtcaatattaaatataaggaaagcatctgtaaatgaggagatataagcaattgtgttaatcatctatgtgaaataattattcaaatcctataaatactgctaatcttataatctttagtactctctactttatacagccttctgtgatttcattttaattaggggatttagcacaagaacatcttacaggaaggacctgacatctgttggatttttactttttttggtgatttgaatggctggaggtttaacaaagtatagtatcttagaattagtatttaaacgtgtggtcatcatactgcattcccagatcatattttatatttttagcaacagaaagatggctttttttctcataagttttgtttctgattatgaaggtgacacatgttcatttcagaaaataaaaaatataaataaaaaaacagaaattactcataatcaaaagacaaacattgtcagtcctttggtgaactaactttgcccttttaatctgtctgcctgcctgcctgtctatctgtctatctataacatatcaaaatttgtaatgtattttcagttttttatcctgtattcttctgaaatatgggcctgtttgtccccagttatgttcaataggatgcatgatataaaatgtttgatttttttttttaagtgagtccatggtcaaatcagttaagaaatttcttagtttaataaaattagtggtggtagtggtggtgttttctgctttttaataaaaataatgggaactcactatgttacccaggctggtctcaaactcctgggcttaagaaaccctcccaccttagcctcccaaaatgttgggattacaggcgtgagccactgtggctgcagatttcttggaggctttaatagagcaacatatatcacgatgtcctaagcaag

SEQ ID NO: 76605 - DNA, 1171 bp, Homo sapiens
acaaaatttggagcagaaattaagctctgtaaagtataaactgtacattttaaaaattgttgtttatacttttatatagtataaaacatatctaaacaaacaactctgtcttataatagacaactttgattcactgaaattagcagactaactcatttttcctaatcagaaccttaaagcaagtcttcttgttgaaggagtacatcagtgtcagatgtaatttatcctctagcaccaaggtgtggcagagctgacctggctgtcactcagccgcttatcaccgggtagtttccatttggctgcctaatgcattcctgacttcactgtggctaagtctcaggtggggagggggtggagggggagtactttactaaagtatgctatacagctgatattatatgtaaaaatcatatttggctgatgaagctataatcactttattattatgttgtttttataaacattattttacaaatttagacttcagaggctattttagtccaacatagaagccaggtccattgctggaaaaatactggatcagtagaggaatcccattgtttgtatttagtaaaataagcaacatgccattgatgcttttctttccagtcctttctcatgcccacttctctttgccattttgctagtgagtgtatgtttatattgagaaccaggattaaatgacagtaataatatagctaacatgcatcatgttacttctttgtactttattgagttcctcacttaatgcccattggacattaaggtggatctgtactggtgatagaagtccaagtgatagccacatcctccttatggaggcacagactaggcagtagggctgcattcagattaacctgaattacttatcttcctttgagtatgtatgtgttttgtgttatttatttatttatttatttatttatttatttatttattgagacagagtctcactctctcacctacgctggagttcagtggcacgatctccgctcactgcaatctttgcctcctggattcaagcgattctcgtgcctcagcctcccaggtagctgggattacaggtgtgcagcactgtgccaagctaatttttgtatttttagtagagatggggtttcaccacgttggcaaggctggtctcaaactcctggccttaagtgatctgcctgcc

SEQ ID NO: 76606 - DNA, 1060 bp, Homo sapiens
tcgctgtttcccctcactaagaatgtgaaatttttattataatcattattgtgaaagtatcaaccaaaaataaaactatttacctggaatattttaatgatgacataattatttattgttactctttgtaccatcctggttaaaactcaagaaccagaactaataagaaaacttcacactaaacatttaaatgtgaggaatggagtaggtggaaggaagtcaaccgtatatggatataatgttaatctctccccctttcaacaaaaccttagctaaacagcacatcaagaaataaagcattatgtctcgtctgactagataaatagtttattcctttaggaaccaagttttatttaatgatttttttattcataataaaattttagaaacttatgggaacataatattgtgtgtaatggctaagtaaatgagctgattaattaacattaaatcagcagttaatatgtttaaatctggtactgctatatactacttctgactaagtgacttatcttctttaaatcaaagttgccacatgtataaaaaagaaggaagtacctttttttttttttggttgatatgattattagagtacttggcaaaatgctttgctttgctgcattatatcattctaatatggtgattgctgtattggtttttggcatcccggtatgctggctctaaaatattctaatttctggtggtttaatacctgtatttcagttcatccatcagaagctttatccactctacttgagtttccaattcctcttcccttcccctgacttttctcatcctgaatttgctcatcgaagtcttccttgcctttctttgacacacttcatctgtaactccctcatccttactccccttccctgctaaacttttcacttcagaagaaagagaaagacagttgtggatttgactagaagaacactttgtaattatggatatcttcactagcaaacaatggaagtcgatggctgataggaaaacaaatttaaagtgctacatcacagagcaagtgtagacatactgcccggggactaggggcctgaag

SEQ ID NO: 76607 - DNA, 1113 bp, Homo sapiens
tggtgaatttagcatgggaaattggaccggagtctccatccataccaatggaaccgatactgatgaagactggctggaaaagctatttgggaaataatagcaagagctcttttttaatgaaaaaacttgacacaagttcaaaaatatcttcctagcgttatctaaccagagatgagtttgtttaaagctagagtatgaagaaagtgttggaatttagtttataattatcccatcaccattccccaaattcagaaatatacttcattagcagctgggaaaagttacaaaaaaatgtagtcaggttttgataatgacacaccaaaagtttgaattatcattaattttacagtttttattattaacaaagtaaccttattaacacaatttgtattttgtctaccagtaatactaaaatgattgtttaatatttttagtttataaatttatattttatttacatttttgtaatgtttctatttttgttcttgagatatattaaatatttggttttaataatttgtgttgttatgaattcataacactttaaaataaagttattggtatcaatatccaaagtaaacacttttattttcttccagtattcagtccctcttttcaaagatgtctatgtcatacttcggatgagacctaaaaattagaggacttagacaaataaagaggggttatggaaagaatgttctcagcagatttttttcagatgataaaagactgtgagtttgagcacctgaaagagaagtttagtatcattggttttcaaaatttaagagggtgaaaggtgtgagctgaggctggagtgattgacagtgacaggttatgagaacctttgggtaaccatgaaaagggtacaagaacctaagtgttttaagtttcgtagtagttggtcagatttgcattttagaagggtcatctggcagggtgaattaagttggataaaaacaaaccagttagaagactactacaaacactcaggcaagtgatgataggataaatcagtggcagtcggatgagaaaagatggatttgagagatgtccagaagctggaattcacagagtatggcagtgggcctggcatgagcaactgggtgaatgtgg

SEQ ID NO: 76608 - DNA, 1039 bp, Homo sapiens
attgaggagaaggtagatgaggagtggttaccagagaatagagcatgtttgccacatctgccctggagaaacggagagagttgctgaccagggaaagcttgaggatgaggatgaattgaggttattggtgatgaatttatagtggccctatatctgggaatttctccagcagcagagaactgccatgccacctgcccattgtgagatatgtggggtgtacttgaggggttcctagaagttggtttttattagagtccatgaagtacgaggaccaggtaatgagtgtgactcacactctgatgcatctactgttgatctgtgctgcagcggtacaatatcctctgagggtatcaaagcatgttaagctctttgctccttcagtaaatggccccagactgctgtcttgtttctctttaagttcttgtctgcctttttgtactatttctgtctcctccctttctgttttcttccttgttgtcagttgttctatcacattgctgtctgcatgcaagtctgtatcagccctacaccctggactttgtcaacacctggaattatcacacctctgaaataaagctgtgagcttgaagaccagacaaccaagcttattagaattgtgtgcaaagtaagagtaaataatctgagtgtgtttctcatgtgctgtgctttgaggatatgcataagtgtctgtacatgaattttgtgacatttagtgggttatttcttatatatgagatgtttgttgcttgtattcccattgtgtttttcttcttttgaatttccatggcttatgataatagtcttagagagccctcaacatttatgattgtagcttttgtaattgtgctttagtacctgcaaagtattttcatatgcattacttaaattttaaactacatgattcgatatttatgctattttttcttattattctcatggattttcaaatacttatattttgtatggaaataacatgtattttcaaatgtgtatgcattttgtgtgataatgagatattatgtcacaatccagtcattta

SEQ ID NO: 76609 - DNA, 1048 bp, Homo sapiens
tcttttttaatctggtggaatccccctttcttcaaactctgttctcaatatgtttagaatgtttttgaaaaacaaaaactaaaaagccctggcacaagccttctcttaggcaaggaagtgtgcacaaatgtagcctatttaaatggtgggagatagggagaaaatacaaatttattttgagaaatagtagagtagtaatctgtagagtagtaaaaaactcaacaggccacccgtgttcagtgttatcttctctggaactaaacctgtgtagccaagtctttgtttttataactaactgaagaatattaatatttgttaaatgtttacattttattgataaaatttctgagtgacaaccttaaatactgagcagaatgtaacattttcaaagtgttaggtagattttctaactttgttttgtcttattttacctaagaacactggaactattttggggctgatgagaatcttggtccagtggctgtgagcattcgaagggaaaaaccagatgaaatgaaagaaaatggatctccgtacaactaccgaataatttttagaactagtgaggtaagtcgcaaatgagagaggtttgaggtttaactgaaatggggaagaaagcaaatagtagcagtagcaaagcaattaaatttaatagcacatggttacagctgtctttggagtaagcaaagtcccctttcatttattctggtggagatcgaggtggacaagatggttagatctggacctcttcttttcatcagactctgaatagatgcagtctatgaatgaggagttttgattcagagaaagatatgtccattaagtgtggcccaaggaaattggagccctcagatccccactgggatattgtgtatcctgcttagggctactggaaagcgccaagccaacttgaggagccaggatattagatataagagaaggccactgaagacttaattcactcttccaagctcttgctgagctcatgtcttcgcccaagaagaaggagggaaagagattcttgacttcttccactatctttgggacc

SEQ ID NO: 76610 - DNA, 1072 bp, Homo sapiens
atagtgacatggtatagccatatagagaccttgatctttactgatctctttaaggaaatgttattttttgtctttaaataaatatcctcagaagtcttgattatgtgctcctttggacccaccctggtcttgaaagcattggtttcatttttcatattacagtatcctacatcacttttctcattctttctccctcactggctttacccatcaaaaatcattccctagctctgtgaggagccccacagttcaggcctgcagtgcatgtacatgtgttcaggcatctcacatcccagaagcctcaccacagcacctgtctctcttgcagctcatgacactgagaggttcggtcctggaggacgccattccgtcgacagccaagcactcgacagccagaggcctgcctctcaaagaagtgctggagcacgtggttcctgagctcaatgtccagtgcctgcggttggccttcaacacacccaaggtcacagagcagctcatgaaactggatgaacaaggggtgagtttgcctttctgaggagagcattcttgctcaggtttattgctaggcttccggaatacagaccttaatgtttcttgttttgatggagataattgatactttttattgtgaaagacactctctttgcaattactcattttgttttttcttaactctgaactctgaacatttctcatctgatgaaattctgcatgtcagaatttataaataaggcactttaaactacgttaaattcttttgataatcttccatatgtacggtaagtttttcgagtgtccaagaataaataatagcagtaatcataataatgttgtgttaatgacaatacagtaataacagtaattaataataatgagcatatttgcaagccccttttctaagtgccttaaatatgttatctcatttaatctccctacactgtgagaaaggtactattattattcacattttagagagaaggattctgggacacagagagattaagtaataaatccaatttcacacagttagtaagttttggaaccagggtgcaaacatagtctgcctcaaagt

SEQ ID NO: 76611 - DNA, 1046 bp, Homo sapiens
aaaggacatgaactcatccttttttatggctgcatagtattccatgcatttcacccctttcttatacaagatataacaggctgtagacacttgcttttttcatttaggaatatatttttgagatttttttcgtcagtacatagaaaggtttcccagtatttttactactgcatagtagcatagtattttgttgtactgctgtgccatagtttatttcatcagtttctctattgatgggcatgtatgtgtagatttaagtccttttctcttacaaacagtactgcaatgaagactttttctgtagaattgaaattcatctcaatgtcaaaaaaatcaggtacctttattatcaacttaatacccaatatgaaactttttatctttgtgagaaattttgcacaataacattattaggtaaaattattgtgtgtggattatttcctttacattatgccaaagataaaaataggttagaatatgtctgtgtacttatatataaataattttgaaagcatctgtcaggttttttctttttacaactttactatttagtatccatatgtcatttttttaaaacagttggatttttgttagtaattcccaatgaggatatacattttctaactggcattttttgctctcaatacggaatttttccagtttctttgtcattctttttggaggacagtatagaaatttatcttcaggaagtagttaagagagttatgtatatgaagaacaaatcaaagcaaataatgtgaattagaacaattttttttgttttattttaatgaccaaggtctttactttcagtaatggcaaagttgcttattgcagaccggcccatccattgagaataaccaggaaaattgaacaaaatatttttaaaactaagtttggactctggattctggaaagatggagtagatgtatttctctgcgttcttcctgctaggtacagccaacaaccttggacacatatataaaacaaacataaaatgaatctgaaaggtggagagaagcagcaggctggttagggaccttga

SEQ ID NO: 76612 - DNA, 1051 bp, Homo sapiens
attacgtattcacaggatctagggattaggaagtaggtgggtttgaggagaaattactctgcctgccagtcttctatgaaaaagacacaaagttcatcttgcaactcagttgaacaagtgcttttccttgagaaagctatcataaagcactttagtaggcaacagatgctttatatatacgctgcatttcatcacatggaatattaaaaagcatatactcaagtgtctagatttaatacaagttaatattttactgcttcatcaaggacattcttaactgggtttttatttggggaaggggtgagtgtatagcggagaaaaagaatgcaaggagtgctggtatagtttggagccactgcttgattcatgcaaaagtgccagcagtttgactcaccatgagtgcatatgtccgtggaaaataccagattgactcttaatagtgttttgaagatagttttgatgtcatgatccatcactccccacaagaaggttctcagagatgctcaagagttcacagtccacacttcaagaactgttgcacaatgaaatacctcatagtgactattttaaatttctaaatttaattaggcaatagtagaggtttcataagaatgtaagaattgagttgttctcatcgtttgttctaccccagtggccgctttctggccatgataccagggaagatgaggtaaaatgcaaaacttctgaagaagactgagaacttggttattcacatctctttcttctggtacagggctgtgactttatcgtccatctttccaggaagttatggctgtttaagtcagattgcactgtctgtttctttctttctacttttttttttttttttgagacggagtcttgctccgtctcccaggctggagtgcagtggcgctatctcggctcactgcaagctcagcctcccgggttcacgccattctcctgcctcagcctcccgagtagctgggactacaggtgcccgccaccacgcccggctaattttttgtatttttagtagagacggggtttcaccgtgttagtcaggatgctc

SEQ ID NO: 76613 - DNA, 1035 bp, Homo sapiens
gcctattgtatgagaggaagagcaaatttatgtactgttgtttcccagctgtggaagctcacaacacttttagtaagtgttgaaagacccctttactttgttgagatttaagaccttcatctcaaatatagcccttgtcccattggactgaccaccatcacttttgtatgtacaaacatttattgagtgcccagcacttccctcagtgcttcatatgaacagctgatctgcaggcatgaattatggtaccattgctaaatgacccagaggttatccaaagcaaaatgctaaactgtggataggagggcttctggtgtcatcataactctattttgatcattaccttaaagtattgtatatgtagatccataagcccacgtaggtatgtttgtgtgtttctgagacaataaatactgttttatataacctcaaagcaatccaaaatccccacatcatggctttacaactccatgtacattagctccttctcttagaatgttcctgattacatttacttaacttctgcttgtcaacatctcattctatctgggagcatggctgctaaggattctaggagcctgagttcggagaatgctacctacctttgatctaattggagtagaaatcaagatacagtcacattgtcacctttgaggatacagcaagtgatatttgacacagtttcaaaccagaggaaacttgacattgtaaggaatttcctaatcctcttaaaggatcattcctttcacaactggcaaaaccggtttgttctgtcagcaggtggagctcactagggtatagaattcagtcaaaagaggcacattgtcctgtccttgaattctgcttgtccactactttgggggatgttttcttatcttctttctgcaggaaacttttttttttttaataaatgaatctaaataaattaatccttttgagtgttgcacagtgaaatcttaggcctctatctatgaagttttaaataggcacccacaaattcagtgtcgctgtaatgctttccattagtcagggtga

SEQ ID NO: 76614 - DNA, 1523 bp, Homo sapiens
gataagaattgtcccaatgtcattggagaattcaaagtccaatttttttttttttttttttttgagacagagttttgctctgttgcccaggctggagtatgtggtacagtcatgactcactgcaacatcaatctcccgggctcaaatgatcctcgaacctcaacctcccgagtagctgggactacaagtgtgcaccaccacacctggctaatttttgtacattttgtagagacagggttttgccatgttgcccaggcttgtctggaactcctaggttcaagtgatctgcccccctcagcctcccaaagtgctgggattacaggcattagccactgtgcccagcccaaagtacacatttttatgttgaaaactcattgcttgttaaatgatcagtaacaccttaaaatttctttgcaaaatgactggacttttcaatgatgaataaatgttttgattaatgttataagtaaatctcttaatccttcattttaactgcatttgaggaagaaatatttgccattagctgatttgccattgtgaggcctcttttaaagtttctctgcagacactcatcctttggaaaactatttgaaagagaagttgctctaagtacagtattgatgatagtagtgctgtaacaaagatataggcaaggtttataatttaatatattgggaaaagggtattgggagataagtcttttctaattttacaaaaaaaaaactgcaaaaatattagtggaccttttagtgcaaaacagtttattttaaaatatgttttataaagtagacctctgcttttaaatttgtaaagacctcccttttaaaaggggggacaccataaaaaaagaattgcctttagttaccaggattttttaataacctcattttgtactttgtaattgattaacagaaatttcctatagtaccaacagatctgtttaatggtgcatgatctttacatacaggaaattttcatttatttttctggccttttctcagttcatgaagttcgtagatacttgctccacttaattttggatcaaagacggaaaatacagaaggatttcaagagaagaaaggtgttagctattttctgggcatgtgccctataggaccttttagcatttgactgggacaaagtggatctgcctatatttatatgcatcgtattacctgccttcacagctgaactaccagcagaaagtaggcatcatgtactgcaaagctggacagagcactgaagaagagatgtacaacaatgagtcagctggcccagcctttgaagaatttcttcaactattgggagagcgagttcggctcaaaggatttgagaagtatcgagcacagcttgataccaaaagtaagaaatacttacaccctcctactaggcttattttccccctgttgtgctgttgtgcatctgctaaattatccgtaaagcaacattgccatttatcgcagaacactgctggtgatgggggagagaaagccagagagggaggatgtagcaccagaacagtt

SEQ ID NO: 76615 - DNA, 1982 bp, Homo sapiens
cttgagtagattaataatctttaattattggtatgttctgtagagcaatcaatacacaccagcctttattttcataacgtctgtttgtatatcatatttagaaatgaactcagaaataaattgcttcattagaagacaatttgggatgctttcaaattcctgaggttaaaagtgcatttcctgaacattctaactcccaatttgcaaccctaatctaaaaggctattatttctcccacctggcagccaatactagatcactgattttactggtttgcaatttgtatgccttaatgtcaccagagaatatttttttaaatacaagttttgtaagtacaagcttatgtctaatggatagtttatataaatgtcacacttagttgtttttcttttttaagagcctccgtacagtaagtttgagaaacacaaattttgtttggttttcctttacactattgaattaactgctgaaaggcactgacctaggatgatttggggtgcctgagtttgaaagccacccatccaaaacccagtgaatgtgaaacagagggtgtccctaagcagctttcattgcagttaaagaagctgtttaaacctgaaatttacctgcttttaattgttgcaacattctggaatattattcttttctacatgcccagcttgtgacacaaaacatatatcagaaaacaccttagccacattttctttcaatgaggccagttaaaccagaacataaattacattgtaattatttcagccattctcatctctaaaaatcttccctgtggcacgtgtttttcttatgtgaaaatggaacaacactgttgttatagaaactgagggtttggtgatgttgggacctggcataatatgccagatattgggtagatctatttgaatggctgtatcttttatgcaaatttcagaatgttcgtttctatgttcttccttagagggaataaggcaggtgaaaacattgacagtacctgtgtagattacctaccttcatgtgtactgattaggaatggatgttttaaatacagctatataagggaattggggtggcgggggaagcaaatgattgttatttatgttggttgcttattttttcttgtagctcctgaggaagcggcacattggaaatgatatcgtaacaattgttttccaagagcctggagcacagccattcagcccaaaaaacatccgatcccacttccagcacgttttcgtcatcgtcagggtgcacaatccgtgctctgacagtgtctgttataggtgtgtatgggtgtcacagcaggggctctgtggatgttggctggttatcgcatagaggccccattcagctctgcattctaaagtggcaatgggaagtctattactatttctttttgtctttaaaccatgcatgcggatggctgaattcacatgatgatgtaatctggtggcattgacattacccaagcatgttggttagacacctgccgtttccatttgcacctccttcttaggtgatgtccttcatccataccatctggtcaccaaccaactaattactcatattgctaattatatttttcttttggcatggcaagagcagagaagaacgattataataaatagggaagagaagttaattttttgaaaagcattgttattaaagaagcctaaatccttgcctctgacttacttgattcacgttagcactctgactacaagcttagaaacgcttctatactttatttagcattattgaaattgtttcagtgttacttgttgacgtagtcacatgagtatcagaattcaggcctctatctgcagagacctttcttgtaagaatactagagttaggagttgaaggagatagggacctgtcacgctagctcgataggggtgtagtgccagaatgtgtaagggtaatgttctggcatttgtaagatgtttttaatgtgcatcagttcctttcaaaatatggacatttggcgt

SEQ ID NO: 76616 - DNA, 1039 bp, Homo sapiens
gatggataactatttgcatttagaaaatactctgagcagttaaaacatgctatgtactagattcatgcaaaggatttcataccacttgacaggtagaaagttaagcccattttgaatgggcacttcaaagtttggggagtggaaagctatgcagtttcttttaaagagagtttcttcttttcaagcctttgtctgaatcagtaccgtccaatgggactataatgcaagctacatattaattttacattttttaatagccagatttttttaaaaagtgccaagatatagatgaaattaatgttgacactgtttttgaccaatttatacattttatttactcagtatatctaaatattatttcaacatgaattaacatgtgatttcagcatttaacaattattgtgacatcttacatggttttttggactaagtctttgtaacctgaagtacattttagacttaccgcatatctcaattagaatgctaaattttcattggtgatacttgatgtatatttagatttcataaaatttataatgaaaaggtagatttaatatacctagattcttccaaatggacttttaaaaatctttaaaataacagaattaagtatccatttttaaatcatatattaattaaaatttaatataatttgatattccttggtcacactagacacatttcaagtgctcaatagccacagctggctgtggccactgtaatgaaccacacaagtctaaacagactgctcagggaggtatgttctccttcttcagtgctttgtttttttatttttatcatccctcccctgaaaattaggatttttgctttctctctcttatttttaatctgttgcctggagagcccaccgtttgaaccccatcatttaatgctagaagtctttgcgggaagtgggatactgaacacccctgctcaagacatgtgggcaggtctggaatttcctagttaccaggcttgtttgaaggcccaacacacagcttttaagctgtgaattttggcctgtttataaatccaagaa

SEQ ID NO: 76617 - DNA, 1075 bp, Homo sapiens
attagccaggcgagatggcgggcccctgtagttccagcttctggggaggctgaggcaggagaattgcttgaacccaggaggcagaggttgcagtgagccgagatcgcgccactgcactccagcctgggcaacagagtgagactccgtctcaaaaaaaaaaaaagtctttggaacattttcatgtgtcagcttgaagttggctttgggtatcaacacttgttatttcattcaagctctttgatgccaaccaatgttacatggcccatatcgagtagaaatagcctcatcatctcttaggccatgtgacccatgtgaatggtcccttttagcaggcacctcaggagtaggaggtttgaaagcacttcctcagagggagtaagtgtgggcttgtcgtggagcactctcttggctgtccagaagcttacattccaatcctggctctctctaacaaatctgggtaaatccttttacttctctgtatctgttcctggagaagtgaagaatttgtaccagctgctcaaccggaggttcatgaagatgtcaaaccacagaatacaaacaagacaccttcctggtcgctcagtgtacccaaagattttggagtgagaagatatttttatatgaaaatgaacacaaatatttttcagtagaatgtaaaatcgaggtgaattttcaaatgaaacccaaagattttactgaaagaatttgaggaacattgagttctgttaagttcccttcctgtgataactttccatcactgttttagcctctagctctgtctgtctgtcatctagataaccctgctgagtagaacattccagtcctcaacaatgctgggtaaataaagcatggctatgattttaaagcatgtattatttccaagaagacacagaattgccaactaggctaatatacatacagccaagcagaggccctttggaatctgcttttaaaaataccaagaaccgtttataattaatatatcttaagtaactacatgcagcaaactgagattctagaaaggctttttttctaaatattctgtttagcttaaaccaggccttattatcaagag

SEQ ID NO: 76618 - DNA, 1054 bp, Homo sapiens
aactagactgccttttagggatctccaatgagttcattgtgctcattgaacaggaaacaaagagcgtggtcttcaattgttcctgtagagatgtgatagggtggacttcaactgacaccagcctcaaaatcttctatgaacgaggagaatgtgtttcagtgggtagttttattaacattgaggagatcaaagagattgtcaaaaggttgcaggtgagtctctccttcctcttccttacatgcagtttctctttcataaagttttcaatacagactagagccaagttactgaaccttgtgctctgttattagctcctctgaaaactcccttgatgtgtgaagcaaacagagtttatctcatgcttgtgttttccatggatgtttcggaaaagtagaacaaattggggaagacacatttactctgtgtgtgtgtgtgtgtgtgtgtgtgtgtgtgtgtgtgtgtgcgttcatgttcaaaacccatttgcatgtgacctgttccctggtgctgcagtccagtcatctggtggtggtgttgaaaagaattgcttgagtatctgctgccttgaattttacaaaggctaaatgagtagcagtatatggtttctatttactgccagctccctgtaggtctctggtagaggtttccttgtaacttcagggaagccgttgagctttttggatgcaacaagtatattccttttggcctaatgaataggagattagtgaagaggaaataaccagactgctcttcagctggcaataaggtattcagaactaaccctgcttgcaatgattttccagttccatgtccaccacttaataccctattgctttaaaccacagtatcttttatttccttgtctagtttgtttcaaaaggctgtgaatcggtggagatgactctgcgaagaaatgggctaggacagcttggcttccatgtcaactatgagggcattgtggcggatgtggagccctacggttatgcctggcaggcagggctgaggcagggcagtcgcctggtggagatctgcaaggtggcggtagccactctga

SEQ ID NO: 76619 - DNA, 1058 bp, Homo sapiens
gcagccatctcaagtctactcctccagtgctccccaaatctgcccacttaagtaaccatggatggatccaacacagtccattttgggtgaaaacactaatttactgcttgtagaagcatagtttttctttaatttgtatgtagtatcccagacttaaaggtcattaggaacaaaaaaaataaatctgcataatatttttcctttaatatcaaggtcaggatttttatgacataaaaatgttggtgttttgagttttaataaaaattctttagttggatgatgttctttatacatagttaagagaaactgacacagtaagaattgataatccatttggcatctaaatagaataaagtctaatttctatttggtttaaatatatgagttttatgctctccaggtggctttctgattacagaattttacagtatttgtgagagtagtagttattaacaattaacattcgttcaacagaaataggtaatatgatacggtcactattttggcctcaaatttacctagagcttaagggtaggattgaaataaaaattgctggctgtggcacgctgaacttgatacattactgtgtttaaacataatgcgggatcagcaataaaaccctgatctgtgttaatatgcttataaaagttgagctatttgaggggctttggataaacaacagacatcttagcatgtaaaatgattttcttttctcctttttttaggctggtattaccagcctttatgtaaatatttgatgttagagctcactgaacacttggtacttctgagttttacctggatgtcattgttactccccttgagacccctgcacttaactcttaagaagctggatggggggccttttttgttcacgcagttatggcagctgcgtctgcagcctccctccctccttccttacagacaccagcaccatatagggtgtgaatatggtggaaacaaacttaaaagagttctcctctcagagagcataatagtcacgtgaccattcagtcttgatttttaaggaaatactttttaagtttgttatatcatac

SEQ ID NO: 76620 - DNA, 1074 bp, Homo sapiens
tcacactagttagaacaggcattgtcctaagttctctcaccatcatatgtaagatggatgatactcacatgggtgtctgggcttaggtgtaattctatcacctgtaactccatccctttttcttgcattttagaaggcatattaactttcagtctgttacagttgcttttattaaattattcacaaattttggcacttcattattagtgaccaactgttgttcaagtgatctagccccaccatagttgagaactcctgatttggggcatctgacataactatggtacttgtcctgaatcccccttctcttcttcattttctacaccactgatagggattctccttcattcaaaacacatgttaagcactcagaaatgtaaagataaataaggctcagtcctggccccttaaagacagaatcttaattcacattaagggagacacacataaaataaccattctgtatgacttggtgtaatggtgcaaagaacagattgtcatgggatttgaggagattctaatctatgaattcaaagctatgatgttggcatcaggcctttttatgtgagtagcaaaggaagaaggcattccaggcagagagaaaaagatgaataatagtgtgaatgggcagagtctgagaactgggacaccttgactttctctagaatgtagggtgtgtggagccattaatggggatggagatgaggatggggtttggtcagatggttcaaggccttaaagagggtctcagggatttggtcctctatcctgtaggcaaagggaagctttgaataggcttttagcagtctgttgacttgatggaagagggtgggttggggctgctggaggaatggggtggagagagcctggaagttgagagacctgtcgggacacttggactgacccaggctgcaggtgagagaaatcagaagcccctcagcaggttggaaactagatatcttctttgtctttgtgttatcaggaccagcaccaggtgcctgacacacagtttgtgctcagtaaatagtagttgaacttaattaacccaattgactgtggaaagtaaagacagag

SEQ ID NO: 76621 - DNA, 2709 bp, Homo sapiens
gatgggggttggaacttggccccaggtcttcctattgtttatctcctgcctttctgtgcaccacttcctggttttacccatacatgtatcagcctatagcaagaagacaccccacaagcatcagttcatccaggcccatctcaagccatcctcccacctcagcctcctgagtagctgggactgtagtggccaccacaccaggctaatttttttttttttttttgtggagcctggggtctctgttgcccaggcaggtcttgactcttgtcttcaagtgatcctcctgtatctgcctcccaaaatgctgggattacaggcgtgagccactgctcctggcccctatttggtcttttattatatggattatgcataaagttcattagtaaccacatatatattagtaaatttccatatgaatgtttaaattctacactctggcactttttcatgggctcagtcagtatttactttgttgatattgctagtcaaggcatatgctttaattaagcatgtattattattttacaaagggaaaaataaaactggctcactaaatagctaaatgttctttccagaaataaacatttgcctttattttttgccagtttacctgcttccaaattgcccttcccaaaggcagtttaaaatttatacagtttgaacgtggtttctacatgatctaaatgatagtaatctttgtatttcagaccacaaagcaagtactcagaaaatacttgttccaagaaccactgacttaatgatttagtaaactaccaagttaagagaaacaaacctccacagtataccatttggaagatatatatggaatattaatatttagtttgtgaactttttcttttggctgtgagtaagtctgaacttggctgtacgagggcttagaaaattttggtttcttatactacataccttaggttagctcagtcctaatggcttccgccctcattgttacaagtttgtttacatagcatgcatacctttttgagcagagtggtgtatattgaccacaacatacacatttccacacccacgtaaacacgaaccagggtgtgtatacaagtacagacacataagcaaaaaccagtagtgcctgtcattaaaatttagttcattacacccaggactgccttcccctcatgggtaaggtccctgatgttgtctttgcctttgcggaaatcaccacaggtttggagtgagccgtagatccccagcctccattgacaggcagaacacccagtcagatattggtggcagcggaaaatccacgcctagctggcaaagaagtgaggatagcattgctgaccagatgggtaagtaatcaatttctacaagaagaaagttgcttttacaaggtgacttaggtcacctcttgatgatgttatcaaaacattgttataaaaggtagccctagttaataaatatgaattagaattaagtctctgttagattatgtataagtgaaaacaataaataagacctaagagaaaaggaattctaagtgaccccaaattcaaaactggaaaggcgataggaattattttgagcacctagattaaaacaccagactaccagactaagtaccttcctcccccttgtttatttgtttttgcctagaataagtgccttgagagattgcttggtatacttaatgtcaatttgaaaaacaaaactactaacaaagtggaaaagagatacaattattgtttagtcacatccgtagcttgcttagaatctctttcctccctgatgtgcttttaaaaaaaattcttctcactctgctattaagctgtcagctaaggaaatgtcttagcagtatgaaacagctgggtggaagagatttgcattggtgagcttgtgcccggatttctactgcatagccctttctttctatatatatgttgtttcacagtgacaccataacactagttgatacaataacattttgccatgaaacaagattttcaacacaggagcctcagggatttggtaccaacacagttggtgcatcattaacttgaatctagattgttagactgttggattttttcctcctttgtttaatctctagttgcatcagtgtaggataaaaaggtgtacatttcagggctgaaaaagataatcttataagacaagacccatctgttaatcttctctgcaaattcattgttttgtcctgttttaatgactttgcccaagtaagtgtactaaccatggacatagaaaggagtggagatgtgttccactaagacaggggttgaggaagagaaatggagttcctaggttctgaagatatgctttgttccagtagcttcagtgagatgtgccttgttattgaagccatctgtcattctccactcttatcctacccacccctacacagaaaacctgagcatattctgatctgcttttctactcttgacagaatgttttaaatcccatatgttttgatactgttgagatggtaacgacacatgtgaaaaggatcccttcttcagcatgactttagcggctttttttggctcctagtgcaggctttgaacaaggctgccagcaagccctttgtgaggcatgcagtgtcatgcctcccactctcgggaagtcacacggagtgagaagggatggaaagggtaattacaaggttcttcctagacccctgttcattctctcacacaaacctccctctagtctttt

SEQ ID NO: 76622 - DNA, 1036 bp, Homo sapiens
tgctattagctatagtggtgttatggaggataaattctttatctctcacttttggaaccccatcttgaacgccagcttggagtccaaaaggaagcaattgttttaagtaaactagttgctgtgtgtcttttctgttgtgctcagcttacagttatagaggacctcaggatttcaattcttttgtcctcgagcagcatgaatatacaggtaaaatatttccaaagtgtcatggtaagtaacacgtgattgcatccatgcctgtctaggtaatgtagaccaagctaggttagccacacttggcaatgaatgaatttcataaatttaattcatataatctaaatttttcccccaaaccaaaagttgattctgaactttgctgcgttgttcatggcctttggtttggtggtacttggctatgctaatgtgtatgacgtgacaagttgtcaccagctgcaagctttatccatcagccacttaagtttctgacctgctgtctatcaaatagactcttaacaagcttactgctgaaatgcagagtttgctggtcagtgaactgaaagatgcaatggcaagccatcttcatttgtcaccatgtgcttgtttctgcttagtgcctgcaccataatgtcctatgctgtattccagagccaacatgccatctcccagcagtatcaaaggtactgccagctttccgagagagccccagtgggagattaatgcggcaggatccagtggttcatttgtctccaaacaaacaagggcatgtaagttaactgtaaacttaaaaaagtattagattcctagcagtgtaccttccttgcactatgaaaatgctctgctctttcctctgcatggccaaagaggaaatcattctggcaaagagtggtcgtttgctgccatggccttgcagtttctgctgccatggcctttagattgctttgagataaattgtaactcctcattgctgtgcttctgccacccccacaggtctggtcatctgattcagtcactaacaatcctgaaatgttaggagtgg

SEQ ID NO: 76623 - DNA, 1042 bp, Homo sapiens
ctttttttttttttttgagacagggtatcactctgtcaccaaggctggaatgccgtgcagtggcacaatctcggctcactgtagcctcaacctcctgggctcaagcgatcctcccacctcagcctcctatataactgggactataggcaggcaccaccatgcctggctaatttttgtattttttgtagaaatggggttttgctgtgttacccagactgggcttgaactcctgagctgaagcaatccacctgccttggcctcccaaagtgctgggactataggtgtgagccactgccccagttccaactttattcttttttgcatgtgaatattcagttgtctcaccatcatttcatgataaacctaattttttccccattgaattgccttggtacctctgtataaatttcacctcaaagcatgtcttagaaggctgtctcctaaacagaggctaattggggaaggaggtctctctagacataagtcttatattcagccttctatttactctgaacaaatagggcttttagaattaacatgctttctaattataatccctttggaaatgtcatttcctttctcttttaagatactaaaacttcaatgacaatttaaatttcttcctgactaaaataatctcaatagtattgatactttagcataaatcaaataatgaaaaatagattaaaaaaaaaaaacacgtttctagtaccctttaccatggatacttctgaatggaccatagtgacataggttccctgtcttactgtgactagtcattattggaacttttaggccttcagagccctataactagaaattaatcacagtgtcatttctgttattctcttgttcaggaagcaaaactttgcactcaaataaattctgcttctcttgcagtctgatagccactactcgagccactccagtagcaatactctctccagcaatgcgtcaagtgcccatagtgatgagaagtggtacgatggggaccgcacagaatccgaactcaacagctataactatctgcaaggcacctctg

SEQ ID NO: 76624 - DNA, 1032 bp, Homo sapiens
gacagagagccacggcctggaccggaaaacagagtcttccctgagcttagacatacacagcaagagccaagccggctcgacccctctgacaagggagaacagcaccttcagtataaacgatgctgcttcccacacaaggtaaccacccttccccgctgtctgattcccagcccagacctaagcccagttccctggcctcagcccactttactttgctcaatagtgtataaggaaaggaggtttttctgcagtgacaattatttttatatgtttaatgccctttatttgccttcaaaatactttaatcctgcaattttagtgcattattttaaactgtgagaaaattttgcagatttattctttttaaagttggatttgatttttaaaataatgttcctggctactacaatttgagaggaaatttgtaattttgtaatgttggctttcggtgagtaatagggaatgtatactgggacaagcttttgaagactatgtttttaaaatattgaccatattgttaaaagacagaggtcttttctgagtaacagagcatcgtttgcgatgccaagcacgtcctttacgtgcctctcaagccgagaacctcacttacctgatatttacattgtaactttttttcagtaattggctcctggcagcaatgggttgagagtgggggatgtccaatagaaacgtgtagctaaaattagacatacctttcagaataggaaagtacacattcccctgtatccttggagatcacacctctagataaaataaatactatttgtcgtttcctcttgattggagcctaaaatccccaatgtgacaagatccacatagggaagaagcattccatcactgtctttttaggcctgttgatctctgtgtggtttctccttttatcttcgattgttgtcagtcattgatcaatgtgtgagaccatctaaccttgctgtcttctgggtctgctatgattatgaccgcaagaaaaatagtagaggctgggcgtggtggctcacgcctgtaatccca

SEQ ID NO: 76625 - DNA, 1334 bp, Homo sapiens
gcactccagcctgggcaacagagtgagattctgtctcaaaaaaaaaaaaaaaaaagaaagaaagaaagaaaaagaaaagtaatagagaggcttaatttagtttttatttttcaaatggaaatctaggcacataatctgtcagtaaaccccagataaccttaaggagagaggacatcctctacttaatttggattgctttcacttgaccagctaagtattttgttttctcatggagtctctatcgctacttatcattgagcttcccttcatttaaaatgtcaggccccatggaatgaagcctttcactagttttgtttctgtttaccactaccacattgcagatctcaaaatgatggtgataggtctggaaactccatggcttccaagcaaaaggaaattgggaaagtagtctcagtattcttgagtactatgtattccgttccacaattcagaaagtagattgtttgattcaaatggtataagagatgtgtttgccaaagtagaacaggaagtgggcatcagatgccataaccatatagacagaatcacacaagacagaatgatgacactcgctggctgttcttggcacatccccatctcagtagactgtgcattgacttagaacattttgcatatctgaatagtttctctctggtttttaagtttagtttgactcctatttctttggttttcaatttgtcattttgaaaggaggatgcctttttttaagaatgtcttccatctgaaaatatttctctggtccaatgtgatggcagaagaaagttggttatagagatcttgtctcaaatggcatcaccatggagtgagattggaaagagctgggcccctgaaaccaaagcacagaatgtgcggctgtgccattatctaacaaatcccaggggatcaacaaagctccctgaaaaaagcatctgggtttgcattatctgaatgtgctgactggagctgcctgaaggcctcaaaggattatctaaattttctgcttctaactggaagaatgcagaatcattgaaatcatcctttagaaataactctcctattgaaagtcaaacttactagagaagagaagaatgtggccattcagggagggtggcagagcttctcacccactcatttgagtcacattcatttctagactctggtaagtagggatgttttgagactttggtatgttgatcttggcagagtgagttggataatcagagctttagcagcctgccttttctggaggaaaggggacttagccaccaaatgcacattgctatagaaaaactaaaatcacagcaaattagagtgtttgtgtcctcagaagacag

SEQ ID NO: 76626 - DNA, 1697 bp, Homo sapiens
tggtttcatttgagcatcaggtcaagatgagaagtttggacagattcaggctgtcccagatcctcggtgacctcactacctctcttctttttgaaacagtctggctctcttgccaggctggagtgcagtagcacgatcttggctcactgcaacctctgccgcccaggttcaagtgattcccttgcctcagcctcccgagtagctgggactacaggtgcatgccttcacgcccggctaatttcttgtattttagtagagacggggttttaccttgttggccaggatggtctcaatttcctgacctcatgatccacccacctcggcctcccaaagtgctgggattacaggtgtgagccactgcgcccgacctcttttatatggggtatcatgtacttgtgtatcctctcttccttttcaaaattaatatcctgacatgaccagacagaatctaaggttgttcctttttaggaaaggagaaatgccctatagcttatagaaaaattaaagttagtagtttcttcatgtagaatttagagacaacttgagtaaatttctagtgattccaatttggccatactcagttaaactcacttcttatacattgagaaaagtaacatattgcagttattatttcctgttacatctaatgctcttttccttttgttagatattattggttcattcccttcttacgtaattcctatgacaagatttaactctctgtgagtaaaatgaaattgcagcctattaaattaacatgaaatttccaggataatgaaagagcccagccacacagctccccttaaaaattatgaagctgatagcttcatggtagttgtattgtaatttaatctacttcagagattcttaggtgaagtgtatgggtgcacatcccttgacgcagtctcaggccagtgggttggtcagctgcaaggagcccacccacagctgtgcccagagacagactcattttagagtgggaggagttgaggggctaatgcagtatttcttcaacccaaaaaaacatgagaatactttggaagtgtgttaaaatacagatttctggggctctggaagatctaacacaagcccaggattccccagttacatcagtacctacaggtggccatgttctgtggcttgagaaacactgctgccgcgacttcaccttcttcacctagacaatatggaactggattttgaccgtcataacaatgtgtgtaattcaactggatgagagtgagcagtaggcctcagttggtgtgaacacttggaggacattttacctaatcttccaggcatcattcctcctttactaaattaaatatctaggattgggacacaagaaagtatgctttagaagagctcccaggtgacgctcacaggcccactgaattagaggccctgtgtactgaagtgcacagcttcatgctgtgagttgtgtgcattaaagaagaaagccataccagtgaattgttcatttgtttctctcataacctttgtgcctaaatctaatcaattaaatggggctgtctcaattagaaccactagtgaaaagaagtgcactggcatttcacacctgggagctagtgtcagcccattgtgttcatagataaaaccaaggatcggggttgatcttatttaaccagttatccttttaagaatacatgtgaaagccaggtgtggcagtgagcact

SEQ ID NO: 76627 - DNA, 1065 bp, Homo sapiens
ttgccacacccccaaaagtaaatgtacagctgctgcttcaatccagcaatctaagtctacccacacaccttcagaactttccaaactctcttgacttcataaagccttctattttatgctcagaattccagactgtaaatgtcttctctaaaacccagtctctctgcaccaagtcctgaatacctgtccagtgtgtacgtttttgtgttgtccagacctttatgtgaccacatggaaaggtttgtgtactcgtctcagcttgtaagacctttggaaactcacttaaggctctctcctttcttgttctataaagtgtggagtctcacgcccccggggattggaatgggtgtttattgagctgggcctgaagttacgtcactctgagtataggtatttctgtctgaggtcttctgggtctcctaggagaagggagtgcacccccagaaaggtcatggctgcaaactttgaagtcttctgttctctaggttcttaggtggatgatttgtagtctatttgaagagactagaaagctttaagaagaaccttgagaattgaattgattgaaatggaagctagaatatttcctaaaccacacaccagcttcagactgtgatcagagtgcaagaggcatggcgggtggagcagctgtgtggggctgccgccctcaggcttccctagcaccatgctagcgtgtgtgtgcgtgtgcatgcatctccccagataggccagataaaccccctaaacctaaaaaatcaacattcataggaactgaatgtacccccaaggaccactttagagttttgtcgagaaataaatgatttgttaacatgatttatgttaataaatcattgtacagatgtagccattcttgatttctgtaatttccgtctcataagccagcacttaacagttctgactcatcattcagggcacaaatggtttccttagcaaccttgcgaaagacagtgcttgaaacttctttctttatccatcaaaacccaaagaggtatattaaaatgttcaagtaccagttcaaaataaaaattatttcagatttttcctttg

SEQ ID NO: 76628 - DNA, 1071 bp, Homo sapiens
ttatctacctcgataggttcagttggtgtaagttagtagttaatcaagagctacctgctatgtgagttaaaatattttgatgatcaaatacccttgttgcccagcaagcatgttatcatccgacaagcttgtcaggataccctcttggcactgtggctctctcttcccccaggggccataacaccatttcatcatgccactgacacctgccattgtgctcagtccagcgttttgtttaatccctgtggtaatcctgagaggttttgtgctcccgttgtacaaatgaggaattagactcagagagattgtatgatttggtcagagacacaggattcaaataaaacccacatttgtctgatcctaaagtcttgtttttaaccacacacgatcttgataggtccacttaatcacatacctgaatcacatagggagcactgatagactgcaggcagcatgccaggctaaggaataatgaccaggaattcttgggttagctccttgaggttgtagaaatagacaatgagccctgaagcttccttgctaggggtgtgtctggagcagtaacttggttatcccaccctcccccaaccttggtctcagggatctgaaccagaaaattgactttcttttgtcttgatcctgtttttcagttccacgcactctcctctcctcagtctcctttccccagcacccccacctcacggcgggccttgcacagaacactgtcggacgagagcatttacaatagccagagggagcactttttcacctccagggcgtcacttctggaccaagccctgcccaacgacgtcctcttcagtagcacgtacccttctctccccaagtcgctcccgttgaggaggccttcttacaccttaggaatgaaatcgctgcatggtaagtggtctttcagctgcagcctggatggccctgttgatgatggtcagtgtccccagacgtggctgccactcatgtgctcagagaggggtcctgtatccatgctcagatggtctcagctcacccgccccttcctcatttgccctctctctcctgtaatcccagaccaccata

SEQ ID NO: 76629 - DNA, 1052 bp, Homo sapiens
tgtttcttaaagggaaattacatggctacaatcctcttatagctaaaacagtcatatttttccctgtgagggttgggaaataagatttccagtgcatcctgcactggaaatactagacatgactgccaactagaccacttgttgactttgatagatagggccagggatgtggttccaaaatactaaatggtttcttctctcctttccagtccagagagcctcattttttgctgctagtgatgaaaaccatcgccccttgagtgctgcatccaacagtgatcagctggaggaccaggctctggcccagatgaagccttacagcaggttggtcccagtgcaagggcagtactctgcaccttgtgtcacatctgccactgactgcatctgtggggagaagagatggaagccacacggagtagctgagtgaagctgatcactgcagggctagacactttacattttagtcagaacgctttgtaactgaatactgtagacataattaaactattcttgatgacttatacggccataatgatgaatattcattattatttaatgtcataatacatttatgccctcagggccagttggggcaggtaggagagaccatttgctctaagtattcctgtgctctgtgctgtgtagtcctgcagtctgggttttcagtctctttcgcagtgttgctgatggtcatgcttatacatgcgcttgctgagtcctagtggctcccagtgtgctgcttcacgtctgtgtgttggaaagctaaatcaccaggatggttaagatggtatgaaggtgaaaagtaggcaataactgaggtcctaagggcttctcagtcaggagcagggactttacaacttctatttatgcagagaccgacttttctgttttccccttagtttcaaaatggtgaggttgctagatttatgtgtgctaatttctgtatgttaaagcatcccatcagtcaggtatggaacatttagtaagcacttcttgttgcagaataatttcattcatttgaaatctcttcccttaaaaccctttgaggctgg

SEQ ID NO: 76630 - DNA, 1058 bp, Homo sapiens
gtgaggacttccttgacaggcactgccaacaagcaattcacttaaagaaagacaagacctggtgcatgttggagagcaggggtgtggactcactgctcactaaggatttgaaaaaccgtggtgtgaaagacaaactggcggccgggcatggtggctcacacctgtaattccagcactttcggaaaccgaggcgggcagatcacaaggtcaggagttcaagaccagcctggccaagatggtgaaaccccatctctactaaaaaataccaaaaaaattagctgggcatagtcgtgggcacctgtaatccgagctactcaggaggctgaggcagagaattgcttgaacacaggagacggaggttgcagtgagctgagatggtgccgctgcactccagcctaggcgacagagtgagactccatctcagaaaaaaaaaaaaaaaaaaaaagacaaactggccttgacctttgtggcccaagaagcaaaatagggaccagtgaatgcaagttataggaaacagatttttgtctccaaggtagttgatcaatggtgattgggtggtgtcctgagcttgaagtaaaaaccagctttaagaatcactttgcaaagaacctatctcttcattttagtggacacttgctgtctttaaataaacttagaatcacgaatcacagaatcaagatggaaaggatctttaaagtttatttattgcatctcccagcccaggttccaagctccgcttcactgtcccgccacatgttcagccacctgtctttggttacaccagtgatgggggaactctctacttcctgaggctgcacacttgatctttcaacttctcttttaagtccttccttttattcaggagaaatccattttcctttagtgtttgtatttgagacagggtctctctgtggcccaggctggagtacaatggtttgatcatggttcactgtgaccttgaactcctgggctcaagccatcctcctgccctggcctcccaaagtgctgagattacaggtgtaagccaccacgcccgacctccctttaatttttacaac

SEQ ID NO: 76631 - DNA, 1065 bp, Homo sapiens
gattgagcccaggaagtcaaggctgcagtgagccattaactgtgccactgaactcccgcctaggtgacagagtgagaccccccaccccaaactctaaaaaaaaacagacaaaaacattgagcactaagtctgtgataagcttccctggtagacagcattttccacttgtcacaatacgatgctggaggaattaagcccatgctgtgtgattccacagcgagagaactcttggaaacttgcatttggttccttgtctggcaaagagaaaaggtgctgattttgctttatattcttttgctataataaatcctagctatgaataatattatatgagtcctgtgaatcctcttagccatcactgaatctgggggtggtcttgaggacctccaacccagagctcctgagctaggagcacctagatcttcctagaccctcagaaaccataggataataaatatttgttatgttgaggcactgagttttggagtagtttgcttcacagcaataggtaactaattctggaagccagtcatttctctcttcccagcatttagtttagtgtcttggaacataggtgttaaagaaatatttgttgagtgacttgacactatttctgcctttgaagaagttcatagtccatttggttcctttgctggaggaatctaaatcctggcttggtattatgaagcaggcttactctcttttttctgtggcctagaagaatcaatcgcagtggcagcagcctgccttaacgttgtcaggttctgccatcttccctgttgaatgagatccatgggtataagaattagtgtatgaccatgcctcttctcttttactcacttcttaggtcctttgatttttattttctctcccttctatgtcatggcagtggtagctattcttactattgaaataaaaacttcttcctgctgaaaaattaattaccaaatgtttcagggccttataagatattaatatttccatatcgagtcttgcctcttactctatcatatgattgccttgaggaaagttcagacaaattaactttccattttacattgcacc

SEQ ID NO: 76632 - DNA, 1079 bp, Homo sapiens
ctacccacagattggaagggacttggtgcagggatatggcttcgggtgacaacccacctatcagagctattcaaccattgaacagcatggctgtcagtctgaggtcgcagtgatgtcaggaggtggcagttttggcagctgacagccctcacagatgcccttgtgcagaatgaacctatcaagcattttctctactggctatgaaatggaaagtgaggcaagacattcagttgctgcacaggaaggaaagcagtcagggtggttgcctgagcgtccaggtcccagacaggtctgttctccatggaatacattaagggattgatttacctgtcttggagctgcttcacattgcagtagagggactgtgccgagtgtcatgcaatggccagttatcttgcagaacttgtttgtttctgcaattattaaaagttttcctggcagtttttttgttttgaccgagagtctttcctccaaaaatcattctctccatcctctcagaaccctggataattctctcctgtttgtcgtttgcataccatgtacctggaactcttatgttctggttaagtattctagcataagagagaggaagcaaaataagtcagcagaggatactttcagcatactgtgacttttagaatgttcagttagtgatactaacgtttcatagcctgtaccaataatcaacttttctttcccctgaagacaaagtagcatggttgtgacctatctatactgacttgttttcttcatgcatgcattcaacaaatcttaattgagtgcatgttatgttctaggcgtggggctgggctgaccctctgggaaatgacaagatgaaatgagacacattcctcctttcaagaaagtttgtgtggaatgtagaagatcattcattggttgaggagattgtaaactatcctggaacacagtggtttaggatgaaacaaagcagtgcacaaatgaacgctctagtcagtgaggctccattagaggttcctcaagggtggggactgcgttgagtgtcacgagactcctagggtcagcacagtgcccagcggctggtacgtgctttctaagta

SEQ ID NO: 76633 - DNA, 1083 bp, Homo sapiens
cgttaagtcaggatccctgctgtgacactagggattatagaagtgttgaaagcttcattctcatccagtcattcattcagtgcctggctggggttgtgataagcaaaagcaaacccatccctctccacatgtagcttccagtctcgtggtggcatttcctcagaggatgaagccatccaggtagcatagcaggcatgaggtggttccagtaaatggaggtgggacagtctccttgggctgccaccctgcttggggctattcctggtagggcctggagctctgcctagagaagcccacatgccctctcctggagtcacaagggcaggccaagtattctgtcctattccagtctttgctagaatgtgtcaagtgctgtgggcttgagtccttggcaatttttgcatgggacttagtttgggggtaagttttctggaaacttgaaatgtttcacttaaaaagaaaaatgcaggattcaaagaagtaaagagtaacaaataaatagaggcttttttagttcaggggtcagcaaactgagggcattgcagctgttctggaattaatgcgtgtccgggcaagggtcagtaattctgagatgccgttctgttgctttcaggccttttttggtgaaaactcttaaaggaggtataattcttcccttgctgggagtctttgtttcagaggggttgtaaaaaaagattcccagaggataaatcatatctgtattaacttcctaatgaaatgaaaaattatatcattgctgattattcctccttggctgatatggaaaaaaatactattaatactttttagtgtgattttaatcctttgcattcacggatatttgcattagtattttctggacatcatcttgtttatatggattttattcattgtaagatgccatcagatccaggcatctgagttctgggggggcaatgctataatccctgcccagaaccaaaactttccctgtgcagatggtctttcaatagagtggaatgtgtttggggtttctgcatatttcagtttacaaacccttcagtgatggttgtcttcatcctgagtttggctccatgcttcaga

SEQ ID NO: 76634 - DNA, 1021 bp, Homo sapiens
aggtggtcttggtggggtttctactagaaggaaatggcaggaactctgacctgcttgctgtcaagtaagcagacagagaggctcggaatcccctcccgcgtcacgtttccttgaggtgcctgcttgtttaatctgccgtttgccttgcttcccccaacgcccttttatagctccttttgttcaaggatcttgccacctcctttttctgtccctggcccgcctccaggttaaatatccaagaaggacagcagtagcctgaagatgctgatgacatgggggacgttcatggctggccctgaagaaaggctctcataggtgggggcgattgatacggcttccacagtgctcccacccacagagcccagggcagaggcccgaggtgcgccaggcttattttacagctttaattcccatgagcaggattggagaaagggttagtaaaggagaaaaggactcagatgtgtcgggtttcagggaaggaactagtgagatcggggtgacaaggggttcatttgtccatttggtaagtgtttattgaaagtccactatattatgtgtaaggtccttttgacccagaaagtctgaaatttgggtagcagtcattaatttgtattagataccacatatgttatagaagtggtagaaataatgttaataatgtcatacttccgttcccgatggtcacatgctaagtgcgtcacatctattccattgaatcctccccacaactgggatggggtggtattgtcctcgctgtgcaggggaggaaagggaggcttggaacagtgccttgctcaaggtcagggaatgaggagaggtggaactgggatttgagttcaagtctgatttcaaattccacattcttcacctctgagtctcttgttcccaaaagctgtttatggactggtggcagtctgtgatagttttcactgatccaaaatataaggacagtgtaactggatttttaagaaagcgtactttaaaaaattcagtggttctgaactggtgcaattttgcccac

SEQ ID NO: 76635 - DNA, 1013 bp, Homo sapiens
ttcaaccttttcttctggtaagtgggtttgaagatattgtcctttcttgacgtggtacattgtagatggtgacatgagggttggcagtactgcagtgaaagtttgcaattattttgtgtatgtaaaaaaggtagcaggccgggcatggtggctcatgcctgtaatcccaggtctttgggagcctaaggcaggcagatcacaaggtcaggagtttgagaccatcctggccaacatagtgaaaccccgtctctactaaaaattagccaggcatggtggtccgcgcctgtagtaccagctacttgggaggctgaggcaggagaatcacttgaatctgggaggcagaggttgtgttgagccaagatcgtgccactgcactgcagcctggttaatagagcaagcttctatctcaaaaaaaaaaaaaaaaaaaaaaaggcagcaagctatttctaaattctactggcttactttgcacaggcatggggacaaaataccacacctggggaaaaaatagatgatcttagagtaactttttcattttgtgatttgaaacatttaaaaagcaacatggtggctagtctgagggtagtgagttatctcaattgattgttcacagttacagattgaactccttgttctttccttccccctttctcactgctgctcttgactagtcttaaaaaaaaaaacaacaacatgctgattgtaaacaatgcacagtaaagaacataaaacaagaaaaaaagaggttttctctctgtctgtccattctgttccccaaagctaaggagtttttgtaaatccttccagatattttctatgcctcagcaagcatgcatacacacacacacacatacacacacacacacgcaaggctatggcagaatagttgttggtagtttaattaaaaaaaaatcagctgtagggtaattttctttatttctttgactattggtaaattgagagaactcccattcagattctttagaaaagtcctttctataaacacttaaatg

SEQ ID NO: 76636 - DNA, 1290 bp, Homo sapiens
gggaggtggaggctgcagtgagccgagatggtgccactgcattgcagcctgggcgacaagagcgaaactccgtctcaaaaacaaacaaaaaaaactccgtctcaaaaaaaaaaaagaaaaagctacacaaatagccaactggcacatgaaaagatacccaacatcattagtccttaggtagatgcaaatcaaaaccacagtgagataccactttatttatttaattttatttacttattccctcctaccccccttttggctgaagtgcagtggcgcgatctccgctcccggcaacctccatctccccggctcaagccgtcctcctgcctcaacctcggagtagccggaattacaggcacgagccacaacaccaggctaatttaaaaaatatttttggccttccgccacggccgccatggagagcagcagccatggctctgcgctaccttatggccgtgggcctcaacaagggccacaaggtgaccaagaacgtgagcaagcccaggcacagccgccgccgcgggcgtctgagcaaacgcaccaagtttgtagcgggacatgatccgggaggtgtgtggcttcgcttcgtacgagctgcgcgccatggagtcactgaaggtcttcaaggagaaatgggccctcaagttcatcaagaaaagggtggggacgcacatccgtgccaagaggaagcgggaggagctgagcaaggtactggctgccatgaggaaagccgctgccaagaaagactgagccccctcccctgccctcttcctgaaataaagaacagcttgacggaaaaataaaataaaaataaaaaatatttttgtagagacggggtctcgctttgttgccgcccaggctggtctcgaatttctggcctccagcgatcctcctgccttggcgcagcgttgggatgacaggcgtgagccaccacgcgcggcagcaaatctgagatttaacacagagagccagtatgtgcccagcgtatgtgtatgtagtgcacagaatatgtggaccaccctctataaaggttcatgcatgaggaggtcggctctctctcacagtctagcagttttccacacaaaagcggcacacatttttgcaccggtctccaaaatggtgtctggtttgggagcccgcagcttccggaattacaggctctttcctgcttccagggcaccattccaggcctggcctcaataggcccaaggcgcaggcccagaggaggccgggcggggtggggggcggggtgcgctacacccagtagggagcagccccgggcgtccgtgc

SEQ ID NO: 76637 - DNA, 1052 bp, Homo sapiens
acacatttgggctgcaggggcagggatattgctttcagagaagagaggtatagacaggcaaaagagcagatcgggggttagagagaaatcatgaactcacttttgaacctgttgggtctgtggagatagacacgaagcagcataggaacttggtgctcagtagcgatattagggttggagctgcatctgcattggtagatgaggtggtgttaagtctgaaaagaaaaggatctaggacagaacaatggaaagcacatacagggtgtgtgacccaggagaaatgagcaaaggatttatttagcaagaagaaaaccaagagaaagatattacagaagccaaaggaagaatgtagcctcctggtgccacatgttgcaggaataagggctaaaaagagaccactcactttggcaagtaggtaatcaatagcaagagcattttagtagaaaggcgaggagagaggaagctcaactgcagtgggttgaggaatatcgggagatgaagacattgaattcgtagatgtagaccattctttcagaatatgcccatttttttggattagaaatggaacacttacaaatgaaaaacctgggcatgtttttaaaagctgagataaggagaaggagacattaacatatgggggaacagatagatgtctgcagttcctgggaaggaatgaaatcaacagccaggtgggatgggtctcccttgaaaaggagcagtgatacctgttgtccaagacaaggaagaagacaattagtaaaggcaggtatttgtggagcagaagggagtgaagttaggggtttcatgcctggcaatttttcttttcttttttttttttttttttttgagatggtgtcttgctctgtcgcccaggctagagtgcagtttacagtgagcacaatctcagctcactgtaaactccacctcccgggttcaagcgattctcctgactcagcctcctgagtagctgggattacaggtgcacgttacaactcccggctaatttttgtatttttagtagagatggggtttcaccatgttggtcaggctgg

SEQ ID NO: 76638 - DNA, 1068 bp, Homo sapiens
ctcatactggtgagtgggagggggacacctgcctagggtgtggctgccaccctctggacactttgtggcttagcgttgccagtcatcaaacctggctctggagaagccaactgcaatgaaagtaggtggcatcttcttggttgtacgattttaacctgcctgctggctacccgctgggagacgctgagctggcaggcaggctgtggggcgaccatcatcaccccccacttcagctccgtcgtttaacgtcagagtctggacccagccacaccttgactactgaactttacacaataacttctccttggctgtgttgtatatgcaattaaaaaggctcacagtggacctggggacatctgcttcttcctgaactggggcaggacttggtggctaaacctgcagcccagtgtgcctttggtcactagagggtaggactccttgcttgccgcccctggcttcagtggcacctcccatcaacacacctccattacatcatttgcagggggtgaaaggccttctctggtttgggttggacccaagctggaagccaaggtcagccgcttaaacccaggggccagggaaaggttggcagagagctagaaggaccactgcaaacaaaggtccctgacctttcgatggaccacgtaagagcagggcctgcccggcaagccctatccttcctggaggctgagggaaagccagggagagtgagaggaggatacagaggcaggagcatctggactcggtcatctgctggtgggactggaggccgatgctagagattgaccctggaggttgatactgcatcctcctgccccaggagaccgccacagcagggcccttccatgtaaggggtgttggggaccgggcccacattctcccatgtggcttttctctccatgtgtgcttgggggtatggtttgactgaatgagtagaatcgtctcttgtggttggttcccctcagcagccccttccctggggtaaagtgggtggggacggtgggggtcattggtgtgtggggtctggtgatgcacaggccactgttcacaagcctggacatctcgacc

SEQ ID NO: 76639 - DNA, 1193 bp, Homo sapiens
taagacttgattttttacttgagcctaggagtttcagaccaacctgggcagcataacatgcatggtgaaaccttgtctctacaaaaaaaaaaaaaaaaaattatttgagtgtggtggcgcgcacctgtagtcccagctgcttgggggctcggggggaggtgaggtgggaagatcacctgagcccaggagatcaaggctgcagtgagccatgatcgtgccactgcactccaacctgggtaacagagcgagaccctgtctcaaaaaaatggatttatggttgctgagaacccatagggaaagaaaaggactccaggagtttcttgtcttggaaaagaaagtgaaatgagatggttggggtaggttgaagcagcgcttgtttaactggtcctcaggaccgtccctccaggggtccaggagttgatctggaagggcccacaccagggcacagagttccttggaaatgggcgacagtgactgtggcctgcatgggaggggtcctgccctgtgtgtcagagtgatgcgtcatccagccaggccgcagccagcactgaggcttaaacaaataagaggagcttgctgtctagggagcaacctttaagttgcagtggggtgatggcggcatccgtgagaagctgtgacttgctattcagttgaagcataagctgcaagatggatacaggttgaaaatggcttctgggtgaagtgagatacaccttcagagttcggcttatctcctgccattgtagaaaattcagccctgcccagagggtatgccagatagaccagatgtctccctgtgggtctgttgaaggactcaggcttgaggttacttcctgtcctgcttaagccccaccctcagaatgcttgttccagcccatttgaagaggagcaggacgtgaagagagaagtcacacgtctgtgtccccacatgttattccacaggaaagcatattactgtagaataactttccatctcgctgtgtgcttcctcaccaggtgaattcggtgtgctgggcctcgctgaatcacttggattcccacattctgtatcctttggcagaggaagaggtttggtgggcaggccacaccctgacgttggacctgggtatctgtgggcttcatgacatggcatcttagtgaccagaggactagacccttgtgcacttacatctcacgctttagaaaaaaaagca

SEQ ID NO: 76640 - DNA, 1047 bp, Homo sapiens
ggcctgattttttaaacatataaaatatataacctgggagctgtgaagaattggtgtttggcttatacattttaaaaatggtttgtcctactgggtaaatccaagtacccaagaactgctcacaatacctttccatgagaggttgtgtagagcaactcaggccagcctttctggatcaaccaactttcactcggctcagacacccttacaaaggaacccactgatcctttctgatgctctttctcccctgtcaaagagtactagatggcacacagaggagtccaatttcaatctggccaaatttctacatggggcaaacttttatattctgcctgtcccaatccaaccaaccatgagagcaaactgctgggccaagacatcactgttggtcccaaaggactgccggtgtcccgtcaccacgttggtcaacaggacccgccgagacaagcctggcggagacagagatgggctggtaagattatgtcacatgtagtctggggagagggacaactacatggggttttaaggcctgttaaggcctcttctctgggcacctggggagccaggctcacctgtactgaagcagttatttgcttggatattcagggaccaggcacaggaccaggcaccagggatccggaaactgcagagcatgccaggccggtctattcctgctaaggggataggagaatgtaaagtgtggctgccttctaggcaggccagggaccactgggttcggaaaacatccaaatatgcccatagctgctcagagggtctatacctttggccccattctgggttttgtggttgcaagagagactcagctgggatgcctggctcacaagtggttattccgaaaatgcatctttgttaacgttcccagtagtcgtgtttacagtacgaatagtactgatatcagggaggtagtatactgttggaggtaaggtggctccgatcctcgatcacctaccagctatgtgatctcaggcaagtgtgtgtgtatatacacacacacacacacacacacacacacacacacacacacac

SEQ ID NO: 76641 - DNA, 1014 bp, Homo sapiens
gggagaaggaagaggtcagagccttagataactggggcggacggattaaatatatttaagaatcgggccaggtgcggtggctcaggcctataatcccagcactttgggaggctgaggcgggcagatcacctgaggtcaggagtttgaggccagcctgaccaacatgtagaaacccccatctctactaaaaatacaaaattagccaggcgtggtggcacgcgcctataatccaacctactcgggaggctgaggcaggagaatcactagaacccaggaggtggagggtgcggtgagagcgccattgcactccagcctgggcaacaagtataaaacaccatctcaaaaaaaaaaaaaaaatttggttctttatagaatatgctgtattagtcagggtactggcaggaaacattcaagtgggtaactgcgagtctacctagtgaggcattctgggccagcaacagtgaggtgtgatgaccagctgtaggtctgaagggacaaatgaagagttgctggaacccggctctctctgagcgctttccaatagaagtggtgggttttggttacagccacccacagcccaaccagaagggagccggggaaccactccctctcctcttgccctctgtgttctactgctgcttcccactggctgaacctacctagctgctgggagccagggaaccctgacctagtccagaggtgagtcttttgggcatgcacagagcagggtggagatggacagatgatgagggcagagtgggtctggaggggcccagggaagctctccaggaaggctatgaaagctggtcccagcagcccaagctcatgatctcctaagtcattcacagaagtgcatgtcacaccatgattcttctcttggttttattgtttggtagaaaaacaggctctttaacactgaataaacatctcacgaactgtcgctcctagattacaaaaagtcaaaaccaatttcctttgacgccgggcccttgaatctgacattcaagtcaccgt

SEQ ID NO: 76642 - DNA, 1052 bp, Homo sapiens
gaaggttctagttttcgctcctagaacctttctgccttactttaaaagaagggttataaaggagccccagaaggttgcagctaaaggactaacagatgtcatctaatttcagagtctgggctgacctgacccacagcacagacccttgcagtagttgcaggacagcacagtggtgtctgggatcagaatccagaagcgttctgctattggtccctgagttttccatttgggagaggacttagaggtgacagcatttcctttattactgtctacagctgttaccgaggcacaagtggacgatgaaggtggaacgctcattgctcggaaggtgggcgaggccgtgcagaacactctgggagccgtggtgacagccattgacataccactaggtgggcctggcagtgcttctcttgggggtagtggatgcgggttgaggggtttcaggtgccctgggctgtcactttgtaaaggcttgccaacctagattgagatgggtggtaaaggaatcaattacacaatgccacacatttgcttgcttctgctgaatgccttagtagtttcatgtttattgctggaagccattctcttacagcatctagtgctgtgtaacgagctaccttaaaatgtaaaggcttaaaacagccatctttgatgtctttgcaggtctagaagtcaggaagggtaattattcagctccaagtggcattggctctagttactacctgatattccagggtggtagctggagtggtctcaagggtccaagctgacctcacttacaagctgggtgccttggcagggacagttaggaggctgtgtgtagcagagcctcactcggtctttgtattctccaggcctcttcagtggtttctttggcacttcttaaatgatgtcagggttccaggagttaatgttccaagagacaggaagtggatgctgcccatctctttttttttgtttgtttgtttgtttgtttttttgagatggagtcttactctgtcacccaggctggagtacagtggtgcgatcttggctcactgcaacctccgcct

SEQ ID NO: 76643 - DNA, 1795 bp, Homo sapiens
tatttgagtgccccccctgtgcaaaacactatgggtcggtattgattccaggtgattcctttcactattaggggaaatgtttagagcacattagaattttctggggagctttcaaaattatttatgccagggcaccaccttctgggattctaattaacgggtcgtgtgtaggacctctgcattgctatgtttaagatgctcctcagaggattctaaagtgcagcccgagctgaggacattgagttgggacagtgcttccgaaacttcaattgtgtatgcatcaccttgagattctgttagaatgcagattcggaatcaggtctgggtgaaacctgagattctgcatttctgtcaagctcccgggcaatggctgtgcctttggtttgtggaccgcactttgttatggttagagcagtgatccgcaaattttagcatgcatcagaaaaacctgaagggcaggatcactgggtgccccctccacagtttctaattcagtaggtctgagatagggcctgggagtttgcattttaataaatttaataaattctcggccgggcacggtggcttacgcctgtaatcccagcacttggggaggccgaggcaggtggatcacgaggtcagcagatcgagactatggtgaaaccctgtctctactaaaaatacaaaaaaattagcctggcacggtggccggcgcctgtagtcccagctactcgggaggctgaggcaggagaatggcgtgaacccgggaggcggagcccgcagtgagctgagattgcgccactgcactccagcctgggcgacagagtgagactctttctcaaaataaataaataaataaataaataaataaataaataaataaataaattaattaattctcaggtgatgctgatgttcatggggaccaccctttgaggatcactggattagtttgaactgttgatggctgttaaatcagtgtggtgacttgtctgatgggccccaggggatttaaatgcagtgtgtcgaggtcagatggcagcctccatgtcctgtagacaatcccttccactcttcactaccaaattgtctttgcttctaccagaaccaccctgtcctgcacacttctccttttacaggagtagacctgacctacatctgttatgaatggtcatttcactttgagtcctgtaggccacctgctgcatgcagaaccacctctgaccttgccgagaaaaagacctgcttcttggattatacagcctgggcaagggagaactaaggattatcttggagagttcagtttggaaaggggagagggatgttagttgacagtgtgacttaccttcctttttgcatgccccatgagcccagcacaagagacttaagcactgttggatcattgctttcccattgtgagcctccccaggatttctggaactttcccttttatcatagtgaaattctaaagtcctgatctctgtttttgcattatcaggatggcagagctcattgttcatttggaaggcttgttcagcctaagcctccccttaatgcattgccaaattttggggttggttttcattttgcatcttggcagcctgttctgggtaaacgttccatttcatcttgtttggattttttgagtcttctgagagacgttcaggtttcctctctggtcaagttggtatcttatggctcctccatttctgctgaggggacaggtagtttttccaacaagggatttctgggtgtatttttttttttttttttaaagacagagtctcgctgttgcccaggctggagtatagcggtg

SEQ ID NO: 76644 - DNA, 1831 bp, Homo sapiens
gttgggagaaccatttcatagttgaatttgtataggttttatgtaattttgtcttaatttttttttttaagacagggtctggctctgtgtcccctaggcaccatctagactcattgcaacctctgcctcctgggcccaagccatcatcccaccgcagcctctcaagtagctaggactaacaggcacacgccaccacacctggctaatttttgtattttttgtagagacagggtttttgcctgttgcccaggctggtcttgaactcctgagcttgaggtatctgtctgccttggcctcccaaagtgatgggattaccaggagtgatccactgtgcccagcctttatgtaccttctttaacctctgagctctaaatgtagaaactcttgacgttccaattctgtcacatcgggaagcatttatgaagtatttataaagttatgttttgttggggtgtgatgtcactgatgacagaagtgtgtcccttttgagtcaggaaattcattgctagcccttgatgactggggccagccctatagatacaatagaaagagccacactgttgtcaaggcaactaaagttcaagatcatctggtctccaggcaaccttttccagacttgcctcaaatgctttcccaagctttcttggggtaggtgggcccttccctgcctttctcttctagctttgggatctcaggaggaggagaacccaagaaactgtggaatgatgtgaggtttggaatttttgaacctgctaataagtatatggatcaggtggtatgtaaagaaaaatcagggccgggcgcagtggctcacgcctgtaatcccaacatttttgcaggctgaggcaggtggatcacttgaggtcaggagtttgagaccagcctggccaacatggtgaaaccctgtctctattaaaaatacaaaaaatcagctgggcatggtggcacgcgcctgtagtcccagctacttgggaggcggagattgcagtgagccaagatcacgccactgcacccagcctgggtgatagagcgagactctgtctcaaaaaaaaaaaaaaaaggaaaagctgattagattctaaaagaggagtttctccctactcttgcatctaaaacatgctaacgttggattttttttttttttttttaacagttactgttattttcccacactcttgattcttgtaaagcctcctgaaacttgtcaaggtctgattcattagtcaggctgtgacttgtgaacgagtgagatgcttgttcttacctcatatgcaagagtgtcagtggccagcatctgaaggctggcttgcctggagtctctttcttatgtcataagtggttacctgttaccttggacaacataagccaacagttcatttgtctagggcagggaatgatggcatatgtactgtggcaaatcaggctgcagattgtttcacaccaagccttgagatacttacaaatgcccccatttctctgaagaactttcagagaagtgaaccaggtcacttgggttgaaacagtaagaaccttacgctgtattggatcctaatttcccatttactgggagttggcatcctctgtgaattcaacccagctgttgcactcatgccagatttatatcatttgtccttaggaaaaccaatacttaggctagcctttcagttacctgtttaaaagaaaaactctgcggctaaaaattgctattcttggctgggcacagtggctcacgcctataatcccagcagtttggaaggctgaggcaggagaatggcttgagtccaggagaccagcctgggcaacatagtaagaccctgtctcattttaaaaa

SEQ ID NO: 76645 - DNA, 1076 bp, Homo sapiens
ctcccataatgctgggattacaggtgtgagccaccgcacccagcctcgtatcttacttttataatgaaagatttttgttgttgttgtttgagatagagtcacttttgtctcccaggctatagtgcagtggtgcgatttcagcttactgcaaccttcgcctcctgggttcaagcgattctcctgcctcagcctctggactagtagggattacaggcatgcgccaccacgccctgctaatttttttgtattattagtagagacagggtttcaccatgttggccaggctgaactcctgacctcgggtgatccacccaccttggcctcccaaagtgctagggttacaggtgtgggccaccgtgcctggcctacttttttttttttttttaaatgtcactcactacccatgtgcctgtgtttctgcttgtatagatcatccctcagaggtgccagagaagctcatccaggaccggttccggaagctgggccgtttccctgaagcctttagttccattcactacaagggaacgaggacttacaaccctcccacggacttttctgggcttcggcgtgctttggagcagctactagagaataacaccacccgttctccccggcacccgggagtcatcttcaaagccctgaaggtcagttggcttgtgccccaagggcttctcattggggtgccagtgggtggtgagaacactcagttcgccagcttttgtggtgctggtgattggaaatctgggtggaaagaggttataagaagcggaagcacatgaatggagtccgcacctgtcagatgctttcatcttgccaggagtgcaaatatggggaagtcatatgtgatagtaaaaaaagtgcccggtcctcagctaggagaaaaaccaggcactcatttctggctggtgtggctcagccctggtgagttggtgtcatgttgagtctcacttaatctggacagcctttatgcttttcttaacattgactcactgtttttttcttatttaaattaatttattcatagaggaaactttttgttatcactataagcggaaaactagtatcacaggtagaaa

SEQ ID NO: 76646 - DNA, 1315 bp, Homo sapiens
tcatagctcactgcagcctcaaacttctgggctcaagggatcctccctcctcagcctcctgaagtgccactgttacatgcgtgaaccaccacacctggccttatctgttttttcttttgttacttgtgcttgtgttgtcctatctaaggaactatagactaatccaaagtcacaaaggttaattactttgttttcctctaagagttttacggttttagctccttttttttgtttttttcttttcttttcttttctttttctttttatagttttagctcttttggccactaagttatttccctgactaaagcttcagaggttcctttgagctgtttgctaagggtggaggtggggagctattatcctgtgacttcctttctttgacaattcaatcaagttccttgtccttgggaagcacttcttcttgtaggtgtttctagtgcttttacagtttctgtatttcatggtctttttttttttttttgcaggtaacaaatgaagaagactttattagaaaattggactgcaaacctgatcagcatctgaaagtggtttccatttttggaaatactggtgatggaaagtctcatactctcaaccacactttcttttatggtcgtgaagtctttaaaacctccccgacccaggagtcctgcactgtgggagtgtgggcagcctatgacccagttcacaaagtagcagtgatcgatacggaagggctcctgggggccaccgtgaatctaagccagagaacacggctgctgcttaaggtcctggccatctcagacctcgtcatctatcgaactcatgcagaccggctgcataacgacctcttcaaattccttggggatgcctcagaagcttatctgaagcacttcaccaaggagctcaaggccaccactgctcgctgtggcctggatgtccctttatccacactgggccctgcagttatcatcttccatgagaccgtgcacacccagctactgggctctggtgagagatggggtacagtgtcacagctcaacctttatgggtacaaggaggcagctatttggtctgcaatagcaacttgttggtagtggattgcccagaaagatttctgtccaaagaagacatagaaagtgtttcaaggaggatggagtgatcaaacatgtcaatctgcttataggtcaactagcataaggattgagaattgccaattggctttggcaatatataagtccttagtgatctggataagacctgttccctgagatggtggggggtaaaagcttgatcagagtgagatcaagagaaaataggaggaagccaggta

SEQ ID NO: 76647 - DNA, 1063 bp, Homo sapiens
tacatgcttttctcattctttcagtctaaggttaagtatgtgaaacttaaagactactgtggattttaggaaaatctgctatcgtaatagtttttctccactaaaaagctaattgaaatgattcaggacacaatttccaatagaatctttcagatgtatgattcccttcaaatttgctagtttatctattttctgaccaatctaacaagtcaatagggaaatagtatagtgaaaaaaagaaaaaaacaaccaatactaggtcagtagatattacttcaataaataaacaacattttgcaacagcaggaatatgcagtcttgcgtagcattcaaagccccctctgaagtttaagaagcaaaggtttaggaagactgaaaggaggaagtggcacagtcatgacagaaaacaatcaaggcatagataggaatttctgccaagtcaggtcaaagtaagagcacgtgtaagaaatgccccaaaggtgagaataaccgacgcatattgaagcaaggggtggaagtggctccttcctttttatggctgcgtggtaactcagtgtgtggatataccacattttatcagtggatgggtattgggctgttttcacttttttggctgttatggataatgctgctgtgaacattgatgtacttagaagatttgtgtggacatgtgttttcagttctcttgggtatatagctagatgtggacaagctgttttccggactggctatgtgattttacgttcccaccagaagtgcatgaacattgtgattctgtacatccttgccaatgcttgttgtcttttttttttttttctttagagacagagcttctctctgtcacccatcctggagtggagtggtgcagtcatggttcactgtagcctcgaactcctgagctcaaacgatcctcttgcttcagcctcctgagtagctaggattacaggcgcataccaccatgcccagctaatttttaattttttttatagagacagaggtcgcaccatgttggccaggctggtctcaaactcctggcctcaagctatcctctcttttttgcctc

SEQ ID NO: 76648 - DNA, 1879 bp, Homo sapiens
tgatgactctggcttggggcaaagcagcaatgatgtcagtcagcatgcctctagcatttactacaagttattctgggcctccactgtgctaagtgcctgatgtacatcatcttatttaatttttgcagaaatcctatgaagtagattgtgttgttatcttcattttagaggtgaataacagagccccagaggggttgaataaagttatcctaaagtcagtggatgatagagtgaggttggttgaacctttaatggtgatactataccattccctcccccagaggatatagcgtctagacattttgtgctgtgttcattcatttattgatcaattgtgtcttgatttcctattttgcgtcaggcactgtgctaaggttacggtagtgaacaacacagaccatatctctgccagcctggagtacattctagttggggtgtttagcgctggaagagtgggaaaatgttaacagaggtggtgggtgggaatggaggctttgagcaagagaagggttgagtcagttgcccagggtatgatttaaacctaactctcttttctagcctggtttgtgtagcttagcttttactgttaagtcctttcttagccctcagaatcattccagaatgaaagaccattctgcttactgacaggcctttactggagcttacatctgttttcacagctggccaaatatggatatgctatgccacttaaaaaggcagctgcatctcccatccagaagctcctcagaaagttcccttgaggatgaggtggggcttggggatgactcggtatttccagtgtgtcctcagaattcatctttgccttggaaagctttttattcagatataaatggattgctgaactgggtgtgttggatgtggtcaaagaaactgatcagggagctaaaaatgactttttttaaaaaaagaatttttgtggaccatctctgcatagaaacacttttattaggccaggcatggtggcttacgcctgtaatcccagcactttgggaggctgagacggacggatcactgaggtcaggagttcgagaccagcctgaccaacatggagaaaccccgtctctactaaaaatacaaaattagctgggtgtggtggcacatgcctgtaatcccagctacttaggaagctgaggcaggagaatcacttgcacccgggaggcagaggttgcggtgagccgagatcgtgccattgcactccagcctgggcaacaagagtgaaactccgtctcacacacaaaaaaataaaaaaagaaacacttttatttctgctaggataggagaggagctgcaggcagtctctgtgaagcatagtgtcagaagcaccactggtagttataagacatggagaggaattcctgacctctcaagtaatggaacactttggggacactagagtggaagaaagtgatctttgcccctgccaaatgtgctcagtgtgtttgtgagaccaaccccgtgacttcagtgtcttcagaaaacatttgattgagaaatgattgtgtttttatgtgaaactctagcaacatgtacgtggatagacatgaggtatacataccctttaggatagaatgaaaagaaattttctaaacttgctgtgttgaggaaacagatttaatagaacttaaaccttgctattggaagaaatctaatcatttggactttaaaatagactggttactgatctgtttgacatagtttaggtaaaatcctgtttgaaatttaggccatggggttgggctcagtggctcacacctataatcccaagtgctttgggaggccaaggaaggagtattgcctgaggccaggagttcaagaccagcctgggcaacatagagagaccctgtctctacaaaaaata

SEQ ID NO: 76649 - DNA, 1599 bp, Homo sapiens
tccttccccccttccttcccctcttcctttcccccttccttcccctttccttcccccctttccttcccccttccctccctccctccctcccttctttccttccttccttccttccttccttccttccttccttccttccttccttccttccttccttccttcagatggagtctcactctgtcacccagctggagtgcagtggcaccatcttgactcactgcaacctctgcttcccgggttcgtgcaattctcctgcctcagcctcctgagtagctgggactataggcgcctgccaccatgcctgactgatttttgtatttttagtagagacggggtttcaccatgttgaccaggctggtctcaaactccagacctcaagtgatctgcctcagcctcccaaagtgctgggattacaggcatgagccactgcacccggccctgtatgggaattctttaccacaaactgggtgtactggtctgccacatgtctgtgccacttctatttcaggcttgtctgctgttcattttcttggccctgttcttggctttctggtctagggtagcttcatggggcttgttctttccagctcctcttgtttgagattagctggtagataacataacagaaggaaatccttcaggacttcattctggtcagtagatcatgagccagagggatcataatctttcaaattgttgaattttcccatttttctcttccaatggccagagtattataatgtaaggactaattttggtgcagtagctggttagccctttggcaagttctggtcagaatatgaatatatctattattggtttcttaggtgtcatataaatataacaaaaaaatagatcttcgtaggagctgtcaaaataataaccaatagttgggttggtagtagggcctcctcctccatcattgcctttaacacaaagaaactcaagtaaaagccccttttgtttagtgatattggtagaggggaaggcattatatggtgtttactgggaaacacagggttgaggatgactcagaccaaaagaaagatgaaagaaaccctattatgtgccttcagtttctgcccagtgtcttgtgagctttttcagcctggggatcattcagttacaacagactcctggcatttaacttggtacgctattttgttttagtacaaggatgtttcaaatttgacccatgtaagccatcgaaaccactgtgagtcagctttctagagaacctgtctttaactactttaagacaccttcagtttgcatgattctcttttttcttctggcctgtcaattccttgaagtgattgatttttctggaattgagcaggcatttggctttttgagccaggattaacataatagacatatttcttattaatttgaccttcagtgttttcctgtgggtgcatctactggctgaaccacccttgagtttatccaggagattatataggcagatgcacttctgatggctggtcagacttttctggggagtcttccctacttcgggaggagctctcatgagatcatttctatctgaggttagaactgctaaatgtatcgaacacatttgcttgatgggaaatc

SEQ ID NO: 76650 - DNA, 1082 bp, Homo sapiens
tgcatctggccgtattcattgatttttctaggcctcggtggaactgtactaggaaaaccaaaggacttacagatcctttatttatttatttatttatttgagacggaatcttgcactgttgcccaggctggagtgcagtggcacgatctcaagctcactacaagctccacctcctgggttcacgccattctcttgcctcagcctcctgagtagctgggactataggcgcccgccaccacgcctggctaattttttgtacttttagtagagacggggtttcaccgtgttatccaggatggtcttgatcacctgaccttgtgatccgcctgccttggcctcccaaagtgatgggattacaggcgtgaacaccgtgcccggcccagatccattatttagaggtcataataaataaatgattcatgctgacgagtcatctataatctcttgaagccagaggcaacaccttagcaaataagttaaaggtcagaagaataagatttctggtagttagagttcttagtgggggaagaggatagaattttcccatctcttgggtcttgtatgggagtcagacatcttgttgtattagaatgttaacctgtcaggagaagaaaggtgaaacagtaaaaggcatttgtttttcttcgttcttgtgtttttattttttatttatttatttatttttgagatggagtcttgctctgttgccaggctggagggcagtggcgcgatctcagctcactgcaatctccacctcttgggtacaggcgtgagccaccgtgcccaacaagactgcttctttaagaagacccatcgtgtggcttggcggcctcacttgtttacagtcccagaatagtgttgctcagaatactgggacttgactaaaagagatgttattctagtggagttcaggaatggaaaatagcaggccgggcgtggtggctcacgcctgtaatcccagcgctttgggaggctgaggcgggcggatcacttgaggtcaggaattcgagagcagcctggctaacatggcaaaaccccgtgtctactaaaaatacagaaatcagctgggcaggcacctgtag

SEQ ID NO: 76651 - DNA, 1031 bp, Homo sapiens
ggcttgagtctgagttggggagatggtagtgttgtgacagctaggtgagattggggaaggggtagtataatgtttatacttttgaatgaaggtagtgtaatgtctatacttttcttttgagtgggctttcaagtgaagtttgcttgaattcacatacttgtttaccaatcactatatagccaagggtaagtgataaaaatcctttccattcctaatctttttgagtcctatcaacaatcctgtgaagtaccagtgaaactgaggcacagcttaaatgatttttatcacagtctggcacatagtatccagtaccagtttgttgtagtcagtatcactggagtatctgtggtccactgactcagtacttttgatggtggtgactccttaggtttccagtttggaggggagtacctatgtaagttaccatttgagaggctgcctaattacccacctaatatttttcttctgtacttttttccttcttggataaagctgatggaaatgagttacatcatgattcctgtatacttccattgtcatgttaatactttgctaacacagattttctttattggtttgagaggatcgaatagagttatggaagagtgacctagatcccattccatgtcccttgtcagcgataatgtctttgttatggattacgctgtaattgggcgacattgtggactgaatcttttataaatggaacacttggattttgggtgattcttgatggttttgctcagttctctgtaatgtcagcttttggaaagtcatagtttggttgttgccacttttgtcaaatgaggggaagctttgggatgaactagtaaccctcatggattgcattggcacctttaaaaagaatgtttttttggggaggagaatgtgtatttttttttctttttgtagcattgatatgtgttccttagttgagaattaagagcatataaagaagtgtaatgaagaagataaatctaactacccagagatgatattggtccttcatctttttttttcttgaatgtaat

SEQ ID NO: 76652 - DNA, 3480 bp, Homo sapiens
cggagatggagatgaggatggatctgccggtgtcctgaggaatagcctctgcccccactggcgccctgcggccccccgacgccgccttgctgcggccgagcttctcagtggtgggatccccgggccgcggcgggcagggcagggcggggagggcacggcccagcgcggggcgagtgatcgtcctggggctcaggctgccctcgggaggaagggggggcgggtgcggcgggggtgggggtggggtggtataaacaatggattcggctccgggttttgccggcgtgggggggattttgggggaccttctttgttcttaggctccgctcctgcccctcgggttgtggcggtggtgtccgggtggaaggaagggtgaggaacccccggctggggagaggtgtcgaggtgggggcccgagtgggcaaaatgtttggttgacatggccgggcgtgaggtgtacttttgaaggttgattttatatttttctcaattgtgacaagtttgatttttgtttctgttttgggagctggctgggcatgtctgaggttagattgtagtaaataagatcccctagtcactcccttcgccttccttgtttatctgaaaataaggttgatagattgattactgtaggggaggagtgactatcagaaaggcagggctttacaccttgtcggggccttggaatgcgggtcaaggctagggggaattaggaatataattgtcaaagtgacaaaagcccctttcttgccccagttatcttttttcgtattttgaagttatttttaagttagtttttaagtgacaaagagaaaaattatttgttttgattcactgcaggcctggctttgccatgggtcaaagtagaggaattgtctcctgttgctccttttttttttttttttcagttagtgaaagaagggacagaagaattacagtgtaaaaaaattgtttttaaagatgaaattgttactattgtttctaagttttgagtctttaatatacatctagctagagttgaaacaatccagttacaaggctaaccaggtcggcccaggtatttgatagatctaaagtttattattacattttcattagctttgtgaaggcctctccactcctcccaattgtgggatgcatgtgggggtgcagagggctgtccttccaaggactactcacttagtgatttagattctgaatttaatatctgaatgaacagaaaattccagtctgggaaatagagcagcaaagtctcttaaatgccttgggcctagaggtggcgtttgttgtcaagaggaggagctttagccacaattttgagatttttttttttttttttttttttgagggagtcttgccctgtcttccaggctggagtgcagtggcaagatcttggctcactgcaacctccgcctcctgggttcaagtgattctcctgcctcagcctccctagtagcttggattacacgtgcctgccaccatgcccagctaatatttgtatttttagtagagatgggatttcaccatgttggacagggtagtctcgaactcctgacctcaagtgatctgcccacctcggcctcccaaagtgatggaattacaggtgtgagccactgcgcctggctatacaacaagccagtgtaagtgttaagatagaaaatgagatttctggccaggtgcggtgactcacgcctgtaatcccagcactttgggaggccaaggcgggcagatcacctggggtcaagagttcaagaccagcctggccaacatggtgaaaccccgtctctactaaaaatacaaaaattagctgggcattgtggctagcgcgtgtaatcccagctccttgggaggctgaggcaggagaatcgcttgaacccgggaggcggaggttgcagtgagccgagactgtcccattgcactccagcttgggcagcaagagcaaaactctgtctcaaaaaaaaaaaaaagaaaaaaaagaggaatgagatttctctcagcagttctgggctaatatttaatttagtcaaaaaaaatttttttaaaggtgcacttctgttttttagatgagtgaaatccttttccttcctctattctaggtatcccctgaaatactgacttcaggtcgaattatattgaaaagctcctgaccactttctttcattaccaaaactttgtagctgatgtccaaccgatgaacccaccaccgtgaacccatcagacctctctcagatagccataaaagacccttccaagtcaattttgaccacatctttgcttgcactttatggaggatgaaaccatcaaaccaaatcaacgttgctgctaatacaagagtcttagaggcagcaaattaaaaatttgaacatttgtttgtgaagaactataacaggacatgaaaggtgttcttttttaaagtgttcagaaccctgtggaagtttcgtgcagtcttcagactcaaatcttcgtcttcacccccggggcaagctcagtgactattatatggtgggtgtgtttccttaccagcgtgagtatgagtgcccagacttccccagcagagaagggcctgaatccggggctgatgtgccaggaaagttacgcttgcagcgggactgatgaagctatctttgagtgtgatgagtgctgcagtctgcagtgtctccgctgcgaggaggagctccatcggcaggagcgcctgagaaaccatgagcggataagactcaaacctggccatgtcccttactgtgacctctgcaagggtctcagtgggcatttaccaggtgttaggcagagggcaatagtgaggtgccagacctgcaaaattaacttgtgcctggagtgccagaagaggactcattctgggggtaacaaaaggagacaccctgttactgtgtacaatgtcagtaatctccaggagtcactggaggcagaagagatggatgaggagaccaagaggaagaagatgactgagaaggttgtgagtttcctcctagtagacgaaaatgaagaaattcaggtaagcacacgggtatagtgggattcatgtgtagtggagcagatctgttgttggaagccagctctcaaaaaacgatgtccaagaagagatcacattttaatcattaaaaggcaagacctctggaggctttagttgcatggagtcagatttagttaccagctgcatgacctctggccgaattactttacttttctgagccttagctttttcatctataaaatgggggacagcctacttcatcgagttgtgaggttgaaatgagacagtgtttgtagagcctgtcgcataataaatggtcagtgtatacggtagctgttgttagtattaattgtagcattattattagaacaaactgatttaaaacatttcagaatgagagcaccctggcaagctgtgagtaaatgttagtgatgcgggactgcacctatccagggaaacacacactaacagtgggtcccatgggagtgcta

SEQ ID NO: 76653 - DNA, 1039 bp, Homo sapiens
agagatgaggtttcactatgttggccatgctggtcttgaactcctgagctcatgatccgctctccttggcctcccaaagtgctgggattacaggcatgagccaccgtgcctggccctcaaagataatttcaaattgagaagttctgaaagtataatagcttttttttttttttttttttgagacagagtttccctcttgttgcccaggctggagtgccatggcgtgatctcggcttactgcaacctctgcctcccaggttcaagcaattctcctgcctcagcctaccgagtagctgggattacaggcatgcatcatcacgcccggctaattttgtatctgttagtagagatggagtttctccatgttggtcaggctggtctcgaacgcccgacctcaggtgatccgtccacctcgacctcccaaagtgctgggattacaggcatgcgctaccgcgcccagcctgagaagttctgaaactatagaaggaaagatcagaaaaataataggtaggaaaaaaaattcatggttggcttggagaatacccttgaagggtgttaagtaaaaatgataggaggcctttgttttggactaaactcctgcaccaggccccaatagacctggctaaaataaaaatggagtcacccatgctaaagtttcacctcaccaaatccaaactaagttgttaccaaacccaagctaagttgttatctgaccttcagagaaatcaggaaagagggataaggacagccagtttcccaaacaggcttgttttaatgttgcatgataatgaagctccctctgttgtaatccttacacaaaagaagtagcctgaagtaactgatgtcaactaatcagttatttttctattgttctgtctctctgtcctcaccttccaaggaaagtagcttagaagtgaccaatatgtcaaggtcccatgagaagactgaaaaaaagagaagaaagaggaaagaaaagaatgacaagaaagagaaagaaagaaaccaatatgctctttgttctttgcttttgcttcctcaa

SEQ ID NO: 76654 - DNA, 1014 bp, Homo sapiens
taataaaatactgaactgtctctttagtttttggagcttaacttcgttttacacggaaggccgcatttctatagtttgctaactgttcactagaataaaagcctttttcctccaaattccttttcagatatatatatattttcagagacagagtcttgctctgtcgcccaggctggagtgtatgatctcagctcattgcaacctccgtctcccagattcaagcgattctcatgcctcagcctccagagtagctgggattacaggtgtgtgtaaatagccacaaagcttggctaatttttgtatttttagtagaaacagggtttcactatgttggcccagctggtctcgaactcctggcctcaattgctccacctgccttggcctcccaaagtggtgggattacaggcatgagccactgcccctgaccaaagcttgatttttctagacatcctgaggcaagtgggacagaagacaaagcccaggacctgggggaagagggaaatctaaatctaggaactcagtctacagtttcagtgagggaaaatgggaagtaattatatctttccccaacagagtgaaaagaaagatgtcttggaagagagagtttgtggaggtgtgtgtgggtggcactagacccataagctagccctcccagggatatgtagcccaaatatacatctcctggtggtcaaaaatacaaacctcaaatggtgaattgtttcaagtgtccttctttgcagaagcaaaagcaaatcctctctggaggaataaacctttatcctaggcctccaagaattcccacaaatattttccaaggaaaatgtggctcatggtaaaaaataacttagtgtgcaaagaatgagaatgagtaaagaaaactgacatgagaaacagatctgctaatttcaacgatctggtaaaagaataaaagtaggccaggcatggtggttcatgcctgtaatcccagcactttgggaggccgaggcgggtggatcacctgaggttaggagttcg

SEQ ID NO: 76655 - DNA, 1050 bp, Homo sapiens
tcccccacccccgcctccgcgctcccccttacctctaccccaccctggcgctttcgcagccaccccggcttttcctcctccaccagctgaggcacccggtctcccggtttccacacgcgttcagagacacaaactcacccgccgctgaggaaacggtactgccttcgcgaccttctgggatccaggttacgagtgcgctccactggttcgagatttctgcccgtcgctcgccagggagactgagtgcccaagcgcctactcgcacaggccgcaaatacagccgcgctgcgcggcgagctgatggaggtcttcctcttgcccggcgtgcactgcggccgggggcggggagcgcggaaccatagagaagaacgtatatagatcgtctccgctgttggctctgactcaccaagccgagacgaataaccatagagaagcagcgtctagcggttactagaaaggcccgaactgtaaattatgacccaccatgtttgattggagccgactgaatcttacgactacgggacgccatcttgaggtcaaggttccggctgggcacggcgcgaggagtgttagaggctttctcacttttcgtagtttttcggggggtggaaccttgctttgtgattccttgaggttcgaggaactgataactgggcgcgatctgcaaccttagtgttaaaccccaagtgctgttataacaactactcgagatcaacaaataattggcaaaggctgtggaggttttttgaaaagcaaaagcttatgcgtagttgtagggccaaagaggtggctagaagatgtttggaaaaacgtgaaaagtcctgtaatactagttaacacagctttcgttctgtaatctaaacgtgctaaaagaacttagcttaagttaatggaaatgaataaaattaatcataaatgattacgttattccaattgtggaccttataggcaatatctagttacacgcctttctcaactgcttgcctctaggaaggcataaaacggattcagtataaagttattgcctccctgagttcctggtgctgtgtt

SEQ ID NO: 76656 - DNA, 2034 bp, Homo sapiens
tacaactacgcataagcttttgcttttcaaaaaacctccacagcctttgccaattatttgttgatctcgagtagttgttataacagcacttggggtttaacactaaggttgcagatcgcgcccagttatcagttcctcgaacctcaaggaatcacaaagcaaggttccaccccccgaaaaactacgaaaagtgagaaagcctctaacactcctcgcgccgtgcccagccggaaccttgacctcaagatggcgtcccgtagtcgtaagattcagtcggctccaatcaaacatggtgggtcataatttacagttcgggcctttctagtaaccgctagacgctgcttctctatggttattcgtctcggcttggtgagtcagagccaacagcggagacgatctatatacgttcttctctatggttccgcgctccccgcccccggccgcagtgcacgccgggcaagaggaagacctccatcagctcgccgcgcagcgcggctgtatttgcggcctgtgcgagtaggcgcttgggcactcagtctccctggcgagcgacgggcagaaatctcgaaccagtggagcgcactcgtaacctggatcccagaaggtcgcgaaggcagtaccgtttcctcagcggcgggtgagtttgtgtctctgaacgcgtgtggaaaccgggagaccgggtgcctcagctggtggaggaggaaaagccggggtggctgcgaaagcgccagggtggggtagaggtaagggggagcgcggaggcgggggtgggggaggggtcggcacgaggcttggtttcttctcttctctaaggcctggaaaagctgtgggcccagccgtagctggtggaggccagacctacggcttgagctttccgtcttgcattgtcgcccactttccctttcccttccacgttccgccgcggagtgaatcgtctctgccccccctgggctccacgttagatacaaaacgatcgatctgccccaggggagcccttccctgagcccccttacttaccggagccccacagtaggttttcgggcctgggacactctcgccccagccgttgccttgaagttagcctctacccaccctttttagcgaggtgctggccaccaacggatatctttcccttcctctttggccatctagagcccgccaccaagtgaactgggccccacccccttggaattgagctaatacctacctttttagcagtctcctggcttgcttaagatagtcatgaattttgccatcctgcctcttttgcgcattggagggtgcagtaaactgtatatcgccattcattctaggcgattactaagctccacattaaaatgttactttctcatttttctttggtcgtcaatcctgcttttaaatacggttttccggaatagacgtaggactatgaagatttttcggaggttatgtaatatggatttgtattgccatggaaatgccattttgatactgggcagagtggagccaagagaagggaagagattggacctctgttgcaccctactgctgtattagtgtgaagtactctgtgtattaggccgtgggcagtaatgtataaataatttttgtatagtctttggagcttttaatttttttaaaggctatttccaaaaacattcagaggacttgaaagggattaagttggtcataagttactcatgattcaagtgaatcttatagtattctaattcatttaacttaaagccttggtttttctttttcttttttcttttaagctttggtttttgttcctctgtaaaatgaatttatagtagtatctatacgttattggggttggggattgagaaaaacgtatgtaaaatccttcgtgcagtatccaggtaacacacataagcatttaaatctatattgacataatttgttatttaaggattttcaatgaaatgtaagagtccaaccctgactctgtaatttttttttttgttttgtgttgttgttttttttaagacggagtcttgctgtgttgcccaggctggagtgcggtggcgc

SEQ ID NO: 76657 - DNA, 1813 bp, Homo sapiens
ctcgatttcctgacctcgtgatccgcccgcctaggccccaaagcgctgggattacaggcgtgagccaccgtgcccggccttctgaatgtatttttaaagtaaaactagtccatgttaacattgggtaactacttcagacctaacaggaatttggaattttcaagttatgtttttgtccacagacaaattagcagtttacttttcttatttacacatgatttagtgaaaatttacattattttatagctttggaagcaaaggaatcatttatcaatcttaacatcttgctaaaacagtctgtattttagagatctcttgattgacttttcaaacactatcactgccattcacaaaaggggatttttgattcttcttaaatagcttttctacctttttttgaaaattgaaagttgctgaaactagaagaacaaaattccactacccagaattattggtattggcttttaactttttatttagacataatttcagatttacaaaaaaagttgcaagaatagtacaaaagaaatctcagctatctttcaccagattcctcaaatgttaacattttgccaatttgctttatccttctcttcataggtttcttctgaaatgttttgctagtaagttgcagatgtgatgccccttaacccataaatacttaagtgtattttctaaaaattaggactagtcttacctaacaacagtacgacaatcaaaatcaggaaactaacactgataaaatacctaatctacagttcttaaatagattttgccgatttttctgagttggtgtacttttttttttttttcctttttggagatggagtctcgctctgtcacccaggctggagtgtagtggcgcgatctcacctcactgtaacctccgcctcccgggttcaagcaattctcttgcctcatcctccatagaagctggaattataggtgcctgccaccatgcctggctaatttttgtatttttagtagagacggggtttgaccatgttgtccaggctggtcttggaacttctgacctcaggtgatccacccgccttggcctcccaaagtgttgggattgcgtgagccaccgcacttggccaatatgccttttttaaaatggcagctatatgaactatattgacatagaaaattcacctgtaagtgcacaattcaatgatttttggtaaatatacaaagttatgcatccattaccccaaaaggattccttctgtctgtttgcaagtcaccctgttccaccccagtttcaggcaagccctcatttttctgtatagatagtagtagatagcgctgcttttttgttttatttggtttttgagatggggtctctttcacccaggtggagggcagtgctgcgatcttggctcactgcaacttccgcatttcaggcttaagcaatcctcccaccccagcctcccaagtagctgggaccacaggtgcacgccaccatgcctggctatttttttgtatttttggtagagatggggtttcaccatgttgcccaggcgggtctggaactcaggctcaaaggatccacctgcctcgtcctcccaaagtgctgggattacaggtatgagccactgtgcccagccttgtttttgtttttaaaaagatgaattcttcctgtgttgctcaggctggagtgcagtggctattcacaggcgtaatcccactattgatcagtttgggagttttgcccttctctgttggcaacctggtggttctctctcatcccaggaggtcaccatattaatgctgaatggacttagcatgaacacctgatcagtagcgtgct

SEQ ID NO: 76658 - DNA, 1584 bp, Homo sapiens
ccgcctcccgggttcacgccattctcctgcctcagcctcccgagtagctgggactacaggcgcctgccactatgcccggctaaatttttgtatttttagtagagacgagatttcactgtgttagccaggatggtctcgatctcctgacttcgtgatccacccacctcggcctcccaaagtgctgggattacaggcttgagccaccgcgcccggcccggagtttcatacttagcaggaaaaggtgctttgaaccttctaaaatgtgaggtactttcaatattttaaaaaatgctatggaaatgatttcagtgccataagataactctgcatttctctcttttaaatcccacatattatacaatccctcagcaaatcctattggctgccttcaaaatatatccaggatccaacaacttgatagcactttcaccactaccacctgttccaggccaccatctctccaggctaccatctcttatatggattattgtaccagtctcttgcttgtatcctgttcccttccaggcttaacacagtggccagtgatactgttaaaatgtgacaagtcagaaactcttcaaatgattttcacctcattcagagttaaaactaaaatgtttatttacattgtgttacatagccctacactctactcataatactcagtatttatttctgattttcttcatttattctgctccagtcatactgttggccttgctattcctccctcaaatacaccattcctgcttcagcctctttgtatttgtcttttcctttgcttggaagtctctttcccccagatatgaatagggcttcctgcctctgcctcttttaaatctttgttctaatcttcaccttcttggtgaggcctaatcgctgtatttaaaataaactactccatagctctcttccctaatttatttttctacaaagtacataccatctttcaatgtattataatttattttgtttatcatctataggtaacagataagctttgcttatgattatgaaagttaattctcaatcagtttcacatggcaaaacacataaacctgtgttgaaataagtagttggtaatcttttaggctgcttaaagtggacattagtatttatcaaagatgagaaatgttttctgattttccatgagagaccaatcttttttatttttgttttgaaatggagtctcgctctgtcacccaggttggagtgcagtggcgcggtcccagctcactgcaacctctgcctcccaggtttaagcaattctcctgcctcagtctcccgagtagctgggactacgggcgcctaccaccattcctggctaatttttgtatttttaatagagacgggctttcaccatgttggccagtctggcctcgaactcctgaccttgtgatccgcccgcctcagcctcccaaagtgctgggattacagatgtgagccaccgcgcccaggagaggccagttatcttaaaggaatatccataaaaattagctgttaactggtatttttgccttcacctttgaagtccagcctatcaacaagcaagttttggcagctccaaataaaggggaatatgtt

SEQ ID NO: 76659 - DNA, 1218 bp, Homo sapiens
ctgggattacaggggtgagccactgtgcccagctaattttttttttttttgaaactgagtcttgctctgtcgccaaggtggagtgcagtggcgcagtcttggctcactgcaacccctgccacccaggttcaagcaattcccctgcctcagcctcctgagtagctgggactacaggcgcacactaccatgcctggataactttttgtattagatacggggtttcgccgtgttggccaggatggtcttgatctcctgaccttgtgatctgcctgccttggcctcccaaagtgctgggattacaggcatgagccacctcacccagcccagtgtttatatttttagtggagacaggggtttcaccattttggccaggctggtctcgaactcctgacctccagtgatctgcccgccttggcctcccaaagtgctgggattacaggtgtgagccaccgcccctgaccgagagttttagtttttaagcattatttatatctaatattattgggggaaaagtggttttaaaaatgagttcatggcccagtcttgtaaccattgtgaggctaggcactgggccattgctagaatatagtatgcggcatgagatagcataataaatttgtttattgaagtcctcagagtttgtttactgatttattcattaatcagtttattcaacaggtatgaaaaccaactatcctaagaaagcactgagataggctattataatgataatagaagagcttctgtaagtaggacagtagccctttctgttttaaaaagagataccacccccagtttttggttttggtcaaaaagttttacagaaagtttattttaaaactcaacacatttacagtcttgcaatcttgtgtttttcattgttaatatgtactgataacctacctactgtttaaaacatttctaatacctcatttgccaagtatattaaatcctcctaagggctgggcgcagtggcttatacctgtaatcccagcactttgggaggccgaggccgacggatcacttgaggccaggagtttgagaccagcctggccatacatggtgaaaccccgtctctactaaaaatacaaaaattagctgagcttggtcgtgcgtgccttgtggtgtgcacctgtaatcctagctacttgggaggctgaggcaggagaatcgcttgaacccgacaggcggaggtttcagtgagctgagatggtgcct

SEQ ID NO: 76660 - DNA, 1059 bp, Homo sapiens
taggtcatgcttttctgttttaaagaaatgtctagtaaacaggtaaacgcatactcaacctcattagtcatgagggaaatgtaaattgaaataagagtatattttacttatgaaattgtgagaattttgacactgatctattctaccaatgatgaggatatgaggaaagggcatacccatattctggtggtgggaatatacatttatatgctagttttcagggatgattttggaggtaaagtttggatacatataattttttttttttttttttttgatgtggattcttgctctgtcgcccaggctgacgtgcaatggcaccgtctcggctcactgcaacctccgcctcccaggttcaagcgattctcctgcctcagcctcctgagtagctgggactacaggcacctgccatcacacccagctaatcagatacatatagttctaacctgtattagagaattacctgtacagatgcatacagttatatgtctattatctccaggaatgttcaacattatttgtgagagctgaaagtggagccaactgttaatgttggttaaataaatatgtccgtattataataatttactgcattattattattttattatttttgaggcagtcttgctctgtcaccaggctggagtgcagtggcttgatctcgggtcactgcagcctccacctcccgggttcaagcaattctcctgccttagcctcccaagagctgggactacaggcatgtgccaccacgcctggataatttttgtatttttttcatgttttattgcctgtatttttttttttttttttgaaacagagtctcgctctgttgcccaggctggagtgcagtggcgcgatcttggctcactgcaagctccgcctcccaggttcacgccattctcctgcctcagcctccctagtagctgggactacaggcgcctgccaccgcacccagctaattttttttttttttgtatttttagtagagacggggtttcaccgtggtctcgatgtcctgacctcgtgatccacccgcttcggcctcccaaagtgctggga

SEQ ID NO: 76661 - DNA, 1998 bp, Homo sapiens
taatgtttaaatattaacattaaatggcaatacttaataaaatgacaaagttttctttaacatgacaaactaagtgaaacagttaaatgtgttcttttttttctttttctttttcttcccaccccgagacagagtcttcccctgtcacccacgctggagtgcagtggattacaagtgattctcctgcctcagcctcccgagtagctgggattacaggcgcacaccaccataccctgctaatttttttttgtttgtttgttttagtggggacggggtttcgccatgttggtgaggctggtctcgaactcctgacctcaggttttccacccgctttgacctcccaaagtgttgggattacaggcgtgagccactgcaaccaacctgttcttaaactttaaaaaatcaaatgctagcttctgattcttcagttttgattcaagaatggttacaaagtttacttttaagtttaaaaaaaaaaactatgacttttttttctcttgtcaaaagttgtatgttctctttatatttgaatggttactatctgactggaagtcaggagtttatttccccctgctgagatgtatggttcatgagcacatttgtctcttaggtagtggccagcattgaagcaacaaatactgtgtaacttggtacctttagtttttaggattctgatagatataagaaaaatgggccgggcgcggtggctcaggcctgtaatcctagcgctttgggaagctgagtcaggcagatcgtgagatcaggagaccgagaccatcttggccaacatggtgaaaccccgtctctactaaaaagataaaaattagctgggcgtggtggcgcgcacatgtaatcccagctactcaggaagctgaggcaggagaattgcttgaacccaggaggtggagattgcagtaagccaagattgcaccactgcactccagcctggcgatagagcgagactccatctcaaaaaaaaaaaaaaggccaggcatggtggctcacgcctgtaatcccagcactttgggaggccgaggagggtggatcacttgaggtcaagagatggagaccatcctggccaacatggtgaaaccccgtctctactgaaaatacaaaaattagctgggcgtggtggtacgctcctgtagtcccagctacttgggaggctcaggcaggagaatcgcttgaacccgggaggcggaggttgcaatgagcagagattgcgccactgcactctagcctgtccacagagtgagactctgtctcaaaaaaaaaaaaaaaaaaaaatcagaacacttaaaaactattagatacccatctgaattctcagtttggtctaaaaagattcgtttatgtgtggtatttaatttttggatattaactgaacctcaaaatttttttcttcctttatatgtattcctacatgattgtaggagtctgtcctgaacttcgatcatgtacattttggaaacttattttagaaaaaatctaagtcgtaagaattctcaatgaaaagagggtctttgccaatttctttgggtaagaaaagttcagaattttgcagatactctaaaaatgaaagtcaacaaagaaggcatataaaattgtgacgttttcaaataaaatgatttgtcatgtccttttttctttagactgctgcagtaagaatgtcttttccacctcatttgaatcgccctcccatgggaatcccagcactcccaccagggatcccacccccgcagtttccaggatttcctccacctgtacctccaggtaagtttgttgatactgttttttgtcgttaaacttgtacttttgtctttgtgatactaacttcaggaaaatgttagatatgtgactgtgttagtgaagatgcctctcagcgttgtttgggaaatgtggatgtctctttttcctatagcagtagcttttatatctggctgagtatcaaactcatctggaaatttttttttttcttctcatctggaaagtttttaa

SEQ ID NO: 76662 - DNA, 1050 bp, Homo sapiens
tggagaacggggtctcactattttgcccaggcagatctcgatctcctgggctcaatctgtcctcctgcctgtgcctccctaagagctggaattacaggcgtgagccaccgtgcccagctgtttttacttttaaaggattctttaatagcattgttcacctataagtcagtctgtatttgtgaaaggcattggttttgaggatcaccgaaccacatgaacccgaatggataactatccaggattttatgctctttaagtcaaaagcatattgaggtggccattttgttttcaggatagtcttttttgtaagtttatatggaccaacctgataccacattccttttgaaaataagatagtatttatcagtatttcactttcatttgtcttatatttccacttatgttaattatgagtaaggatacttaattgtgtggcatgttgttgatagagaatgcagtcatgtaaaatcagtgtggtttttcttttcttagggaccccaatgattcctgtaccaatgagcattatggctcctgctccaactgtaagtataacttaaaggaggaatcatgagttatggtagtgctagtgcttttaagctgaacagcatgataaacttagataaattatgagtatttaaaagaataacaaggacagaatgacagcacccctgtagagcatatcatttatttgaataagtatcattttcacttaggtgtgcatatatgcagttgcccttgcaatgtgctccctaagtagataattctatgattttcctgttactatctagactcttcatatacttgttattacaaatttaggactttggctcttcattgccttctcatcttggtcctgggagatgggagaaggatgtgacatgtctgatctcttaaaagaacataggaatccttgtaaaaattaaaattttgaaatgaaatttgtgtggactaccttttacatgtttcctcctaccttcctaaggtatatggcctaaggcataaattttaaatgttcaagacataggccaggatcacctgaggccaggagtt

SEQ ID NO: 76663 - DNA, 1053 bp, Homo sapiens
gccgaggcaggagagtcccttgaacccaggaggcggaggttgcagtgagccgagattatgccactgcactccagcctgggcgacagagcgaaattccgtttcagaaaataaaagtaaaaattatgtcttaaacataacaaagttttcttggttatttttgtttcttttttaagaagaaaggtaatctagtagtagaagtttacttgtcacaaataagtttgcattaatgaaatgtgctatgcactttaggagctttagaagtatacaagcatgcagagcttaaataatgtgctatatatatttatttaatcctgatgtttttagcctaatgttaattgtggtaggaaatttaattgctggatcaatttttattttgtttcttcaccttaggtcttagtacccactgtgtctatggttggaaagcatttgggcgcaagaaaggatcatccaggcttaaaggctaaagaaaatgatgaaaattgtggtcctactaccactgtttttgttggcaacatttccgagaaagcttcagacatgcttataagacaactcttagctgtaagttaaactgtttatttttcattaaaaatttttttatcattctacatttcaaacttaagcagaaagaagactttcagtgattgctttttattttaaaaaatttcagtcctgcagcaaaggtgaaaaagtacagtgaacacgtttgtattcttttcctagattcaccaatgaacatgtttagatattttatgtacacatgtgtaccacacacacttttttcttggataatttgaaagtaaattgtggcataacatttcacctgtgaatccttcatttatctcctaagagcaaggacattctgcgacataatcacaatgccactatcacacatgaaatttggccgggtgcagtggcttttgcctgtggttgtcatcctagtcctttgcaaggctgaggcaggaggatctcttaagctaggagttcgagaccagcctgggcaacatatcgagacacatctttacaaaaaattaaaaaataatagggccagatgca

SEQ ID NO: 76664 - DNA, 1357 bp, Homo sapiens
gcttgaatctgggaggcagaggttgcagtgacccaagatcacgccactgcactccagcctgggtgacagagcgagactccgtctcaaaagaaaaaaaaatcctttataaatacatacatattgtttcaaaacatttctttatagattcataatatttacttaaatttattatagtttgttttaaccattctaattttaggcatttaggtttacgtgtttattttgttaggataagtagtgatgcgaaacttttaataaaaggtaaacaatgttctgcaaatgaagaatcagtaagaatttatatttttctttaaatgatttgttgttcatttctttcatgtgataagtttgtgggaattgcaaaaattttcgcaaatgtagttgctggttttttattttatgttttttatccctagtagaaatataattttgcttttagttacattaaaaattattttgttaaatggtagcaatctgtttgttttgttttctttttaagaaatgtggtttggttttgagctggaagagagtacaaggtgcttccggaaagcttcaaggtatgtcatttttttccttatttgctgaaatcactttaactaacctgtgtgcttaaatcactttgcatgacttaactctcattgtctttatcagtaagacttattttattagcactctttgtcctcttttttattgaaatagggttaaaaggcagtttgggaaaatattggctgagaattgagatcagaaggaggaaaaaggtgtaagaggaaaggaaaaaattaaaattgctcaatttaactggtttcttgttctttcaaaagtctcttttgtctcaagaaatgactgcatgatcaaaatggaacaattagtaagggagaagaagagacaatcatggcctgttaactttttttttttttttttgagacctagtctcactctgtcacccaggctggagtgcagtggcgtgatcttggctcactgcaacctctgcctcctgggttggagcagttctcctgcttcagcctcctgagtagctgggattacaggtgtgcgccaccatgcccggctaatttttgtatttttagtagagacggggtttcaccatgttggccaggctggtctcaaactcctgacctcagatgatccacccgccttgacctcctaaaatgctggcattacaggcaggagccaccacacctgacctcaaatgttaattttttaaatagttgatttgattcaggttctatatgaagtccacacattgcaactagttggcaatttgttttaagtctcctaattttttttattagcaccatcctctaaccaactgagctaactggccagactcttaatattt

SEQ ID NO: 76665 - DNA, 2324 bp, Homo sapiens
cctgcctcagcctcccaagtagctgggactacaggcgcccgccaccgcgcccggctaattttttgtatttttagtagagacggggtttcactgtgttggccagaatggtctcgatctcctgacctcgtgatccacccgcctcggcctcccaaagtgctgggattacaggcatgagccaccgcgcccggccaattgactccttttaatcatgaatttcattgactctgctaaatattttattagagcttctaatgagtagcagtttgtctgatttgaatttttcttcctctctgtttttccctttttttcccctttggttgtttgaggatactaaaagtgaaatggttatcaaagggaattggtggacaggggtggaattatgaattgagtggtctttgtattaaaacatttggactctagtgattctacttttccataattttttttcttttgtaagtgaattggtatttcactaattgttttcatccattgctagccttcggattctgtgagtacaaggagccagaatctaccctccgtgcactcagattattacatgacctgcaaattggagagaaaaagctactcgttaaagttgatgcaaagacaaaggcacagctggatgaatggaaagcaaagaagaaagcttctaatggggtatgttttctgtcgtgttatcttttctaggccagactgtgctatttcagtgtagtgcttctcattataaatgaatctaatatggggcttcaaaagatcatcatgtatgtgcttgtggcttaatgtaggagggtattttatagtttgtagttattttaagtcttatctgcccatagtgggtggatgactgttggtttgcttgttccaggttgggatgaaagtagtaagggaggctggacaaggttaacttgccagagaaagcactggtacagactattccaaacagagctaattcattaaggcagctttgtaagtaagtacaaaatatatttcaacctacacaatttttattagtttccctctcttttagaagtacaccgactctaaaatgaatgaaagtctgattacttgccttaggttgggggctttatccaagctctactaagtgaagctaaaataaaggacattgttgtatattgtattttaatgtatacattattacctcctcagcaaagtgaaacatagctaaaacttgagtatatatttccttcatttctcttcttagttcctttttggcatctcatgctgaacaaatccaaaatagatttattaatgccttcccccaacacaaacaaaaccagaagagtctttcgctgtcgtcaaatttttattatctttcaaaatagaaatcgctttttgctgggcacggtggctcacgcctgtaatcccagaactttgggaggcagaggcgggcagatcacctgaggtcaggagttcgagaccagcctggccaacgtggcgaaaccctgtctctactaaaaatacaaaaaattagcctagcgttgtggtgggtgcctgtaatcccagcaactcagaggctgaggcaggagaatcgcttgaactgcagaggcggaggttgcagtgagctgggatctagccattgtactccagcctgggcaactagagtgaaactctgtctccctgctgccaaaaaagaaaaaagaaatacctttcatgttccctccaagttctttgttaaaaaaaaataaaaaccaaacccaaaaaactcacaaaatgaagcaaagtataaataatcaattaaataccacctgtaatcccatcatcataagcaacactgtaggcggtttggatgtatgttcttccagacatttttctgtgtatgaatgtggttcatttgttttttgttttttttgagacagagtctctctgtcgttcaggctagagtgcagtggtgcgatcttggctcactgcaacctctgcctcccgtgttcaggtgattctcctgcctcagcctcctgagtagctgggattacaggcatccaccaccacgttcagcaaatttttgtatttttagtagagatggggtttcatcatgttggccaggctggtctcgaactcctgacttcaggtaatctgttctccttggcctcccaaagtgctgggattacaggtgtgagccaccacacctggccaaatgtagggttttgtttgtttgtttgtttgaaatggagtttccctctcttgcccaggctggagtgcagtggtgcgaccttagctcactgcaacctccacctcccaggttcaagtgattctccctcctcagcctcccaagtagctgggattacaggtgtccgccaccaggctcg

SEQ ID NO: 76666 - DNA, 1001 bp, Homo sapiens
agtctgtggagtggtctttctaacctgatcatctaccatgatcaggttttgttttttttttttttttttcttgagacagagtctcactctgtcgcccaggctggagtgcagtggcgcgatctcagctcactgcaagctccgcctcccgggttcacgccattctcctgcctcagcctcccgagtagctgggactacaggtgcccgccaccacgcctggctaattttttttgtatttttggtagagacggggtttcactgtgttagccaggatggtctcgatctcctgaccttgtgatctgcctgcctcggcctcccaaagtgctgggattataggtgtgagccactgcatccggcctaggttttttgttgttgttgttattgttttttttttaaatattagcaatcagttaagatttttgggttaataaacttttcttctaaaaatgtgaattagttaattccaaatgctttatctctaatagtaaaatagccatattgatatttaaattttggtttacagtggaaacaataatcaatttagggtctataaggattttttttgtcttttgagacggagtcttgctctgtcgcccaggctggagtgcagtggcgtgatattggctcactgcaatctctgcctcccgggttcaagccattctcctgcctcggcctcccaagtagctgggaccatgcccggctaattttttgtgtttttagtagagacggggtttcaccatgttagccaggatggtctccatctcctgacttagtgagccgctgcacgcggctggggaatttttgtatttttttagtagagacggggtttcaccatgttggtcaggctggtctcgaactcctgaccttgtgatccgcccgcctcagcctcccaaaatgctgggattacaggagcgaggtgtgtgtgtgtgtgtgtgtgtgtgtgtgtgtctgtgtgtgtgtgtgtgtttttgatgggggtggagacagagtctcgctctgtctcc

SEQ ID NO: 76667 - DNA, 1177 bp, Homo sapiens
actcccgattcttgcagtttggtatatttagcaatctgatgtttttgtttgtttgtttaatctacatacaattttgctttttctgagtggtagctatcacaattaacttaaaattgtattttgcctttactacgtaactgaattttcaactgtttaaaagagtcgttactatttgtgtacctattgagcaaaacagtctgaaaacttgtgaatggtttgcagatgtgtcgtatagtgtgctagtcctgaaatttagggaccagaattttttagctattaagaaaaagaaaatgaaaatgaagtagtatctcaggaatagttaaataaaaaaatgaagcttttctgatgttaagaacaaaaccaattctgtgtttaataggactacagagatgtttttgagaaaacatgtatgtttattaactcttgttgtagagtgattttgattttcttgcttgatttttctttcccctgaatttgctgttttgtttaagaatgcaaggccagaaactgtcactaatgacgatgaagaagccttggatgaagaaacaaagaggagagatcagatgattaaaggggctattgaagttttaattcgtgaatactccagtgagctaaatgccccctcacaggaatctgattctcaccccaggaagaagaagaaggaaaagaaggaggacgtatgtgttctgacaacaacatatcatttctaccgtttgttttttatgatatcactcttatactttgattacatgtcagttttcttttttcttttcttttttttttttttttttttttgagatggaggctcactttgtctcccaggctggaatgcagtggtgcaatctcagttcactgtaacctccgcctccggggttcgagcgattctactgcctcagcctcctgagtagctgggactacaggcatccgccaccatgcccggctaattttttggtttttagtagagacggggtttcaccgtgttagccaggatggtctcaatctcgtgacctcgtggtcgacccgcctcggcctcccacagtgctgggattacaggcgtgagccaccgtgcccggccacattttaaacttttttacagagacaaggtctcactatgttttctaggctggtctccaactcctgggttcaggttatcctcctgcctccgcttcctaaagtg

SEQ ID NO: 76668 - DNA, 5004 bp, Homo sapiens
attgaggcctgtagaattcattcttcctctttcttcattagtgggaaaggagaaaaataacatatttgtttgatgtggattgggaggagataataaattcttcctctgtggcaggagttatgggtaaatattgttggtatgattagaaagccctgctactatgagagcaccttctatatttccatttcttgggggtgttggagtatccagagaggagggtagtgtgtgatcagttattgtaaaaagagtgaaatcacttctattcccaagtaatttgaaatcaagaaagcatcacagaagtgtactgtattgttcacgtcataaatgtatagggcattgctttgcagattagtatgagctctgtttttcttttttaaaaaagattcttggtggattttttcacagattttccgcagatttccagtggccccactgatcccttatccactcatcactaaggttagtttaaattgtaggctttgacaatacctgtgtttactgctgattgttgatttgtcattcttgtctatctgatttttcactatttaactttagattgttagatttgttattgtggatattctgtttacttatttactctttgagacctatacagaatatctaacctttaactgtttatattgaagtagggtgttctttattcattccctcctgtgcccgttttcttttaggaggatataaatgctatagaaatggaagaagacaaaagagacctgatatctcgagagatcagcaaattcagagacacacataaggtagtattcttgtcttttcacttgataccaatctagactttttacagaatccaaagcaaagagacaaaaaaaatcaaccttaaattagaatataattttaaatgttttttataggtttaattgatatttagatagaaaaaagaaacagaagaccaataccatattaaagtggtccttgacatgttgtgcttagttttttcagttactgactattctgcagtcatctcactttaatatgaatagaagctaattttatttttagatttcaacataaacatcaaggtcagacttaaattagattcagggggcagcaggataacatacactgtagtgtatttctgggggcagttatttaacttgatcttaggaataccttttctttagagctgagattaaaatttacattttatatttgtatagatttaagttgagtgggggagattttaaacagtaggtcagtggttaccagacttaccaaattttagatgcatggaagaactgtaaattcccataaagctaatctattcattgacccccaccattatgatagagatcatatggtgactaatgcaagatgaaactctcagcttggaaagtaacaaggaataggatgtaagtatgagcttctgttttttattatatttatggatgccccctcagaaaaatatgcaaaggggtaactggcttggaaatgggtatttatgcatagtaaatcccactcacgagttttgcctatttgaagcttctctcaatgacagtgcatctgtgaatgttcgctggtgttgaaaatgatgcttttgaacggtgcaatgcaaacactgcatgaaatgtattttgatggtcgagataataaggtgttgctggttcttactgatagactgagagatctttaactcagtgaaatgttaaatgttcattttctcttttattcttactttttcccattgctttcaaaatctgcagttcacaaataatgccaatgaatcagtgctgctgaacacttactatccagatgcccagcccttgctcacaaacacaatgctttttcaagaattaaatgtgtctaagagcacaaacataattctcccaaaattaattttgagagttgaaaaggtggtctatgggaaatcattttagatgaataattttggttaggtataatactgaaattcaggaccgagtaagcttaaaaatggtatatggttgtgtgtgtggtttaccccctttttgtttttatttatttgttaaaccctgtcatgttattggtaaattatgaggaaatcatgttttaagaaaaattcaaaaatatatttgctttaaagtttgggaatctgttaggcattttactgccttagtattatttcactggagggaatgttttgaattttcagaatgtcttttcaaaataaaaagaaatcaaaatgaaaaaccaaaacagttgttttttattgggtggtttggctaaaagggttgtttgaaactccagtaacaaaaaatgagctcagtgaacctttgcatgttttggtatgagtttattaaataaccacagactgtcagggtatcagcgtggcagggggcgtccatttacagcacggatgagtctgaagagagaataaggtaagatttatgattttttaatctgtcctttcctcttcatgactttcttacataattttagactcacctcatttcccttctccagtctttctttaaaaatatacatgtatgtttacatgtatacctgtatttgtatacatgtgtgtatatatatatatatatatatctcatatataaacttcaggaaacatttagtatggactagattcactcactttttcatttacttagaaccaaacttttgaaatgagttctgaaacaaatggttatttatataactgaatataaggagcacagtgaaataagcaagaattaaaaattgaggaattctacaggaaaaattagtattggaacagctaaaatattctgtaagtatctatttcagaaataaacaaatttctttataagtgtatgccattgaggtaagttttatatagtctagcctcattttacaatataaatttttatattcattggaactgtttcagaaatgagatttttccccctttaatagctgttagtttctgtcctctttctatcatatcttatttcatccctttgtaatttcaatgtattcagttttgactttgcccgtattctacttcgatatagactggcacagcaactgaatatattgctcatacattagctttcctttcataacctgctataagttctctgatccatgaggaagagaaaaagagtatctgacaggtaagattgctttttaaagttgttttaaatgcattacatgactgagaaaagaaaaatgcacattttattgttgcagtttaaaatttcattttggtgaaactaaacgtgaaacaaaagggataaatgtgttttgttttgttttgttttacctgtttggggtatttttttctgagtttgtgtagaaaccgtgtggtacactggtaatcttgtcagggtacaaacttggtctgactttgttatttggtttatttgtgaaccatgtacttgctcttcctcccagaaacatagcttgtaggcaaggttaatccagtgttggcgatccatgtcctagcacagcatctgtaagttaatgcacaatcgttccttccaaggatggatttatcattgtaaatatattttcattgtcttacaggcataatgggcataagtatgttgcttttaaatattttaaattaaactattacagttacatatattttgcttgaagtgagtgattttcaaactttttgtatttggtgggctgtccatcttgtaatggtgggagtaaatgtttccatagatgataaggcagttcttggctgaattcagcttgtgtttcttttggagggtgggcaaatcagagggcagagattatttagttgcattataggtattcttctataccacttgccctttgaaaccctcaacttgaggtaatgtgcagtctggggttttaattagtattaataatcttgtggatttacagaaatctataatgcacagagttgagttttaaccaatgatcgtattcatagaaaatatttcgaaccaccacattcttcatggtcattttagttagtacatagtcattgagtggccagccacacctgacacaatctcccagcatccaagattggagattcctggtctgtgtagagtatatggttttgcacgaaatctttctagtcttgtgattgcttcagtttaatttgtcacataaaaccacaagtatttaatattaatgtatcagtggtttggtgtttttgttcccagtactgggctttgcgccgggaaaaatctgaatactggagctacagagttaactctaaaagtgcttttattggtttctagaaactggaagaagagaaaggcaaaaaggaaaaagaaagacaggaaattgagaaagaacggagagaaagagagagggagcgtgaaagggaacgagaaaggcgagaacgggaacgagaaagggaaagagaacgtgaacgagaaaaggagaaagaacgggagcgggaacgagaacgggatagggaccgtgaccggacaaaagagagagaccgagatcgggatcgagagagagatcgtgaccgggatagagaaaggagctcagatcgtaataaggatcgcagtcgatcaaggtaaggctttacagaagttactgtttcctgatagctttaagaaaactatcgggtagtcctccagagtaccatttgcattcatggaatgagaacttttgtgtgtgtgtgagacattctcactctgtcactcagcctggactgcagtggctgagcaatctccgcctcctgggttcaagtgattctcattcctcagcctcccaagtagctgggattacaggttcataccaccatgcccagctaattttttgtatttttggtagagatggggttttgccatgttaatcagcctggttttgaactcctggcctcaagtgatccgcctgcctcagcctccctaagtgctgggattataagcgtgagtcactgtgcccagcctgagaatttttttagagacaacatggtctttgtctgtctgtctgtctgtctgtctctctctctctctctctctctctctctctctctctctctctcacacacacacacacacacacacacacaca

SEQ ID NO: 76669 - DNA, 1342 bp, Homo sapiens
agtaagctaaactatctcttaacatattcattagtccttcatatttcttttgggaattaagttttccttttttctgttttacaccatcaggggattgactattatttcagtatatgatgggcattaactaaccattcattttaatgatttataactattttatattcagattgtatttgttttctgacataccagtaagcattaggtattagaatgcattttaggatttgggactgcaatttatgtctttctgatgagtgtagaggaggttacatagttttatggaaatcaagtgctagattctggcctgtgagattttatattatttcataatgtatgttgtcctcctttactttggtcttgaaaacagaaagtagactgacagatttgtaaaatattttgtttacattagagaaaaaagcagagatcgtgaaagggaacgagagcgggaaagagagagagagagagaacgagagcgagaacgagaacgggagcgagagagagagcgagagagggaacgggagcgagaaagagaaaaagacaaaaaacgggaccgagaagaagatgaagaagatgcatacgaacgaagaaaacttgaaagaaaactccgagagaaagaagctgcttatcaagaggtaagttgagaaaatgcctttattcttaaatcttggtatcccttaataggttaatcaatatttatagaatgctatgtataaatttttaaagctttgaaaatttaatttttttagcgccttaagaattgggaaatcagagaacgaaagaaaacccgggaatatgagaaagaagctgaaagagaagaagaaagaagaagagaaatggtaagattctaggctaaaataagtgatttttcaggtaaaaagtcagattgtatctttactgctaactacaagtaacttaataattgaaatgcacaagcttctctattcatgtataatttaatttttatgtattttgagtaattttgagccaatttaagtacaccaaaatcttttttcctcttcaaatttttgctgcatctaaagttatctttttgtataccatcaaagtaaatttgtcatatagtaatatttaagtcaagaatttattaacttatttttaagaatctgcatatttttaaaattgttgaactgttgttattagatataatagttgcatttgaaattccgtaagttaagagattcattttatctcatggattgtttactattggtttagagttggggggcattacctttaaattgattgatgaacatgatttaaatttctgcgtttcttaaaaactatttcttatagtatcatctaccttaaaaatggaattaaa

SEQ ID NO: 76670 - DNA, 1077 bp, Homo sapiens
cctatacttaatatatggagtatatgaaaactaaaatttaagaggacaagaaaaatcttttttttaaccaaagtattattatatttattatggcatagagtggtattttatacatatctcattttacagtaaaaacattttatgtacaactgtagagagatagctgcacagatagctccaacttaaattagaaaatattttctctatagaaaataataaaaacaccgtttcccaggctagcccaacaagtttatttaaaccaaatagctgaatacatatacatttataaatatggtttgaattctgggatccaggagaaactttagtttcatttattgaaacggccatgtttgtcttaaaattatgtgaagagaaattcctataagtctccctcttactcttggtttatgtctgggtcagaaaaatctgtttacacaaaaaagggaagagtaatctttattacttgtatgttaattttatacattgtccttatttcctcaaaggccaaagaagctaaacgactaaaagaattcttagaagactatgatgatgatagagatgaccccaaatattacaggtaaagaaggcttgttctgtggattcatacttggttttttattagctgtgtttttccatctgcacagttgataatgcatgttcactaagtggaataagaaaaacaaactttcacattctgagtaattattaattctatagctaatacactgttttcgttgggagaaaagagctatcagaaaaggataaacatttctatgcatcttttgtgcagtgggggagcccatgatagtattatatcaaacaatactatttttttctttgtgtgttgtaaataggtctgatttttaaaattttttcttgattcttttagagacagggtcttacctcggctggaatgcaggggcatgatcatagttcactgtaaccttgaactcttgggctcaagcagtcctccctctgcagtctcttgagtaggttggactataggtgtgggctaccacacctgtgtgctaggtccaatttttatagcaagttacaacgaatctctgtaactatctg

SEQ ID NO: 76671 - DNA, 1088 bp, Homo sapiens
ataacgtcaacattctgagaagtaatgaactgctagataggagagaacctctgctttctgttgattctacactactttctgagataatttttacaagtgaataaattgaggatacagaactctcagtgctactaatgctacttgatatatttttttaggttggtatctaggaaaacgaaaattatttgttgggtattccttgtgaaataggcacaaagtgtgagctctctttctgaaagtgactattttacttgtttagacacttattagaatgactttaagaatgaagggaacatagtgataaatgacaagataatgcttgttatacatttacatgtagagagcacactctggtgtgttccgtagatacagaacattaagacattctttaacctcttagcatgcaggttgtaatgttgaaaagaggtgctgttggagatgtcatgtttacttctcaatgatcggagtattaaatgaagccttttatcattcacttttacagaggaagtgctcttcagaaaaggttgcgtgatagagaaaaggaaatggaagcagatgaacgagataggaagagagagaaggaggagcttgaggaaatcaggcagcgccttctggcagaagggcatccagatccagatgcagagctccagagggtaagatactgtaccatctggtcgggcgcggtggctcacgcctgtaatcccagctctttgggaggccgaggcgggcggatcacgaggtcgggagatcgagatcatcctggctaacacggtgaaaccccgtctctattaaaaatacaaaagattagccgggtgtagtggtgggcgcctgtagtcccagctactcgggaggccgaggcaggagaatggcgtgaacccgggaggcggagcttgcagtgagccgagatcgcgccactgcactccagcctgggcgacagagcccctgactcctgggttcaagcgattctcctgcctcaggtacccgagtagtagtacggattacaggtgtgtgccacctcgcctggctaatttttgtatttttatttttatttatttatttttttgagatggggtctcgctgtgtcgccc

SEQ ID NO: 76672 - DNA, 2007 bp, Homo sapiens
atgtccttttttttttctttttctttttctttttttttgagatggagtcttgctttgttgcccaggctgtagtgcgattctgcaaggctcactgcaacctccacctcccaggttcaagcgattctcctgcctcagcctcctgagtagctgggattacaggcgtgcaccaccacacctggctaatttttgtattttcagtaaagacagcgtttcaccatgttggccaagctggtctcaaactcctgacctcagatgatctgcccaccgcggcctcccaaagtgctgggattacaggcatgagccaccatacctggccttttctcttttcataaagatattttacaagaggtaatgtaaaacaaaaatcaagttgaatggtgtagagttgtagttaatcagattattgtttgggttttagatggaacaagaggctgagaggcgcaggcagccacaaataaagcaagagccagaatcagaagaggaggaagaagaaaagcaagaaaaagaagaaaaacgagaagaacccatggaagaggaagaggagccagagcaaaagccttgtctgaaacctactctgaggcccatcagctctgctccatctgtttcctctgccagtggcaatgcaacacctaacactcctggggatgagtctccctgtggtattattattcctcatgaaaactcaccagatcaacagcaacctgaggagcataggccaaaaataggactaagtcttaaactgggtacgttagcatttccttccttctttattttcttcccttcacccctgcaaatacctgtattgtgctttaaagaaaaaaatttatatttgtgcttggttaggtagatagaagattactaaaaaatgcctttctagctcacgattgttttcatagttttactagtgctcctatatctgcagctgcctcgagttctgagaagaagtgaaaagtttaattttctagcacttgtgagtagtgagttattttttacagttgggatctttctctaagatttgtggaagtatattttgcattgcttttgagggatggtgggttataaaatgaaacatttggaaattaagtcatcttgctaagagagtgtttttactgtaggtgcttccaatagtcctggtcagcctaattctgtgaagagaaagaaactacctgtagatagtgtctttaacaaatttgaggatgaagacagtgatgacgtaccccgaaaaaggaaactggttcccttggattatggtgaagatgataaaaatgcaaccaaaggcactgtaaacactgaagaaaagcgtaaacacattaagagtctcattgagaaaatccctacagccaaacctgagctcttcgcttatcccctggattggtctattgtggattctgtgagtaggaaattatatttcatcatattattgggaacagttggaatatgccatacaaattcatttgaagaaaaaaaaacctcatttgattctattaatgacaaataagtagggatgatcatcttgacaccaactcaatgccatggtcaagaaattagtaataatggaaattttttttgtgctacttgaagacttactaaaagcagatgattgtatcttgatacatatctgtcttagttcaacttgtgaaataacattatattttagtctcaggaaaaatcatgaagctttaataactgttatagcaagttacaattctttaattcagtaaccgtggtttgttttgcagatactgatggaacgtcgaattagaccatggattaataagaaaatcatagaatatataggtgaagaagaagctacattagttgattttgtttgttctaaggttagtcttctattctcttccatgccagcatttattttatatattaaaatattagacacttcttaaaagagcagaaattttacagagtcaagttccatgatggtttaggttcagttaagtgatttatatctgcttttttaaagttatttttatttttggtgtgtttttt

SEQ ID NO: 76673 - DNA, 1052 bp, Homo sapiens
tttcatcacccaggtgttaagcctagtactcattagttatttttcctgatcctctccctcctcccaccctctgccctacgataggccccattgtgtgttgttcccctctcttcgttcatgttttttcatcatttagctcccgcttataagtgaaaacatactgtatttggttttctgttcctgtgttagtttgctaaggatagtggcctccagctccatccatgtccctgtaaaggacactatttcgttttttatggccacaagattgtacatatgtgctgctttttggacaggtatccaaacacctgttgtattgacagtaaacatcaaatccccgttgcatttaatttgggattacagtcagtggtagcatgtagttaacactgtgattttgtgagacaaggaaaggagaagaaaattgatggtaaaggttgagcaagagattgaactatgatctccaagttaggaagagaagaaaatagtatctgaatagagctggtggtttgaatgaattaaggactagtggttccagtgaagttgtggaaggcgaattgtaataaaacaactgaaaggagaggttatggtcagagtgtagaaagttcaagtctatatgtgataggtcagcccagacgatggcaaggtgcatagtatgactatgggaaattcctgggtattgggagtcagattggagagaaatactggaaatagttgccagagcactcatttaagtggggggaaagactagatacttgccagatagctgctcttacagtggataaggtggtgagagctcatgaacgtccatggagttgtttttttttttaccaagaaagaaacagtgaagacccacaagtcattcctgtggagattaagacattgagagtgagagactgcctgagaagtgccggggctctaggagatagaggagggtttctgttaagaggaaaaacctaatttagttgttgatgtgtagtataaaatggaatagcggtccaaagggcagagcgggaagacagcaatgggaagatgagtaaggaaggaaaaatcatcaa

SEQ ID NO: 76674 - DNA, 2366 bp, Homo sapiens
ctcagcctccccagcagctgggaatacaggcgcacgctgccatgcccagctagttttttgtatttttagtagagatggggtttcaccatgttagtcaggatggtcttgatctcctgaccttgtgatccgctcgcttcggcctcccaaaatgctgggattacaggcgtgagccaccacacccggccactaaaacaaccttaaaatcttaactagcatttaagtaataagtgcttattgtcagtggatgaaaaacttttttatactggccactgtttttggcagatgttgatgattgcttctcttacatgtgttgctgttttgtttcctctttaggtacttgatgaagaagcagaagtttttatagtcaaaatgtggagattattgatatatgaaacagaagccaagaaaattggtcttgtgaagtaaaactttttatatttagagttccatttcagatttcttctttgccacccttttaaggactttgaatttttctttgtctttgaagacattgtgagatctgtaattttttttttttgtagaaaatgtgaattttttggtcctctaatttgttgttgccctgtgtactcccttggttgtaaagtcatctgaatccttggttctctttatactcaccaggtacaaattactggtatgttttataagccgcagctactgtacacagcctatctgatataatcttgttctgctgatttgtttcttgtaaatattaaaacgactccccaattattttgcagaattgcacttaatattgaaatgtactgtataggaaccaacatgaacaattttaattgaaaacaccagtcataaactattaccacccccactctcttttgatcagaaatggcaagcccttgtgaaggcatggagtttaaaattggaatgcaaaaattagcagacaatccattcctactgtatttctgtatgaatgtgtttgtgaatgtatgtgtaaaagtctttcttttccctaatttgctttggtggggtccttaaaacatttcccaactaaagaatagaattgtaaaggaaaagtggtactgttccaacctgaaatgtctgttataattaggttattagtttcccagagcatggtgttctcgtgtcgtgagcaatgtggtttgctaactggatggggttttcttattaataagatggctgcttcagcttctcttttaaaggaatgtggatcatagtgatttttccttttaattttattgctcagaaatgaggcatatcctaaaaatcctggagagctgtatttaatgcatttttgcactaattggtccttagtttaattctattgtatctgtttatttaacaaaaaattcatcataccaaaaagtgtaagtgaaaaccccctttaaaacaaaacaaaaaaatgaaataaaattaggcaaattgacagacagtgagagttttacaaacatgataggtattctgctcggcaatttgtaagtttacatgttatttaaggataaaggtaaatcattcaaggcagttaccaaccactaactatttgttttcatttttgtcttgtagaaggtttatatcttgttttaccttggctcattagtgtttaaaaatgtactgatgatgtgcttagagaaattcctggggctttcttcgttgtagatcagaatttcaccagggagtaaaattacctgaaaacgtaagaagttttaaacagcttttcacacaaattagatgcaactgttcccatgtctgagtacttatttaaaagaaaggtaaagattggcctgttagaaaaagcataatgtgagctttggattactggattttttttttttttaaacacacctggagaggacatttgaaaacactgttcttaccctcgaaccctgatgtggttccattatgtaaatatttcaaatattaaaaatgtatatatttgatcctggggactcatattctttcagaatcatgtaaataaatggcatcatgttgtaattgtgtggtgcatactagaaaagttaaaaatatgggctgaactttttatggacttgatttttatgactattggtatctaaaggtcaaggaagccatttacattattttggatgaatctactatacatctatggaaatgtctcttttattttaaattctggtttctcaacggaaaatttcagaaaagatgccccttgccattttcgttaatttttcagtcttttcttagacacacccccagcctaagaccttgttcgaggagtttattgtgtctgtcttttcttaacatactgcactgttcttaagcatcatattgtgttgtttttatttagccactattaacatgaaggtttattcaggtagatttgatttcctttg

SEQ ID NO: 76675 - DNA, 2755 bp, Homo sapiens
tttattttttaattttaatttttattttttgagatggagtcttgctctgtctcccaggctggagtgcagtggtgtgatctcagctcacgggttcaagcgattctcctgctgcagcctcccgagtagctgggattacaggagcgcgccaccacacccggctaatttttttgtatttttagtagagacggggtttcaccatgttggttaggctggtctagaactcccaacctcatgatccgcctgcttcggcctcccaaagtgccggaattacaggcgtgagcgactgcacccggccgcttgggggtggatttttaaagaaactttagaagaatgtaacttgcccagataccatgtaccgttaatttcattttcggttttttgaatacccatgtttgacatttctccgttcaccttgattaaataaggtagtattcattttttagttttagcttttggatatatgtgtaagtgtggtatgctgtctaatgaattagacattggtactgtctttaccaaaactggacaaagagcaggcagatgcaaaaatcaagtgacccagcaaaccagacacattttctgctctcagctagcttgccacctagaaagactggttgtcaaagttggagtccaagaatcgcggaggatgtttaaaatgcagtttctcaggttctcgccacccaccagaagttttgattcattgagtggtgggagagggcagagatatttgcgattttaacagcattctcttgattgtgatgcagctggttcgcaaataggtaccctaaagaaatgacaggtgttaaatttaggatggccatcgcttgtatgccgggagaagcacacgctgggcccaatttatataggggctttcgtcctcagctcgagcagcctcagaaccccgacaacccacgccagcgctctgggcggattccgtcaggtggggaaggccaggtggagctctgggttctccccgcaatcgtttctccaggccggaggccccgcccccttcctcctggctcctcccctcctccgtgggccggccgccaacgacgccagagccggaaatgacgacaacggtgagggttctcgggcggggcctgggacaggcagctccggggtccgcggtttcacatcggaaacaaaacagcggctggtctggaaggaacctgagctacgagccgcggcggcagcggggcggcggggaagcgtatgtgcgtgatggggagtccgggcaagccaggaaggcaccgcggacatgggcggccgcgggcagggcccggccctttgtggccgcccgggccgcgaagccggtgtcctaaaagatgaggggcggggcgcggccggttggggctggggaaccccgtgtgggaaaccaggaggggcggcccgtttctcgggcttcgggcgcggccgggtggagagagattccggggagccttggtccggaaatgctgtttgctcgaagacgtctcagggcgcaggtgccttgggccgggattagtagccgtctgaactggagtggagtaggagaaagaggaagcgtcttgggctgggtctgcttgagcaactggtgaaactccgcgcctcacgccccgggtgtgtccttgtccaggggcgacgagcattctgggcgaagtccgcacgcctcttgttcgaggcggaagacggggtctgatgctttctccttggtcgggactgtctcgaggcatgcatgtccagtgactcttgtgtttgctgctgcttccctctcagattcttctcaccgttgtggtcagctctgctttaggcatattaatccatagtggaggctgggatgggtgagagaattgaggtgacttttccataattcaggtgagatgtgattagagttcgatctgcggtggtggcagaggcttacaagaaacactaacgggacatgggaaccaattgaggatcagggaataaagtgtgaagttgactaggaggttttcagtttagaacatggcagagacattctcagaaataaggaagttaggaagaaagacctggtttagagaggagggcgaggaagtggtttggaagtgtcactttggaagtgccagcaggtgaaaatgccctgtgaacaggactggagctgaaaacaggaatcaattccatagatttccagttgatgttggagcagtggagaagtctaagctaaggaaggggaagaggaggccaaggcaaacacttaggaacacttgcaacgagggggtggaagaagagcaaggagccagctgaggagaatgagtgtggttggagaaccaccacagcgcagggtcgccagagctgaggaaggggagggaagcttcaggaaggaaaaggttggcagggattttgagtgttaggcctggtgtagcagaaggaacagaagatttagagcagcgctagccaatagaaataaaatgtgaggcccggggcggtggctcacgcctgtaatcccagcactttgggaggccgcggggcggatccttgagctgaggagttcgagaccagacaacacggcgaaaccccggctctacaaaaaattagctgggcgtgggggcgcgcgcctgtagtcccagctgctcccaagcgaggctgaggcaggagaatcacttgaacccgggagaaggaggttgcagtaagccaagattatgccactgcactgcagcctgggcaaaagagtgagactgtctcaaaaaaaaaaaaaacctgttttgtttttcttttggagaaaaggcatacaaatttatta

SEQ ID NO: 76676 - DNA, 1288 bp, Homo sapiens
aatttggtcagcatagaaaaaggaatgttgagaacattccttaagattactcagctccctttgctggaaatcagaagtcattaagtatctttgtggttgaaaatgtttggtgtctcaggcggttctacttattgctaaagaggtctaccttgagcttatagtaaatttgtcagttagttgaaagtcgtgacaaattaatacattcctggtttacaaattggtcttataagtatttgattggtttaaatgaatttactaggatttaactaacaatggatgacctggtgaaatcctatttcagacctaatctgggagcctgcaagtgacaacagcctttgcggtccttagacagcttggcctggaggagaacacatgaaagaaaggtttgtttctgcttaatgtaatctatgaaagtgttttttataacagtataattgtagtgcacaaagttctgtttttctttcccttttcagaacctcaagaggctttgttttctgtgaaacagtatttctatacagttgctccaatgacagagttacctgcaccgttgtcctacttccagaatgcacagatgtctgaggacaaccacctgagcaatactgtacgtagccaggtacagtgtcagtctctgaaactgcctttgccagactggattcacttatcatctcccctcacctctgagaaatgctgagggggctaggcaggctttctctactttaccacatttataatatatttggtgaacttcagctgattgctggaggacacagggctgtttaacacataggtgttgatacagttcctacctaattcacatatcaccacctcagttgaagccttctccagcttcccaaggtgtgcagcgcctcatagttcatgttgtttattattttacctatcttgctcttattcttctacggctgagtccattttatttactgtattcattacctaacagttccttttagtgctcagtaaatattcattatgattgtacaatgcaaggataagtgtagaagttctaagggttcaaaggagggattcaggaaaagaacgtaatctgtgctgtcggacaaagagattcctcaccagctacatacacagacatgaaatttgactgcaactctactagctaatcatcataaagtgagagcagaggccaggcacggtggctcatgcctgtaatcccagcactttgggaggctgaggcgggcagatcacctgaggttaggagttcaataccagcttggccaacatggagaaaccccatctctactaacaatacaaa

SEQ ID NO: 76677 - DNA, 1027 bp, Homo sapiens
attttaaagtcttattaattaaggtaagatagttccttgcatatgtggtctgaaatcacagaaagctgaatttgaaaaaggtgcttggagctgcagccagtaaacaagttttcatgcaggtgtcagtatttaaggtacatctcaaaggataagtacaattgtgtatgttgggatgaacagagagaatggagcaagccaagacccaggtaaaagagaggacctgaatgccttcagtgaacaatgatagataatctagacttttaaactgcatacttcctgtacattgttttttcttgcttcaggtttttagaactcatagtgacgggtctgttgttaatcccaggtctaaccgttaccttgattctgctgagaatctgatttactgaaaatgtttttcttgtgcttatagaatgacaatagagaacggcaggagcacaacgacagacggagccttggccaccctgagccattatctaatggacgaccccagggtaactcccggcaggtggtggagcaagatgaggaagaagatgaggagctgacattgaaatatggcgccaagcatgtgatcatgctctttgtccctgtgactctctgcatggtggtggtcgtggctaccattaagtcagtcagcttttatacccggaaggatgggcagctgtacgtatgagttttgttttattattctcaaagccagtgtggcttttctttacagcatgtcatcatcaccttgaaggcctctgcattgaaggggcatgacttagctggagagcccatcctctgtgatggtcaggagcagttgagagagcgaggggttattacttcatgttttaagtggagaaaaggaacactgcagaagtatgtttcctgtatggtattactggatagggctgaagttatgctgaattgaacacataaattcttttccacctcagggccattgggcgcccattgctcttctgcctagaatattctttccttttctaactttggtggattaaattcctgtcatccccctcctcttggt

SEQ ID NO: 76678 - DNA, 1054 bp, Homo sapiens
gccctgcactcaattctgaatgctgccatcatgatcagtgtcattgttgtcatgactatcctcctggtggttctgtataaatacaggtgctataaggtgagcatgagacacagatctttgctttccaccctgttcttcttatggttgggtattcttgtcacagtaacttaactgatctaggaaagaaaaaatgttttgtcttctagagataagttaatttttagttttcttcctcctcactgtggaacattcaaaaaatacaaaaaggaagccaggtgcatgtgtaatgccaggctcagaggctgaggcaggaggatcacttgggcccaggagttcacaagcagcttgggcaacgtagcaagaccctgcctctattaaagaaaacaaaaaacaaatattggaagtattttatatgcatggaatctatatgtcatgaaaaaattagtgtaaaatatatatattatgattagttatcaagatttagtgataatttatgttattttggatttcaatgcctttttaggccattgtctcaaaaaataaaagcagaaaacaaaaaaagttgtaactgaaaaataaacatttccatataatagcacaatctaagtgggtttttgtttgtttgtttgtttgttgaagcagggccttgccctgtcacccaggctggagtgaagtgcagtggcacgattttggctcactgcagactcaacccaccagtttcaagcgattctcctgcctctgcctcccaaatagctgggattacaggtgtgtgccaccacactcggctaatttttgtatttttagtagagacagggtttcaccatgttgaccacactggtctcgaactcctggcctcaagtgatctgcccaccttggtctcccaaagtgctgggattacaggcatgagccactgcgcccggccctaagtggttttaatattttgattgacagtatactgaagaaatatactctaagacctttatgaatctcctcattcacaaataacactgtaggatataatggtccctataaaatacggtataactaaaatcag

SEQ ID NO: 76679 - DNA, 1035 bp, Homo sapiens
ctgtcgtaccccaccagtgctgaatttcttttttaaaactgtgctggtttttataggtaaagaaaatgtcttaatttgcatttagttggttactagtaatatcacataccttttcaatgcttgtgaactttaagcttatacagagtttaaccttgcatgttgaacatttgagtgagtggaagtgttaagtgatggccatctgtataatctattagtaatgtatggagaccattaaagatgacaggtatgtgtgatgatgacaggttgttaccaacactcagaaggccaaaaagcaagtgatataaacccatgctgggaagcattcacctcccccactttaaaaatgctagtttcttaattccttttctttatccctttttttgtctgcacgtgtttacttgcctttagtttccctgctttagtaggctgaccttgtgacttttaccaggatcccattatacttttgttcttctgtttatttctcagattttattggagggtggaattctactttttctttcttataatctagaatttacattcagatttcctgcctttcccttacaaaatacctgtgtagttggataggtggagctctggactcagagttctttcttctagtaatcttaggaaattatttaatttttctgtgttttcatattttcacacataaaagagaaaacaccatttctaaactacctcttcttttctctgcttttaagcatgtaaaggttttcccaatcttgggcagtgacatgtacaggacagtatagctttacatctgccttgttttaattaaacactagttctttgaggtaacccctactattatcccagttttatggatgaggcactgaggcaggggtcacacagctagtgtgggtcagaacctaatgggtcagaatggacatttgagtccagagtttggcctggattgacacacatagctattacgtaagattcctctcaaattcagtcctcagctccctgaagtgtgggttctcttttcatgcctccatggaaactgcgtatcat

SEQ ID NO: 76680 - DNA, 1053 bp, Homo sapiens
acgcctgtaatcctaacactttgggaggccaaggcgggcagattgcctgagctcatgagtttatgaccagcctgggcaacacagtgaaaacctgtctctactaaaatacaaaaaattagccaggcatggtggtgggcacctgtagttccagttactcaggaggctgaggcaggagtattgcttgaacccgggaggcagaggttgcagtgagccaagatcgtgccactgcactccagcctgagctacagtgcgagactctgtctccaaaaaaaaggaagaaaaactggatttttacactgtctgggtgttaggagacctctttcctgatcctcaagccagaactagaggtcttctggagctcccattgtcttgctaatgcccactcatgttgtaatgagcacaggtggaggaaaaaaagtggtcagctcactgctagtacttctaattccccagcccacctacctctcattacttttcatcttttgcaaccagctgctgcctgctttctgcccaggttttgtaactgtattcagtgggatagagagagtggaaggtacttactccatcttatctggaacctttcttaatatattttttgtcgcatttgtacatcttttatccatccttcattttattttatttttttttttgagacggagtctcagtctctcgcccaggctggagtgtagtggcatgatcttggctcactgcaacctccgcctcctgggttcaagtgattctcctgcctcagcctcccaagtagttgggattactgggacacgccaccatgcctgggtaatttttgcatttttagtagagatgagggttccccatgttgcccaggctggtctcgaacttctgacctcaggtgatccactggtttcggcctcccaaagtgctgggactacaggcctgagccaccacgcccagccttatccttcattttagacagtttaagaggtttgtattcagccagatctccacatttacttgttcatttgtgttgtgatgttttttaatgttcaagtcttagcacacacaaacaattatata

SEQ ID NO: 76681 - DNA, 1056 bp, Homo sapiens
ctaggtaaagccattctgttggcctttgccaaattgtactattttataaagttgttttaaagagagatgtgggccgggcatagtggtgcacatctgtaatctcagcactttgggagtctgaggcgggcggatcacttgaggtcaggaatttgagaccagcctgggcaacatggcgaaaccctgtctctactaaaaatacaaaaattagcctagcgtggtggcgcgcacgcgtggttccacctactcaggaggcttaagcacgagaattgcttgaacccaggaggcagaggttgtggtgagctgagatcgtgccactgcactccagtctgggcgacaaagtgagaccctgtctcaaaaaagaaaaaaaaaatctgtactttttaagggttgtgggacctgttaattatattgaaatgctttcttttctaggtcatccatgcctggcttattatatcatctctattgttgctgttctttttttcattcatttacttggggtaagttgtgaaatttttggtctgtctttcagaattaactacctttgtgctgtgtagctatcatttaaagccatgtactttgttgatgaattactctgaagttttaattgtttccacatataggtcatacttggtatataaaagactagtcagtattactaattgagacattcttctgttgctccttgcttataataagtagaactgaaagaacttaagactacagttaattctaagcctttttgaagattatatagtcttctagtagaagtctgtgcatcagaatgttttaagaaagggttttaagaatgtataaaaaccaaaataattgattttcatacttctatattgttttttatcagtgactcttttttctttcaaatgaaatcttatatgaaattttcatatataatatagaaaaaagtggatctagtctgtcaaagagaatagtgaagctcagagatgtgccagcctggcctttttctcagctcaagtggcagaatacagtttgtaaacaattgcactagctcttaaattcgaagaggcagtcaaactaata

SEQ ID NO: 76682 - DNA, 1090 bp, Homo sapiens
actcctatgtcagttatgaagattaaattaaatgatccatttaatacaataatacacttagaacaatgtctatcagtaaatttttttctgttttaagaaacaggatctcactctgtctcccaggctggagtgaagtggcacgattatagctcactgtagcttcaaaagcctgggctcaagcagtcctcctgtctcagcctcccgagtagataagactacaggcacaggttggtgttgacctcctagcttcaagcagcctcccaaagtgctgagattacaggtgtgagccactatacccagcccagtgttatatttttgtataatcctatgaagtatcaaggcagttattatccctgttttactgctaagaaacttgaagtttacagaggtaaattatttgcctaagcctaaactctgatctcgaatctgaatcccaagtccaatattcttttcaccgtattacaatatttttaccatcaaccctccattctgtctgcacatcatacaaatgagtatctctacagagctttgagttgcttttaaacaaaagagatttttgtacccaatgtttagagtagtgattctcggctccatttttacaagatttcaagatttaatttgtcaaaaaagttctgaaattttcaaagcaaaagcaattttaatttaattgctctaaaaaataagcagatttatcatttagcaattctttaagggagagtgtatcataaaactgaaatagtactgaatgtggcagaatcaaacaagttgaaaatctcatcacttcagagcagggcagacttctcattcaaacaaattgaggtagaagtggtgagagtagagatttctttgtgtatgtgtgttttattactgtactatattatattatagttctatatatactatattatattgtacatatatattattatatgaagagacatgaccactttgaggcatgaaatttttttttttttttttttttttttgaggcacggtcttactttgtcacctaggcagtggcgccatcttggctcactgcagcctccacctccagggctcaagcaatcctcccacctcagcttcctgagta

SEQ ID NO: 76683 - DNA, 1046 bp, Homo sapiens
tcactagtttataggcttggtcttcagcccactgctcttcgtggtcatgacagctgtagttctaggcatcatgtctagataaggcaacattcaggggtagaaggggactgtttattttttcctttagtctctcttaaagagtgagaaaaattttcccaggaatcccggtggactttgcttcaccactcataggttcataccaagttacaaccccacaaccttagagcttttgttaggaagaggcttggtgggattaccgtgcttggcttggcttggtcaggattcaccaccagagtcatgtgggagggggtgggaacccaaacaattcaggattctgccctcaggaaataaaggagaaaatagctgttggataaactaccagcaggcactgctacagcccatgctttgtggtttaagggccagctagttacaatgacagctagttactgtttccatgtaattttcttaaaggtattaaatttttctaaatattagagctgtaacttccactttctcttgaaggcacagaaagggagtcacaagacactgttgcagagaatgatgatggcgggttcagtgaggaatgggaagcccagagggacagtcatctagggcctcatcgctctacacctgagtcacgagctgctgtccaggaactttccagcagtatcctcgctggtgaagacccagaggaaagtatgtgcatttctctatgttgcaaagtcatggattcctttaggtagctacattatcaacctttttgagaataaaatgaattgagagtgttacagtctaattctatatcacatgtaacttttatttggatatatcagtaatagtgctttttttttttttttttttttttttttttttttttttttttgagacagagtctcgctctgtcgccaggttggagtgcaatggtgcgatcttggctcactgcaagctccacctcccgggttcaagtgattctcctgcctcagcctcccaagtagctgggactacaggcgtgcgccaccacgcctggataatttttgtatttttag

SEQ ID NO: 76684 - DNA, 1581 bp, Homo sapiens
gagacaggaaagtcgcttgaacctgggcggcagagtctgcagtgagccgagatcatgctgctgtactccagcctgggccacagagcaaaactccatctcaaaaaaaaaaaaaatattaattaatatgataaaatgatgcctatctcagaattcttgtaaggatttcttagtacaagtgctgggtataaactatatattcaatagatgacgattattacttattattgttattgataaataacagcagcatctacagttaagactccagagtcagtcacatagaatctggaactcctattgtagaaaaccaaaaaagaaagaaaacacagctgaagcctaattttgtatatcatttactgacttctctcattcattgtggggttgagtagggcagtgatatttttgaattgtgaaatcatagcaaagagtgaccaactttttaatatttgtaacctttcctttttagggggagtaaaacttggattgggagatttcattttctacagtgttctggttggtaaagcctcagcaacagccagtggagactggaacacaaccatagcctgtttcgtagccatattaattgtaagtatacactaataagaatgtgtcagagctcttaatgtcaaaactttgattacacagtccctttaaggcagttctgttttaaccccaggtgggttaaatattccagctatctgaggagctttttgataattggacctcaccttagtagttctctaccctggccacacattagaatcacttgggagcttttaaaactgtaagctctgccctgagatattcttactcaatttaattgtgtagtttttaaaattccccaggaaattctggtatttctgtttaggaaccgctgcctcaagcctagcagcacagatatgtaggaaattagctctgtaaggttggtcttacagggataaacagatccttccttagtccctggacttaatcactgagagtttggtggtggttttgcatttaatgacacaacctgtagcatgcagtgttacttaagacagcaagcatctagtgagaggagctggtgccatgcatgaccccacatagatcttgctgatagtgctacagcatgaaccctgaagctttcaaaactatgattttttttttttttttttttgagacggagtctctgtcacccaggctggagtggtgcaatctcggctcattgcaacctctgcctcccagatttaagtgattctctgcctcagcctcccgagtagctgggattacaggtgcctgccaccacgcccggctaatttttgtatttttagtagaaacagggtttcaccatgttggccaggctcctcttgaactcctgacctcaagtgatgtgcctgcctcggcctcccaaagtgctgggattacaggcgtgagccaccgcacctggcttttttttttttttttttttttggagacagagtcttgctctgtcgcccaaactagagtgcagtgacattagctcactgcaacttctgcctcctaggttcaagcgatcctcctgtctcagcctcccaagtagctggaattacatgtgtgcaccac

SEQ ID NO: 76685 - DNA, 1926 bp, Homo sapiens
agaatgctcccgcacagcatagagaatgcccccgcacagcatagagaagcccccgcacagcatagagaatgcccccgcacagcatagagaagcccccgcacagcatagagaatgctcttcacctctgggtttttaaccagccaaactaaaatcacagaggccaacacatcatttaagatagaaatttctgtatcttttaatttttttcaaagtagttttacttattttcagattctatttctttactagaattaagggataaaataacaatgtgtgcataatgaaccctatgaaacaaacaaaagctaggtttttttcatagctcttcttccagattgaatgaacgtctgttctaaaatttaaccccaaaaggaaaatattcagttaactatgttaaaaaccaagacttgtgattgagttttgcctgaaaatgctttcataattatgtgtgaatgtgtgtctttcccatcttctccacagggtttgtgccttacattattactccttgccattttcaagaaagcattgccagctcttccaatctccatcacctttgggcttgttttctactttgccacagattatcttgtacagccttttatggaccaattagcattccatcaattttatatctagcatatttgcggttagaatcccatggatgtttcttctttgactataacaaaatctggggaggacaaaggtgattttcctgtgtccacatctaacaaagtcaagattcccggctggacttttgcagcttccttccaagtcttcctgaccaccttgcactattggactttggaaggaggtgcctatagaaaacgattttgaacatacttcatcgcagtggactgtgtccctcggtgcagaaactaccagatttgagggacgaggtcaaggagatatgataggcccggaagttgctgtgccccatcagcagcttgacgcgtggtcacaggacgatttcactgacactgcgaactctcaggactaccgttaccaagaggttaggtgaagtggtttaaaccaaacggaactcttcatcttaaactacacgttgaaaatcaacccaataattctgtattaactgaattctgaacttttcaggaggtactgtgaggaagagcaggcaccagcagcagaatggggaatggagaggtgggcaggggttccagcttccctttgattttttgctgcagactcatcctttttaaatgagacttgttttcccctctctttgagtcaagtcaaatatgtagattgcctttggcaattcttcttctcaagcactgacactcattaccgtctgtgattgccatttcttcccaaggccagtctgaacctgaggttgctttatcctaaaagttttaacctcaggttccaaattcagtaaattttggaaacagtacagctatttctcatcaattctctatcatgttgaagtcaaatttggattttccaccaaattctgaatttgtagacatacttgtacgctcacttgccccagatgcctcctctgtcctcattcttctctcccacacaagcagtctttttctacagccagtaaggcagctctgtcgtggtagcagatggtcccattattctagggtcttactctttgtatgatgaaaagaatgtgttatgaatcggtgctgtcagccctgctgtcagaccttcttccacagcaaatgagatgtatgcccaaagacggtagaattaaagaagagtaaaatggctgttgaagcactttctgtcctggtattttgtttttgcttttgccacacagtagctcagaatttgaacaaatagccaaaagctggtggttgatgaattatgaactagttgtatcaacacaaagcaagagttggggaaagccatatttaacttggtgagctgtgggagaacctggtggcagaaggagaa

SEQ ID NO: 76686 - DNA, 2448 bp, Homo sapiens
tagacttgaactcctgggctcaagtaatccacctcagcctgagtagctgagactacagcccatcttatttctttaaatcattcatctcaggcagagaacttttccctcaaacattctttttagaattagttcagtcattcctaaaacatccaaatgctagtcttccaccatgaaaaatagattgtcactggaaagaacagtagcaatttccataaggatgtgccttcactcacacgggacaggcggtggttatagagtcgggcaaaaccagcagtagagtatgaccagccaagccaatctgcttaataaaaagatggaagacagtaaggaaggaaagtagccactaagagtctgagtctgactgggctacagaataaagggtatttatggacagaatgtcattacatgcctatgggaataccaatcatatttggaagatttgcagattttttttcagagaggaaagactcaccttcctgtttttggttctcagtaggttcgtgtgtgttcctagaatcacagctctgactccaaatgactcaatttctcaattagaaaaagtagaagctttctaagcaacttggaagaaaacagtcataagtaagcaatttgttgattttactacagaagcaacaactgaagaggcagtgtttttactttcagactccgggattcccattctgtagtctctctgcttttaaaaaccctccttttgcaatagatgcccaaacagatgatgtttattacttgttatttacgtggcctcagacagtgtatgtattctcgatataacttgtagagtgtgaaatataagtttaactaccaaataaggtctcccagggttagatgactgcgggaagcctttgatcccaacccccaaggctttgtatatttgatcatttgtgatctaaccctggaagaaaaagagctcagaaaccactatgaaaaaatttgttcagtgttttctgtgttcccgtaggttctggagtctgaggatgcaaagatgaataagataaattctcagaatgtagttataatctcttgttttctggtatatgccatctttctttaacttctctaaaatattgggtatttgtcaaataaccacttttaacagttaccattactgagggcttatacattggtgttataaaagtgacttgattcagaaatcaatccattcagtaaagtactccttctctaaatttgctgttatgtctataaggaacagtttgacctgcccttctcctcacctcctcacctgccttccaacattgaatttggaaggagacgtgaaaattggacatttggttttgcccttgggctggaaactatcatataatcataagtttgagcctagaagtgatccttgtgatcttctcacctctttaaattcccacaacacaagagattaaaaacagaggtttcagctcttcatagtgcgttgtgaaatggctggccagagtgtaccaacaaagctgtcatcgggctcacagctcagagacatctgcatgtgatcatctgcatagtcctctcctctaacgggaaacacctcagatttgcatataaaaaagcaccctggtgctgaaatgaacccctttcttgaacatcaaagctgtctcccacagccttgggcagcagggtgcctcttagtggatgtgctgggtccaccctgagccctgacatgtggtggcagcattgccagttggtctgtgtgtctgtgtagcagggacgatttcccagaaagcaattttccttttgaaatacgtaattgttgagactaggcagtttcaaagtcagctgcatatagtagcaagtacaggactgtcttgtttttggtgtccttggaggtgctggggtgagggtttcagtgggatcatttactctcacatgttgtctgccttctgcttctgtggacactgctttgtacttaattcagacagactgtgaatacaccttttttataaatacctttcaaattcttggtaagatataattttgatagctgattgcagattttctgtatttgtcagattaataaagactgcatgaatccagctgtgctagtgttttttacatgaaagtatcataatgtataactgtaactcacagaactgtctagcacttatcaagaaacagtttagaatacaaaaattagccaggcgtggtggtgggcgcctgtagtcccagctactcggaaggctgaggcatgagaatcgcttgaacccaggaggcagaggttgcagtgagccgagatctcaccactgcactccagcctgggcgacagagcaagactctgtctcaaaaaaaaaaaagtttagaaacaaatgcattgtttctattcttaactcataagaaagtggtatggattatagcacaccacagctctgaagagtgtaatattaaatctgtttataaaagccccaaagcagctatccttaatacatc

SEQ ID NO: 76687 - DNA, 1053 bp, Homo sapiens
aatctactggggaatgtccttcccatccccggatatagacctttcctacctggtgagaccaccttcacctcggtgctgcggctgactgcctggctcccctggtaggcactgcacgtgtaggagccctcatccctggcccgcaagttgtaaatgagcagcgtgccatctggggactggtggacacggtggccatcagcctgcacaggtagcccgttcctggaggagagaggacactgggagagccatcaagggcctctggaggtctgggagacagagggaagaggtaatcaaaggccattccagagccaaccgttcccaccccttgagagcaaacaggtggaggacagggagaaatcaagaatgaccaaggtttctaggttgggttactgggtgatgatggtgcccctccaaccttgggagatccaaggctggggtgaatggcgaggttgttttctgctatttcaaatttggggtgcctgtgagatagcaggaggcctcagatttgaagtctggagctcaagagtccagacccagatagtgtgtcagcatcgcactgacgcagcgaagtgcatgtctatgaggtggtccaagtcacacggggagaaaccaaggacaggccctgaggcacagcagaagacagtagttcctggagcagagggaagggagaatttcaagaaggagcatacggcaagcagaacgacactacaggtcacgtaaagactgcaaggtgtccagtggagttagggagagaggcagtgaccttggccaggacagtgtcctggaacaggggctgacatgcggccccactgcaggccctgagaagtgagtagggagatgaacaggcagaggcaaccaacatggacagctgtaaaggggacactatgtcagcatagggtctgcagggacatagaggctcaatggaaggtggttgtgaagaggggagttctatgcatgtttgctgctggaaagatccaggagaggccaacatggagaagcaggcctgacaggctgatcaggggatggctggactgagcacaccagtggggacacctc

SEQ ID NO: 76688 - DNA, 1859 bp, Homo sapiens
taccaccagtcccttctttaagcctcctgctcagcacctcaacggttctgcagctttcaatggtgtagatgatggcaggttggcctcagcagacaggcatacagaggttcctacaggcacctgcccagtggatccttttgaagcccagtgggctgcattagaaaataagtccaagcagcgtactaatccctcccctaccaaccctttctccagtgacttacagaagacgtttgaaattgaactttaagcaatcattatggctatgtatcttgtccataccagacagggagcagggggtagcggtcaaaggagcaaaacagactttgtctcctgattagtactcttttcactaatcccaaaggtcccaaggaacaagtccaggcccagagtactgtgaggggtgattttgaaagacatgggaaaaagcattcctagagaaaagctgccttgcaattaggctaaagaagtcaaggaaatgttgctttctgtactccctcttcccttacccccttacaaatctctggcaacagagaggcaaagtatctgaacaagaatctatattccaagcacatttactgaaatgtaaaacacaacaggaagcaaagcaatctccctttgtttttcaggccattcacctgcctcctgtcagtagtggcctgtattagagatcaagaagagtggtttgtgctcaggctggggaacagagaggcacgctatgctgccagaattcccaggagggcatatcagcaactgcccagcagagctatattttgggggagaagttgagcttccattttgagtaacagaataaatattatatatatcaaaagccaaaatctttatttttatgcatttagaatattttaaatagttctcagatattaagaagttgtatgagttgtaagtaatcttgccaaaggtaaaggggctagttgtaagaaattgtacataagattgatttatcattgatgcctactgaaataaaaagaggaaaggctggaagctgcagacaggatccctagcttgttttctgtcagtcattcattgtaagtagcacattgcaacaacaatcatgcttatgaccaatacagtcactaggttgtagttttttttaaataaaggaaaagcagtattgtcctggttttaaacctatgatggaattctaatgtcattattttaatggaatcaatcgaaatatgctctatagagaatatatcttttatatattgctgcagtttccttatgttaatcctttaacactaaggtaacatgacataatcataccatagaagggaacacaggttaccatattggtttgtaatatgggtcttggtgggttttgttttatcctttaaattttgttcccatgagttttgtggggatggggattctggttttattagctttgtgtgtgtcctcttcccccaaacccccttttggtgagaacatccccttgacagttgcagcctcttgacctcggataacaataagagagctcatctcatttttacttttgaacgttggccttacaatcaaatgtaagttatatatatttgtactgatgaaaatttataatctgctttaacaaaaataaatgttcatggtagaagcttttgcccatgaagggctgttctttcccctttcctttattagtaaatgaatttatttttcgttcttttggtcttactctccattctactgctgctgtaaatccctagtttagtgactagaaaaatacccttaagattcatattttcattcatactttaatcctgagtgtatctctaaagtcagattcttgctgctcaaagtgtggtctgtaacagcagcatggacttcacctaggagctggttagaaa

SEQ ID NO: 76689 - DNA, 1064 bp, Homo sapiens
ctctgattgcttctttgcctaatggtatgtacatccaatgcaagatatcatggttttcccaaacatcaactcttctctcttatccattccaccagtattgtacattcacctgactgacacagctccaaggggtcacttgtacaccctgcatgaattaactccattgatgttgtctgctcccgttgtagctaatggcactgactcagccttccatgtgcttgctaagccagcccatactgctctagcacccgtagcaatgcctgtgcgtgaaaccaacccttgggcccatgcccctgatgctgctaacaaggaaattgcagccacatgttcgggtaaggtggccacagatggtgttgaggattctgggatcagataagtgaccctggttctaaaactcagccagttagctgagtgggaactagggaggaatcctttcaggaaaactatgttccctcctagaaataagttgcttacataagaaaggatggtgaaggagaacaaaagagatcagactgatagtcattaggactgtggaacaggactgtggaacagagccccacccatagagcttttataaaatacagattccggctgggtgtgttggcacatgcctgtaatcccagcactttgggaggctgaggtgggtggatcacgaggtcaggagatggagaccatcctggccaacatggtgaaaccatctctactaaaaatacaaaaattagccaggcgcggtggcatgcgcatatagtcccagctactcaggaggccgaggcaggagaatcgcttgaacctgggagacagagtttgccgtgagccaagattgcgccactgcactccagcctgggcaacagagcaatactctgtctcaaaaaaaaaaaaaaaaaaaaaaaagattccagggccccacctcagagaatccatcaccggatttggtgatgtgcagacattcctgtagaaagagggggccctgctcctacaataggaggcctacaaaaagtgctagaaaaagcacttcatttttgcttttttgtactttctagttttgtataaaaaacatctattaa

SEQ ID NO: 76690 - DNA, 1049 bp, Homo sapiens
catcacttcccatgaagacactaatcccattaaactaggcattcctctttccctgaggttcgttgatagttgtatcttttgtcatttcccatagtgggaaaactaaggtccgtggagggggatgtgaatccataatttctcttcaacaaacaggcagcagagccattgtggaatttctagcctaagccataagatttgtggtttgtcctgatgtaagtgcattcactgcctttcagccaacctgctcccaaacatcaagggtctcaagtttctattcttattctgccattgggacccagcagggaattaattaaagaggccttagaaacacatagcattaccagcagaagaaatggatatgtgctcattgtccttctggctggttggctccataaggaggaaactctagacaggtctttcgtgtacatctaagatctgttgttcatcacagacagtggacttgttcacaagtattcattacctttcagaaccgtctcacaggcctttgtgtggcctctgtacagctatgccagcctctataggtctatcctcgtcataaaatctgtagctaaagtattagatctggtcagtgcttttgttgggctctattttacttccctctgagacatgtcaagccattgctataacaaaatatgaggaaactgtctcaataggccattcctactgatggtataaaagtacagagagttaagttcatctgacagatgaaactaggcctaaagaatagttggactagatgattacggagggtcttttcagttctcagctgaggtacctcatttcagttcagtctccttctagggcagacagggaataaaaactattattctctttacagatgagcaaacagagctttagcacacataattagcttcctcagtgatacagaagtatcctagagtcagtattaagaataaaggccctagcgtcctacacctctgctcactttttcatgttatcatagatcatatgcttagtactggagactttggagaaaaatgagattgatgacattgtcatagtttgtt

SEQ ID NO: 76691 - DNA, 2420 bp, Homo sapiens
ccgggcatggtggcaggtgcctgtaatcccagctagtcgggaggctgaggcaggagaatcacttaaacccgggatggggaggttgcagtgagccaatatcgcatcactgctctccagcctgggcgacagagtgagactctgtctcaagaaaaaaaaaaaattattaggaaaaatgtctgtgttaactctgagagaacaaataatggctttttaaagactgttaatagaataatgaagacttactgtgtttttaacgtgaaaattttaggtgaccaagggtcctgctataacatactgggggtcataggatagtagaatggtcaacatctcaatttagacatgttacttcctgctctaaatacacttgtggacgctacttgtggtgtaactccttatgtatttaataattatctgactctggttttcttggttgatttttttaaatgggtgaagaatctagttatgaattctttgccctttatggaatgtgatatcttggtttttattccatctgttacttcccttttacttaattttatcttattgttttgcgttgtgtttctaaaataatggctttggcttgttttttcctgaatgtttctgcagtttggtttgagtatctgggtttgggcaccactcctgaacttggactccatctgtacttgtgacttttggaaggcagagtcagtgttttctgtggaagatgacatttttttaatattatatatgtgtatctccccctcccctttttggtttctcttaaaagactggaaagaaagcagttaaagcagttctgtgggtctcagcagatggactcagagttgtggatgaaaaaactaaggtaagattctttatttttattttgatttattttattttttttggagatggagtttcactcttgtcacccaggctggagtgcaatggcacgatctcggcccaccgcaacctccacctcccaggttcaagcgattctcctgcctcagcctccctagtagctgggattacaggcatgtgccaccatgcccagctaattttgtatttttagtagaaatggggtttctccatgttggtcaggctggtctcgaactcctgacctcaggtgatccgcccacctcggcctcccaaagtgctgggattacaggtgtgagccactgcgcccggcctcgcctggctaatttttgtattattagtagatacggggtttcaccatgttggccaggctgatctcgaactcctgacctcaggtgatccaccggcagcctcctaaagtgctgggattacaggagtgagccaccacgcctggcctaaggtaagattcttataagcttaaatgggactgctcatatgttttttaaaatctctaatgatcaaatataatacccttaagctgttgaagggtattatattgttgaagctttatccttccacttagtccaaagtacaatctcctgagagactatttaacgttcaggaaaccactttagttactcatttactttatgagaaatagtattctctcaacatattgttctacatgacatagcatgtctaaggtactaagcattagcatttagtgttaagatctgagttcttttttttttttttttgagatggagtttcactcttgttgcccaggctggagtgcagtggcacgatcccagctcactgcaacctccacctcctgggttcaaacgattctcctgccttaacctcccaagtagctgattacaaacacagaccaccatgccccgctaatttttgtatttttggtacagatgaggtttcaccatgttggtcaggctggtcttgaacttccgacctcaagtgatccacccgccttggcctcccaaagtgctgggattacaggcatgagccaccgctcgtggcctatttttgttcttatatattttttaataagtttccactctcacaaatttgatacaatagatgatagactatccttttaccatgttttaaaattaaaaaaagatggactccacatctgaaatttcttcttgctctgaagaaaacactattttaagaaaatgatatttgaactaattaacctggcttttgactcaaaactcaatttaagtgacatcttaaggactagtgaatggctctttggttaacatttacttagaatccaaataatatctcaaatcataggtaccattttgcatttgagagacagtgatcctaaatgcctaaataagaatagacacacagctctacccctagaaagcatagggtgttatataagtacatttaattgttaattaaaatttcctagaatacctaaagtcaggaagaaatttaacaagaagataattaaaaaaaaaaaattcaaatgccactgaaaggggagaaagtctggcaggtaaaaagcagttttgataggcaacttgcctggtaaa

SEQ ID NO: 76692 - DNA, 1017 bp, Homo sapiens
cacagtcatgcccatttgtgtacatattgttatggctgcttttgtgcaatgatagagttgagtagttgcaatagagatcatatgtcctgaaaagcctaaaatattttgttgtctggtccttcacaaaaaacggttgctaatccctaatttcaacaatttaaaaactcatttcggccaggcgcggtagctcacacctgtaatcccagcattttgggaggctgaggtgggcggatcacctgaggtcagcagttcaagaccagcctggccaacatggtgaaaccccttctctattaaaaatacaaaaattagccatagctgggcgtggtggcaggcacctgtaatcccagccatttgagaggctgaggcaggagaatcgcttgaacgcaggaggtggaggttgcaatgagccgagatcgcaccaccgcactccaagcatgggcgacagagcaagactctgcctcaaaaaaaacaaaacaaaactcattcctccaactccaactcatttctcctaaggataacattaattatactgatgaaataaaagagcagtgtaagaatctttccacctaccatgtatatcaccaacttgtcattttcatcctttttcaatttatttttaaaaagtggtttcagctgggcatagtggctcacatctgtaatcctaatactttgggaggctgaggtgggaggatcacttgaagccagaacttgagaccagcctgggcaacatagcaagaccatctctataaaaataaaaaagtagccaggtgtggtggtacttacttgtggtctcccagctactcaggaggctgaggtgggtagatgacttgagcccaggagtttgaggctgcagtgagctgtgatcacaccactgtgctccagcctgggtgtcagaataagaccctgtctctaatgaaaaaagaaagaaagaaagaaagaaacagtggtttctacttaaagaaacaaagcctggagataggtagatagcaattggttatttcagttgccttttactgt

SEQ ID NO: 76693 - DNA, 1008 bp, Homo sapiens
tcgaattcctgacctcaagtgatcagcctgccttggcctcccaaggtgctgggattacaggcatgagccacagcacccagaattcttttcttatgttattggggaaaatttttttttatgtcatggtgattttatactaatatataattttttacagtgagtcatttaaagagtttggaaaacagagaggggcaagtattacccatgatcttacccagaatgtgcttttaaatgataattttttctttaatttggaatcttttgaatctttcaagttgccatcacttaattcatctccaccctaatctacgagaaatagactggtgagagagacttgatttattgagtttgctaggtcaattgtggtttgatgaaacctcaaaatgaagcatcttacagaacagtatatgttacggagtttttatccagtacagttcctcataaattttgatactttgttattctttgaatcatgtatgatttgatgatccaggataaatagaacaacagtaatcaagaagtgtttttattaaacacttttacgtgaaagtaagtagatagaagaattgtttgccccgattctgaatttatgactcatagccaggaaaaccttcttttccggaagttgcctcttggacctgaccaccatcacttccctattgttgcatcaccagctgacaggagcagtgtctccagaaactttagcagtagggaacagataaacctgggtctgttacaggcctgtaatccattgtaagcttacaaacattgtaaaagaggggcaaaaaaacgaagacctgaaataactttttccaaactaattaaattgctcattgccgtggccgggcacggtggctcatgcctgtaatcccagcactttgggaggctgaggcaggtggatcacgaggtcaggagttcaagacgagtctggccaggatggtgaaaccccgtctctactaaaaatacaaaaattagccaggcgtgatggcaggcgcctgtaatcccagc

SEQ ID NO: 76694 - DNA, 3246 bp, Homo sapiens
atccacccacctcagtctcccaaagtgctgggattacaggcatgagctgctgcacctggcctcccctttcttttaaatactctttctagagctatactgagaatcttgcagaaaatcggaagtctttaggatactgttcttctcatatcatagtgtgccacatgtattcctgatttttgtcttcttttcatatttttactatgcagaaatttctcgttgccttttgatttctctgagcaaacattcatctaaaaatcatccactggggatctacaacctactttgccagatacttatattgtgccaaatgctatgtttctggagactttttgtttgttttttttatagattataaagcttccttttagagtttcaaataagtgggagcaaatataaggatgcataagcctgcagaggattaaagaagaaataggatatctttgaaattagtttgaatgccagagtttaaaattttaaagaatagctcagatgtaccagttaagtaacaaaacaagcattttaaacctaccatgtgaatgatctttggaaggcagctatgctcatcactgtaccaccaacacatctagtgaataatctttgaactaaaaatgtaatatttctggtgctttttatttattcattttttttggagtggagtttcgctctgtcacccaggctggagtgcagtggcacgatcttgggtcgctgcaacctccgcctcccgggttcacgcgattctcctgcctcagcctccagagtagctgggattacaggcgcccaccaccacactcagctaattgtatgagacggggtttcaccatgttggccaggctgatctccaactcctgaccttaggtgatccaccagcctgggcctcccaaagtgctgggattacaggcatgagccactgcgcccagccttctagcgctttttaaatttgtgaacaattgaggaaagagataatttgcaagtgtttttcaccaaaatactctcttacaatttagaattacattaacttcaattggaagtcatctgcatacttgatatgctcaaatgaaaaaaatattataactaaacaagatagtgttttaaaaatatgctcctcagagcataaatatgttaattttttaactttctgggcataaagttattgacagctattttcaactcatttactttgtcatataacctcactgattagctactttgggacttagcttctataggataaatgacagaaatcactattgcccattgttactgcctttatggcatatcagctacagggtgaggaatattgtcatatatcagccaattccataaaaaagtgtataaggcctttggttatcttgcttaactctagtccaagatgcccttcgtttaaggtcatttcttcccattgtttcttaaatgtctctccctctgtcttagttttagactagtttcattatactaccagtttctaatatgttggttttttattcactatttgatatatttgttttaatatatgttcttgttttagcaggtaaaagaatcataacaaatgtttttaaaagaacattattattctttaataactgtctttttatgcattttgcatgccaacttttttcattaacatcttgggtattttataaaaagagggaaagctcaatgtttaacagtagcttttctaggagctaaattaaatattaacaatctccttccttcaccttcccatccctcaagaatggtgaatatcttaactttggccgcatccttgaaagcttatggttattcatagtctaacaaaactagggtcaccaaacttggcagcagaaataatctagtcttactgtgataactacccaattactttattatttttccagttgcagttcaaaatgttttgtggaaatattttttgctgtttgtgattttcaaagcttagaggggaaaacaaactttccagtgttggagagcactgaatagtttatgaattgtgtaaaagagtcagatttcaatgcaattatcttttcctagacatttatccaacattaaaaacctatgattataaaaagtaaaggcttaaagtatatttcaaccacagctaggaaatgtaaagttaaatctagcttgtgtgagttcaaacccatctaatttgtgtaaattctacagattttaattggtggccagttttcataaatggtgcttaaaaattggtgctgatagcatagatagttatgcctctgttatccagatagtttcagaattgtttccttataaatgtcaatgcaagtttctttattttaaaataacagcttttaggttgggcgcagtggcccatgtctgtaattccagcactttaggaggcttaggcaggtggatcacttgaggtcaggagttcgagaccagcctggccaacacggtgaaaccctgtctctactaaaaatacaaaaattagctggatgtggtggcgcacacctgtagtcctagctactcgggaggccgaggcatgagcattgcttgaacccaggaggcagaggttgcagtgacctgagatcgtgccactgcactccatcctgagtgacagagtgagactctgactcaacaaacaaacaaacaaacaaaaaccaaataataataagcaatagcttttataaagaaaacaaaaccctgtttcttaaatttcagttgtggcccacagacatcatttggttcttaggatacttgttttctcagctcttgtataaacattagccttgtaaccttaatagataatttattctgtgtctggaataaaacatacatgttatttccttatgtgtgttgtgaaattgatcagcacacctgtacatatagattgatactaatgtaagtaaatggaaagccaatggtcaagctccccttaagtggtatggagtttctaagtgacatcttgaactcactaagaaaaaagtatgacaaggacctttgatgcatactcatttaattttacgtattacatttttaatgtgattatgtggtcatttgaatgtggacttttttaaaattggtgactttcacatagttgaccgccaattttaaacttaaaaaatgtatatggaaccagtcttctattttctattcactattataaaatttaaaatgcaaatctcaccaaaccagtatgccctattgttttctctgctgccaaatttggaagatctctgttttaaatgtaaatagcgattactaaactaactggttgctctgcatggatac

SEQ ID NO: 76695 - DNA, 1003 bp, Homo sapiens
tttttaaaagatatgtatatatactttgtcttaggattacttttatgtgtagagacatagtaactgtgtctagcgcaggctattatgcttcagatccagtagattcaggtaatgtttagtgcctactgtgtacttcttcacttactcacctgtaacacctttttgaaataattattctaaatcttattcctatgaggacactgagaatatgtaaagttacattatctgaactctttttcactggctgtgtatttcttgagtgtaggaatttcaatacaggttgtgtgtctcttatccaacatgcttgacacccagaagtgtttcagatttcaaattttttcagatttggaatgttcaacctgtattcaattttcacctaatgcttactgtatagtagctacttggtaaacatagcaatagccctaacttttccttctttctacagtaccttggccatgtagaagttgatgaatcaagaggaatgcacatctgtgaagatgctgtaaaaagattgaaagctgtatgtatttgatggttgccagtgttgatctatatgctatcaatattttcttaaaagattttgctcagtacattttagtgacccagtaaaaactgtgtttctgttaaaaagatgtgggcttgctaataaggagcatctcagccaagcgcggtggctcactcctgtaatcctagcactttgggaggctgaggcaggaggattacatgaggccaggagtttgagaccagcctgggcaacatttcaagaccctgtctctattaatttcaaaaattttttcttaaataataaaataataattaaaaaatttaaaagcatctcatgttgcccatccagaggtataaattattagatgagccgtttaaatttaggccagatattatcctaaaggtacttttgatttataacccatatgaaacaaatgttgtgaaatctgatagaagaatagtattctaagactaggattaaactgttacagttaacatc

SEQ ID NO: 76696 - DNA, 1087 bp, Homo sapiens
attcattaagggttgcaaaataactgtactccaattctgtcatcttctctttgttttaaagaagaataatgataagttaatatatgtaataacagtaaactgtaaaccatgacttaaataggagagttgcaggtaagctttaacagagaggttgtatgaggtagttgaaagaagatagatctagaaatcaaaagagcagagttctgttcctggctctgttaatttactaagttatatgaccttgtataactcactttttggacaccttatgtcacgtttgaaaagtaaagttttgggatctcacatttttttcagttctaaacttacatgattaaacacatctgcttaggtcatacagtctattcagatggaattgtagtccaaatttatagttaaagaatagcccattttaatttaactattcctctttggttaaagactcaaaacaagttttgctactgtattgtgcgcatctgcatactatgtttgctatatagcataggctatgtatgtatgtgttaagatgctgtaaagctccttataacttgatgaatattatgtcacttttgttaatgttgggaactgctgactatagagtctctcacatcagaggtctgcatttcttgtgatggataaatcacgaaagcagggggagggaatctattttttaaataattttttcaagaaagggaaaaatgacttaattcatctaagaatgaaattccacatactagtttttctaaagtacatttttgtgaataaaagtttcttactcagaaggagtttggaaaaggcatacaaacaaaagaagtcccagtgtcaaatattttagccattaagcataaatcagctgcaattcttcagcgagatagtgtctcagagaagaaaagggatctctttaataatgtttatttcagtgggcatgtttttctcatagtctaataagacacaaagcttatttctatttccacgtttctataatagttcataaatgaaataattttgttcccttctaccaagtcttcctttttttttttttttttttttgtctttttggctggcataaatagctatatgtgaccaattg

SEQ ID NO: 76697 - DNA, 1056 bp, Homo sapiens
gtttaattgactcacagttccacatggctggggaggcctcaggaaacttataatcatgatggaaggcaaagggaaagcaaggaccatcttcacatggcatcaggagagagcagctcagtgtgagcacaggaaaaagactgccacttttaaaaccatcagctctcatgagactcactatcacgagaacagcatgggggaaactgcccccataatccagtcacctcccatcaggttcctcccgtgacacatggcgattacaattcaagatgagatttcagtggggacacagagccaaaccatatcagtcatttgcattctgtcctatagccattaattaaatctcctattctgtgtcttgagtttattgtaaaagttttcattattatgacttttaatattgtttagtatagagctaagtaatgtgctacattttcttctctatgagaccgataattcattgatgtatttagcagatatttatggagtctgctgtgtaccaggcaatgttctaagtactgcaaatacagcaaacaacaaagcagagaacagacaaaatccttgcactacgcttacatcctagtgggtattagactatgaataagtaaatatgtaaagtatctggtatgttcaaagggaattagggttgtgagacaaggcatgtgagacaggcacactgggggaggggaaagcctgaggtaaacagccactgggccagatggcgcagtttgcctggggtggggttggtttttgggcatcagtggatgtccccactgctcgtttgtcaggtggggaagctgaggcccatgggacatgaggtcactgggctactgttggccatccaaagtaagtctctgtcttcgtaatctactattctcaaggttggaaagctcgtttacacataggaggcagcaaggaactgcagaaactggcagccagggcccagcatcctgccagtgagaggccaagtgtgtagtcagatggctaaacaatcacttctataacatttggcctcaaatggccagagcctaatcagtaactgctagcttccctaatctc

SEQ ID NO: 76698 - DNA, 1035 bp, Homo sapiens
aaagattcctaaattttagtgtttcagaatgatttttttcttaataactataaaagtttttagaaactgttagcagtctataatttggtctacatgtacaaatttccattttcaggggttggaatgaatttgagaggtagatgggtaggcagaatttctcattgctttgttataactaaagttcttgaaatttcttaggataatatgtctttaaatcctactagaagttattgttcttacaaggactagtattgtagttgtcttttcaaaaagtaaaatgatttgtttgtttgaacttagtgttactctaagaggaaatgttctattcattttccctttacactgtgcttacatgataattatatattgcttaaataaaacccaaaacctttaattttggacatcagatttttggttagtatggtaatccaaagtttaaatatgtaagaaggtaatatttcttttaaatattttttttcctctgtcttcaggctgtaaaaattaaaatgaacaaattacggcaaagttttaggagaaagaaggatgtttatgttccagaggccagtcgtccacatcagtggcagacagatgaagaaggcgttcgcaccggaaaatgtagcttcccggttaaggtaagagctgatgtttctataagtctgtatgtggaaaagaactgacaatctagtgtatgtgaaatctcattaataaggacaattaagagagtcttccaaaaaacaaatcccttcacattctgcttcaatgatagaattaaaagagaaagaaaggaaaataatgagaaagaaaacagatagattttaattagggagttttctttttatatttaaatatgaatttctctatataatgtggagtcagtacaaatattctgataagaatactaatcctgaaatacctaaagaccctaaattatcaggactcaaattttcagtggaatatgcttactaactggtgaagctgagggagtggaagtcagctctcttaaatacaagtcttgtttattttagaaatccttaa

SEQ ID NO: 76699 - DNA, 1060 bp, Homo sapiens
gcacacttacttttttttggtgaatatctttgacaaaggcaaatttgcagattgatagtaaatatcttagtaaaagattgtgtgttttattactacttatggatccagatttattctcatttgtaagagcagagatgggagatggatttataattaaaaataaaatgaaataattattccaaatagaagatttctcagaactttcatatagtgataattcatgttgattttttggagtaaatatttgctattggttaatattggtgggaactttgataagttgaatgattcaaaagaaagacttcaggctgtgttttgtagagagctatggttttttcattttttttttctattacaaaatttaaaaataaagatgaagtctcgctatgttgtctaggctggtctcgaactcctcacctcaagcagttctcccacctcatcctcccagagtgctgggattacaggtgtgagccactgcacccagcctagaggtactttctgaatttgattcactgattgaatcactgattcaagaatgttaaaatagtgtgatctggttaggaaactattctatatttgggccacttgtgagaactgatagcctagtaaagtatcggataataatgataatattagtactagcagcagccaatgctacattccaagaagcgttctaagtgctttacatgcactaactaatttaatcctcatgataactcctgtgagggcagctactattataatctttatgttactggtagggaatctgagatagagaaggtaagtgatttgcccaatatcatagagtaagtggtagaactgggattcaaacctagatagtttggctccagagctcatactcttaactttcagtgctaaatggattaaattaaatgtagtcagttttactttgttgttgagcatatcattgtgcagtagtagtggcccaagtttaaattgggatttctttttttttgagacagagtctccctatgtcacccaggctggagtgcagtggcacgatcttggctcactgtgacctccgcctcccaggttctaa

SEQ ID NO: 76700 - DNA, 1042 bp, Homo sapiens
aactgaaggttagaaatggcatattttccttttaattttcaaaataacaaaaatataattattttacaatttgtaaggtttgcttagcattttgaaagaaacttactgtttttagaatgtttaactctaaattgggtctttttccccctgtttttaatagtcattaattattcacttttagagatcttaagagcaaagggaaaagcatacatttttttacagagtgttcgagttttatgtgtctcatctctatttgtagagttgtgcttctttagaggctggtactttgccaagtaaaaactaatttcctaggaaatcaggttgctggcttgacttctggcagtctctttcccttcttttgttgctttgtaaaagagctgagctcagttctgtggaaaatcactaaatcatctaattattttccccagtttggattaaacatggttggtatatatttgcattgaactgagttctgtaactttttcttgattatagatttgttaagataccgtgaaggactttgacttcatttgataagttgcgtattcatatctgaaataatgctaatggttttttcctttaatgaatgttcttattcttttagtctttttgttctcccctccactagacctacttagtgagggatatcacttgtgttcttataatgaaacccagacacttgtgaaatataatcatagtttctatgatgttggcccctaattcattttaaaaaattacattaacatttattgtctgtttctgttttttcttcgtgcatattttactatatagataattttggaggctgctttttaaacaacatcatataatatgtgtttattatttttattacaattatttgaaaactttttttttttttttttttttgaggcagagtcttgctgtcttgcccaggctggagtgcagtgtcgcaatctcggctcactgtaatctctgcctcccggggtcaagcgattcccgtgccttggcctcccatgtagctgggattacagatgtgcgtcagcacacctggctaattttt

SEQ ID NO: 76701 - DNA, 1547 bp, Homo sapiens
ttttccctccctcattttatgttttcctgatagggctggggagaaataaaacaatatactccttaaattaaaaaaaaatttttttgctatcttatttttttaatcttgacattatagtgcatcctttagtggcaaagaaaatttgtttaaggggccgggtgcggcggctcatgcctttaatcccagcactttgggaggccgaggcagacggatcacgaggtcaggagatcgagaccatcctggctaacacagtgaaaccccatctctactaaaaacacaaaaaattagctgggcatggtggcacgcgactgtagtcccagctactcgggaggctgaggcaggagaatggcttgaacctaggaggcggaggttgcagtgagctgagatcgcgccactgcactccatcctgggcgacaaagcgagactttgttttgaaaaaaaaaaaaaaggaaaatttgttttagtaatgtaacatattataaattttattataagaggtagaaatacaatacagggctttaggatgtatgttcagctgcaacacacaggtagtgataaataagatatcattaaatactaggtacaatattgccatatattttggagattattaaacgtgcactttgaggctaggcgtggtggctcatgcctgtaatcccagcactttgggaggctgaggcgggtggatcacctgaggtcaggagtttgagaccagcctgaccaacatggagaaatcccgtctctactaaaaatacaaaattagccgggcgtggtggcacatacctgtaatcccagctactcaggaggctgaggcaggagaatcacttgaacccaggaggcggaggttacagtgagccaatagcacgccattgtactccagcctgggcaacaagagagaaactccgtctcaaacaaaacaaaacaaaacaaaaagaaaccataaaaaaaagtgcacttcgaaatcttgaggcaaaaggaggattgaaatgaagggagaataaggagaatactgacgtgcttaagggaggagtctggaggatctacaggaagtgtatctagaggaatgagtggttcttggcagttttcctggagtgacatatgtaaaggaggatgattctatttgcaacattctcctatggacttatttttcattctctgcagtttctgctgcttgttattactcttcctttgttttcttcccctcaagaaagcatgtcagaagacaagtaagtagactgagaagtggtagtcctagaggatgagagccttggaaggaccatgtggatttagaagaaggctcttcttatctctgcttctgcagctcttgggaggtccccagcaaccttaactagaccaacctttcccacttgtcctctccagtggagtatgggattaggaagagacccccagtcatcttaaatgcattaaccaaggagttgctatattagtaattaacgttcagtgacttccccctctctacccacgaaaaccctgtttctccccacttgtttgctgataagttacgttccttttttttgagacggtgt

SEQ ID NO: 76702 - DNA, 2252 bp, Homo sapiens
ggaaaagtattgttttgggaaacttttctcctacatgtatgtactaggtcacaatgtaaagtgtatttctttttttgagttcctggccaaaggataaaatatatttcttacagttaaaaaagtctgaaagctgggtgcggtggctcacgcctataatcccagcactttgggaggccaaggcgggcggatcacttgaggtcaggagttcaagatcagcctgaccaacatggtgagacccccatctttaaaaaaaatacaaaattagctgggcgtggtggcgcgtgcctgtaatcccagctacttggaaggctgaggctggagaattgcttgaaccccggaggtggaggttgcagtgagccgagatcatgccattgcattccagtctgggcaacaagagtgaaactccatcttaaaaaaaaaaaaaaaggtttttttgggagtattatattccattaaatttcttcagtttctgatttggttcctcctgtgtttgtcttgtcacatattgtgttatgcctctgactctggaacttttttggatattgagaatctttggcatgagaacttaagggaatctgaggcagagaaattgaatggtgtttctcagatgttgtccgcttttgtttcacttgtgccctcttgttcaccctttcttttttatcactgtaccgtaaagcattgtttgtaaaagcctgagtatacacagacatattgacagtaaacaacactgaaatggactgacttgagaaaatttcatgtatagaaaataagcaaaaacaaagtaagaaacactgcaaaagagaaaaatgaaaagatatttcctttttagagagtaaaaatattaagtatttcttatccttacactaatataaaacatatacagatatttttaaaggaactagatatacagtttctaggtctttgtagagaaaagaaatagtggtaatatgtgacagcaaaatgcacctgggatagaggcttaactacaaagtaaatcatttattaagagggagcttttgtttaatggttttctcccttgagaataaactggatgtggtacatgttgtaaacttaacttgtttgaggaacctaaatgtaatttacagcgtgtttttaaaaagaatatgtatgttttatctgtacgtggtttgatttttcttccattgaaagctagatggtttatatttaggagttgatttagatctgtttttatggctgttaagaacaggaagcagtattgaaaactgaaagagatccttgcagctttctttaaaatctttaatccaggggattatgtaacctcttcattaatgttttatgaaattgtgaagaaactgttggtatagctttgcatcaggatttttggtttatttttttctctctcaaaaataatttttagttttatttcagattatatttccttaaaatttttattttcatttggaagactgcaaggcatataaccattgcatatctgagttctaaagcagatgcagacttttcacaaaataaatttactgctttttttctgtgacataagtttcgagaaggaaagcttttgatttcttgcattgagttcagtggattattcttagcactagagttgttgttgaagtcatggtacatttatatagatcattcagttctacaccaaatgatggaagaatgagaaatcctatatgacaaatagaaaagttcattcttcataattgagaacattgagcagtttgattacctggttttaataagtggacttattattcatctgattatacttatctaggaatagctttgattgcccaaataattttacagtgggatttggttgtctgtagttgaataaatggtggtttttaaatcccaaaatcctaactgtgctatttagtgagactcagtttcacatactgaagttttatttaggtaagtgattttaaaaagtagaagttcaattaacactagttaattaggtttattttctatttcagagaagccttgtcttgttttataagtctctgatctacttttctgcttcctgctctccaactcgctgtacaataaattctaatagaaatgtgggtaactgaaaatctagttctctaaaagtataaaacccctatatctagttttttagtttgcttcgaaacttcctaaactaattacctttaaaaaagtattttatataatagagtacttgaaaagctacattttactttggacttgccaaaacacatctgttgtgtgtaacaggtttt

SEQ ID NO: 76703 - DNA, 2007 bp, Homo sapiens
ctaatgttggtgttttgtaagtactacccctatgaataaagctagcagagataagcttctccttgcaggaagtgagctggagaagtggaaaagtttacagagaaaactctacaacaaagacttaacccttcccgggtaaccacgaatgtgagcgtctgcccctcctttgctttctactgcgcaaccaaactgtgcacaagcgtgaatcaaccttaaccgtcacgtctcttgccagttagcttaacagacacttttagcagcctatcataacttcgaattgcccaaccctcaaccaattacaactaaagcttgggctaggacgctccaggtccgggcgggggcgaataccgggtttaggaaaaggggcggtaaagagcgatgacgggcgggtatactaaaccaatcagagaggagagctgccgccccactatccaatggataggttagaagtatgaaagagggtgggcctgttgtcatgggggaggtggtggcgcttggtggccactggcggccgaggtagaggcagtggcgcttgagttggtcgggggcagcggcaggtgagtgccggtaacgcgggtcagagatctgggggccgtcgcggggcggaatctccagctcagcactccggaggcggaggccggaggaagggggcctggacttcgggtcggggcccgggccggggccggggccagggcggaggcggcgggggcggcggcgagttcgcgctgactgggctagggggagaggggctgggcttctggctgcggagttctcccgaggaaggtaggctacggccggacccgcgcgggtcaggccaggaggtcccttgggacgtccagctgctccggtctagcgcgctgaccggcggccactgtgtgaggagtaggtatctgaggaaacggaagcggccagggtcccagagagggggtgacctgtaacgacctgcttcaagggcggggtgtcttgggaatacccaggacggcttgggtgccagggagaaaaggaatccgggaagcccgcagcggccggtgaggagagagcggggtggggggcaggggaactgggagtggccccggtccgagggaggtaggaaggccgagggtggccagggtcccgggtgacagggagcagacttgctccaagtaggggcgtctgaggaaacgctcggagggggttggggaccctcctgagaaaagcggctgtccaagggagggggctcctggagagatgaggagcagcaggtcttcggagggtcggacgagtagagatcttgcaccgcctgggggaagaaccggagctccctgcgcccccatagctgagctgggatgggagacccaactggcctggccgctccggctctgaggatccctaagggaccaggaaagaagtcctcgaggagtggctcgcgtttgagaccggggtgaggagccagcaggggagtggaagttccctcggtcggagaggagtcatgcaaaatgggacggagatgggcggaggtgggagagaatccctataggaggggataaggtagagaaagaaagttgcccgaggagagagtaatggtttcgtggaactggctaggacagtagatatatgagaaattaacagtggagccatgtaggttcacaggtcttcacaaatagaagaaacttcagtttcgtaattaatatcaagatgacatctaggaccaaagcaaagctcctaaaagcaaggttaagtgacttgttttagaaaagaaatttgttttaggatgatggcagtaatattaggaaataggttcattgacagggtggggaatttgggagggaaaaggggaggagtagctgaactaaaggagtagaagtaaatacttatcagaaagagggtaggcatactcggctaaagtgaaaagaagttttgagttctagttccaccacttagctaagtttctgtgcagtttcctcatcagaatactaatagtaatagttcctactttataaggtggtggtggtgttttttttttcatgt

SEQ ID NO: 76704 - DNA, 1734 bp, Homo sapiens
agctgaatgccaggatggagtccactctctgcacctcaccttgtccacgtaccagcgcaatacctggggtgacttcttagaggccatactgcctctggcagtgcaggctgcaatggaagaaaatgtggagtttcggaggggtctgccccgagacttcatggattacatgggggcccagcattcagattctaaggatccgcgaagaaccgctttcatggagaaggtgcgggtcttggttgcccgcctgggacactttgctcctgttgatgctgtggccgaccagcgagccaaagacttcattcacgattctctgccccctgttttgactgatagggagagggcactaagtgtttacgggcttccaattcgctgggaggctggagaacctgtaaacgtgggggcccagttgacaacagaaacagaagtccatatgcttcaggatgggatagctcggctggtgggtgaggggggccatttgtttctctattacacagtggaaaactcccgtgtgtatcatctggaagaacccaagtgcttggaaatatacccccagcaagctgatgccatggaactgttgcttggttcttatccagagtttgtgagagtgggggacctgccctgtgacagtgtggaggaccagctgtccttggcaaccacgttgtatgataaggggctgctgctcactaagatgcctctagccctaaattagtttcttgttgattgctggaaacaaggcagtagtgattctccgctgccactgctaccttttttttttttttttccttaaactcacgttcttaccttgataagcatcagtgtgctcacatttacctttatcactgcttcagtgtcacaaacctcggaaggtcttctaggaagaaccatctcatctaggtacaaaaggaaaaggagaagttggaggtggaaaaaaaacccttgatccgtgatcatttcagagcaccaacttcatcaccttcaggcttcagtgtactgggtaacactgaccatgtcgttctgcttgagacagatattagattttttttggaatttggatctttcatctgagttctttttcatgggcgggtcggggtcagtatcctgtttgttattgttaaatttgtatgaaccttagaaaagttattaaagtgccaaagaatgtttccctttcctaaggctagattattatgtgggatggttcgaagaaatgcaggagcgggaggaagatagggaaaatctataatggctgaagtgaaaagcaacctggggtggttgtagcatgtaaaaggagcatgttaatcaacctcttaaggaagagactctcaggctgggtgcggtactcatgcctgtaatcctagcactttaggaggccgaggcgggtggatcacctgaggtcagcagtttgagaccagcctggccaacatggcaaaaccccatctctagtgagaatacaaaaattagccaggcatagtggtgcgtgcctgtaatcccagctactaggggggctgaggcaggaggatcacttgaacctgggaggtggaggttgcagtgagctgagatcatgccactgcattccagcctgggcaacagagcgagactccgtctcaaaaacaaaaacaaaaacaaaaaagaatcttatctgattgggaccagttcactaactttggggataatttatgctatttaattatgcaacccaattctagtagaaaaattattttctaccagcttgttcag

SEQ ID NO: 76705 - DNA, 1080 bp, Homo sapiens
tgagatgatgtacttgttgatgatgactcagtttagttatgacagtgggaatgggtggctcaggtgggagacagaaaaagatcatgggagatacgagattaaggaactgagaaaccagagaataattgatagatcttccacatggttatcaccaagagtggtgatggacaaattgtggaaaggaagagatagaggggaggtaaattctcaaagttgcaaatctgggtaaatggtagaacctagattcagactcaggttcaactaacttccagggtggacacaactcaccatattccactgtttgtggaatcattcttcttctttttcctttgtccctttctcaggtaaaaggtccaggagttgggctgcttggaatttccaaagggggtgagctctgcctttccatggcctctttcctgaagggcatcacggctgctgtcgtcatcaacggctctgtggccaatgttgggggaaccttacactacaagggcgagaccctgccccctgtgggcgtcaacagaaatcgcatcaaggtgaccaaagatggctatgcagacattgtggatgtcctgaacagccctttggaaggacctgaccagaagagcttcattcctgtggaaagggcagagagcaccttcctgttcctggtaggtcaggatgaccacaactggaagagtgagttctatgctaatgaggcctgtaaacgcttgcaggcccatgggaggagaaagccccagatcatctgttacccagagacagggcactatattgagcctccttacttccccctgtgtcgggcttccctgcatgccttggtgggcagtcctattatctggggaggggagcccagggctcatgccatggctcaggtggatgcttggaaacaactccagactttcttccacaaacacttgggtggccacgaggggacaatcccatcaaaagtgtaaattttatttgatcatgtggcctctctgttgctaatctctcctggaaacatctgccacatttagtgtgtgtatgtgtattcattcttttgtttttaataactaaagttttttcccctcattattaaaatga

SEQ ID NO: 76706 - DNA, 1084 bp, Homo sapiens
tcttttttggttccatatgaattttaggatttttttctattctgtgaaaaatgacattggtattttgataggaattacattgaatctgtagcttgcattgggaagtatggtcattttaattatattaattgttctgatccatgaatatgagatatctttgcatttgtttgtgtcattttcaaattttaaataccacaaaaataaaagtttttttattttctcctcattttcatttggtagggacctaatagttatctgattcagccacatataaatctgattatcagggtgagtaggtaaatgttttcaataagttaatggtaaagaattattaaacagtttgctaaattctagcaattgtcttgaaataaacatggaaaagccttaggaaattctggcctcttttgtttccacattgcaatcatgggttatttcttccaaatgtatttttctcataggaagagaaaactggccagaggccatctgaagccaaagagataaaactttatgcccagattccccctatagagaagatggatgcatccttgtccatgcttgctaattgcgagtaagttctcttttcatccttccagtattgctgttaggtttccctttcttttcttaaacacacaaagtaggaaaatatgtttgttttctgtggtcttcatttattttttgtttgcttagtgtaattctctctttggcaaggtcaaacatgaaaaatgactggtttataggattattaatagaaaatattgaacagtatagtacaattttttttttttttttttgagatggggtctggctctgtcgcccaggctggagtgcaatggcatgatctcggctcactgcaacctacgcctcccgggttcgagcagttctcctgcctcagcctcccgggtagctgagactacaaggcacatgccaccacgcccagcaatttttttgtatttttagtagagatagggtttcaccatgttagccaggatgatcttgatctcctgacattgtgatccgcccacctcggcctcccaaagtgctgagattaccagcatgagccaccacgcccagccaaacagtacaa

SEQ ID NO: 76707 - DNA, 1009 bp, Homo sapiens
ccacatttttttttttctttttgagacggagacttactctgtcacccaggctggagtacagtcacactatttcggctcactgaagcctctgcctcccgggttcaagcaattctcctgcctcagcctcccgagtagctgggattacaggcatgcgccaccacgcccggctatctttttatatttttggtagacatggggtttcaccacgttggccaggctggcctcgaactcctgacctcaagtgatctgcccaccacggcctcccaaagtgctgggattacaggcatgagccacagtgcccaatcaggaaacacatttaagtgccttatactaccatatgtggaatgaatccagtagccataccaagttattgaccagttatcttaagcagacattcttctgatcacatccaaaattgatgtctacatcagctaactttcctacaagattatcaaattttacacagtatttttctgtatttaatgactgccatggtctgcaaaattatgtgattagacaatgaatgacgcttaaagaatgatgacctattttctaaagtacactcaaaatattaaactttagagacaaagcaaaatctatcataaagttggcttctgttgatagaaacagagaggtaggttaataatcactgtcctaagataagcaagaatgcttagaaataaaagttgagaccctgcttcaaaaaagagaagttgaaccttccagccctgagtttctaatattacatgaaaattatgaaaatgagcattaagccagtcgcagtggctcacgtctgtaatcccagcactttgggaggctgaggcaggcggatcacgaggtcaggagtttgagaccagcctggccaatatggtgaaacgccgtctgtactaaaaatacaaaaattagccaggcatggtggcgcgtgcctgtagtcccagctacttgggaggcggaggcagaagaattgcttgaacccgggagacggaggttgcagtgagctgagattgcg

SEQ ID NO: 76708 - DNA, 1038 bp, Homo sapiens
tgagccgaaatagtgtgactgtactccagcctgggtgacagagtaagtctccgtctcaaaaagaaaaaaaaaaatgtggttcttttgtggaaagaggaatttgaacttgaataaacacttcttttgacaccttttaccagtggtctgaagcagaataaggaagaataagaaatgaatcttgactgttgacttattctgagaattggtgatgtgtaaagagagttggaatcttctacctgggtttttctcagggctaaatggaaaagcacagggcccagaaaggttggagttaatcattcacttaaaagcattaggaggaagtgtcaaagcatcagtcatgaatagattatgtctctctgactacagtcagaccatcaattcactaagaccttatactctgtaagtgttggtaaaggaagaaaactgctaaattgcatgttaccctttactagaaattcattcctttggcacagattttatttatttggggctgtttaatgtgtctgtaaatcatgaaatataaaagcaagattcagtgtagcagagttggtgcttcttctgacaagctaacttgaccatatttctttatctgtgctctaacatgtgtcatattgttttctttttgtaaaccataaaatgggtgaacttccaaaaatcaagggtcatgttttaaaatcatggaacttttagaaataccatatctgtatctctattcctgcattttataaatctgtaaaggaagaaaactgaaaggaagaactagactgagtcttacctttctctgacctaagataaactgataaaactttttacttgatatttggagaagtcattaactggattctagttaatttcccatattgggcagtttagaggagacccagccaaccaaattatgatctagcaaatttaacataggggaagagggatagtaaactatttttcagtagatttgcactttaaacttaggaactggatgttggtggaaaggacttccatagggcagatgggtaaatatctagcctgcacttggatgtt

SEQ ID NO: 76709 - DNA, 1068 bp, Homo sapiens
attttgaaacaaatcacaaaataacattcagaaactcaacatttctaaataacttaattcacaataagtttagtcataaagtcatgctacaaaactcctgtgtataaaagattattaccaaggtattcatagatgttaaaatgttcttcagaatggagttggttctagaagccaaagattctggaatgatgctcgtaatcatgactgccagcctgggagaggagctggctatgcgcatgtgctcttagcttccaactcaccagtcttttgatgggagtgatccctccaggcagtagcacctcagaggcaggtaccctactgatcacagaggcaaagagcctcccacccatataatgttagacaactctacattcatttaaaatctagaggtgggaatgataattcgcaaagcttctattctgagtaggagaactacttgacacatcccccagagggatgatcttggatgtaacagacatggaagacgactcaagtagggaaaaagggaaatcctgactctgattatgtcaaaagacagttaactactcatgtgggtttagaacgagcaagggtgaggtttgattctctaacatccaagtgcaggctagatatttacccatctgccctatggaagtcctttccaccaacatccagttcctaagtttaaagtgcaaatctactgaaaaatagtttactatccctcttcccctatgttaaatttgctagatcataatttggttggctgggtctcctctaaactgcccaatatgggaaattaactagaatccagttaatgacttctccaaatatcaagtaaaaagttttatcagtttatcttaggtcagagaaaggtaagactcagtctagttcttcctttcagttttcttcctttacagatttataaaatgcaggaatagagatacagatatggtatttctaaaagttccatgattttaaaacatgacccttgatttttggaagttcacccattttatggtttacaaaaagaaaacaatatgacacatgttagagcacagataaagaaatatggtcaagttagcttgtcag

SEQ ID NO: 76710 - DNA, 1497 bp, Homo sapiens
tctgcattcagctaagggcgggaaactgacctagtgcctgtgttgcagaccatttctgaggtctccaccatccaaggaggcacagccgtcattactgtcctccatgccttcagcagcccccctcacagctaaggtacataccaccccttctgccgcgcctccacccctggcaccaaggtcttctgctgcttatgtctaaagggatcacctatatttaactgcctcagtgacctaacctctttcttctcatgtgccagatgttaagatgaaggaggaatacaacacatactcaagcctcagcctgtttagttgttttcactggggctcgcttttctgggacggtatttattatcagactggcaagcctaactccataggtttacaggaagtagggatatttttataaaacaattgtgtcctccccacattttgctatgttaatatttgcttctaacaatttgcagctgtttcactttttcctcatttgtctctaagttgaaggctttgttggaggggacagagcacaggaacagccttgacagtctgtaattattgtacagatattttaatagcatataaataagtatattccttttattttgaaacaaaaatgatcagacactgccttttgtgtgtttgctgcctgtggcatccttttttaaaaagactgttacatattaaaatagtgtacatatataaatattacctcttttgctgtacagttgtgatagagactgaagattttattttttgtgtgctttttataagaaaaaaattaatacactaaagaatcttgctgatgtgattgtaatgtacctatgtaacttatttacttttgaatgttcttctgtatctttaaaccttttattaaataaggttttaaaaattcagagttgaatgctttgttctcttgggattttcaccatctggggttgatgtaagtgcgccttgtcttgcttgcagggagattactcgacatttttgaaccataaggattctcttttagcagcctattgtcaatgatgccagccaggaaaaggaaaataatacactaatgtttgcctggctaaaagatgactcagtagacacagacagatttttacaaaattttagacaagaaaaagtctaaactcagtgtctcacacaaatacacagaaatggcgcactccgacattttggcttcattgggatgaaatatgcagggtgcacagtgtggtcaggggcaacgggaagccagggttctgaggagagtattttcacgtgcagggtggactggctgagcaacccgagtagacaagtccaccatgagggatgcatttccaacaatatcatcttaaatccactccaggattgggttattatttttaaaacacggtgcttagtagtagttgtttactgttaaaatgctaaattatgaaaaaggaaatgcgccatcagagaaacaaatgcccgagcccctcgctggctccacggcaaccgctcgacccccgcgagccg

SEQ ID NO: 76711 - DNA, 1697 bp, Homo sapiens
ctccccagaggacctcgaaggctgcaacggccctgccccaagccccagaaaaagaaactcttggagggagtctgcgggcttctctgagaaggggcgcagcctgacacctgtgctgtccctgcagtctctaggcctgtctgagctgctcccgtgaccgtgtcctgagtggccacctcctccttgggagggaggccgcggcaggtactctccctttgctgcttgctggcggccttgctagggctagaaagttttctcagcgttgggggaggggctagcgttcttgtccaaagcactcatcctgctgcagggaagggagctgtacggaggctggaagctgcagggttaggcccgagagagcttttgacaagcctggctcttcctgcttcccacctttttggctgaatacctttgggtcctggaggctgccaagggcgcttcgccttgagcaggtcccggagaggctcagcctgcccctcctggggccagcctccttgcctctgctctgacctcagcagctacacctaaccccaccgcaccctacccagtgtcgatatccacaacccagcccccaggcctgcactttggagatttctggatccttccctgggagggagaggtctcctaactcgattggacaggagccttcattccttgactcgtgtcatttgggagctatttatttattcttagtatttaatttttaacatcctctcagggaccaggggcctcctgcttttcagaggcccgagtgcatttatcccaaaacgaggcatcttgacatcccctatccccaccccctaaattcccaaggccctaaggtccctcacctggttgctctggaagctcttgctgataggaatgatagcaacactgaaagagcgtgggaaggtggagggtgtcaccagacccacacagagcaagggagattaaggcagttcttgctgccccttctctggctgtgctttgcctgagggaagagttggcaagaggccagaattctagtttggtttatggggcctggattctggcttgaagaagccatatttggcatgggtgaagtgaaagggccaggaggttctggaggccccttcacttccagtcccatagcggggctcagctatttttctgatcttattcaactttagttgtgcaaaagaaattctaagtgaatgcgcgtatgacaggtcaacgtattaggaaggagccagaaagtattcatactgctactccttatgagatagccaagaagcatcatgtcagtaactgggagtggagagggagttttgttttgaaactatgcaggtatttttcagcatccatttgtacattagtatggttctacaggaccccagctgtggaagtaacaaatttcttctccctccagactcttggatgactacctagatccccagcttaccggttagtttcctccacaggcttccatgagctcagtgtcccaagacagcaaaaatctggtataccctgtagaagcaggggggtagcaaatttaggctctcttcgaaattacttgtacaatacgagtgccttcgcagcttagccccaaagtgctacttatgtttcccaaggtcttttctattcaaatcatatttggtttcaggcccctttatgggcatacggtaacagaaacctccatcattcatatgagacccttttgtcagtggtaacatcttgtactt

SEQ ID NO: 76712 - DNA, 1950 bp, Homo sapiens
agaatctgtgctacagcagtgagacagagctctaggctcactgcccttgttcttgttccccatagacttcccaaaagttcccaagggtgcctcttcccagaagagagtccccaagtgaagagaggctggagcccaagagggaggtgaaggagcccaggaaggagggggaggaggaggtgccagagatccaagagaaggaggagcaggaagaggggcgagagcgcagcaggcgggcagcggcagtcaaagccacgcagacactacaggccaatgagtcggtgagtgtgaccaccatgggctgagcccagggcaagcagggtggagctgggcctgggggcgtgggagggagggtagagcaggactgtgatcctcattataatcataatagcaggaaatgtgtgaagtactttgtgctgttaactcatttaatcctcactaccctatgtggttaggtattactgttattcccattttatagatggggaaattgtggcccaagataacacagctagtaggcagcctgaatccagagtctgcgattaatttttatactctactgcttctgtatctgagattcagagggaaaaaggttttgtgaaaacccagtaggtatgtgggtcactgagggagcattggtggtttgcagacagggctcccctaagagagccagagtccctgacaagaatgagactgagctgagaccatgggaatgacaatcataggccctcaggcatgatctctgcaaagtgctttcatttccattatctcattagttcctcacactgcagagttaacctctactctgcagatgggggaaagcagttcagagatgctaagtgacttgccccaggtccttggactcctagtgcagtgctctgtccaccatatcacaggccaagaaacaagactactggccatagttgctccttgccagggagagttctcccagaaaggggtaaggaggggaaggggtttattggggagctgctgcttttttagagtctttttttttagaaatgtatgtagtaggccgggcgcagtggctcacacctgtaatcccagcactttgggaggccaaggtgagtggatcacctgaggtcaggagtcgagaccagcctggccaacaaggtgaaacctcatctctattaaaaatacaaaaactagctgggcatggtggtgcacgcctgtaatcccagctactccagaggctgaggcaggagaatcacttgaacccaggaggtggaggaggcggaggttgcagtgagccaagatcatgccactgcactccagcctgggtgacatagcaagactccatctcaaaaaaaaaaaaaaaaaaaaggaatgtgtgtagtacactcatgcttacagagctcccataaactgtaaacacacggctgtgtgcccacttctgagcctcgaccacctgcaccaagagctgtgctctgtgtagcgctctacagagttctgttgacttttgtgaactttcccatgagggtgccacttctgatggccacccggggcttccccagccgaggtcacctctgctccctctgctctgcactctgacccctgcccttgccctgtttggtgtccctgcagtgcgctgtcctgaagtagctacctgcgcatctgtcccttccaccagatcctcagctctgagggcagggatgcctgtgtcaacctctttgtccctagcatctggcccatcacaggggcctgaatctcatttatagaacagggcatgagcggactaaatgacagaaaacatcaacaggtaggtgcttcattaacccagagaccaagatcccctgtcaggcgcatcaaggcctctagcagctcgggctgccccacagaattactctagcagcaactttgtaaacgatagagctgaccagagatgcagagttggaggaggcaatggtcgtcatatccctggaaggacccaagtgc

SEQ ID NO: 76713 - DNA, 1014 bp, Homo sapiens
tgcattattttatccagttctcacattaaccgtaggagacaggtagtgatagccccttttggtgagtgtgaaaactgaggcacccaaatatttagtgaagggcctgcgttttcgtaggtgacaggctgcagagccaggactcaggtgcctgtgttccctgcgtgagctctgtgtgtcaccactgtgactcttgcacatacagggcagccactaggattgggggtgctttgctgaaaggggggtgctatttatcaacctgctctttgtcccatagacagtgctgaagtaaccccgcctgtcctctctgtgatgggggaggccaccccagtgagcatcgagccgtaagtgcagccctgcccctggccgaggggtgtgggtggccacactggtgcagtgtgtgcaggtgggccctgggagcaacaggagggttccgtggggcctgcagagggctgagagggcctccttgagcttctgtatgtggccctgggctttgctgtccccgccctgcctctgtgtggaagttgcagggaagggcaaggaccggctcagcttgaacttatctctaggagagttgaaaggggggtccagaggctctttcccatctgtaaacctgcagctgcttctcccctctccagcctctggaccttgcctttctggtggtgccaggtcaggctgtcctcccaagcccctagaagccagactccctacacctagctgaggccttgctctgccggctccccctcatcttcttcccaccctgagggatcatcaagttctccgtccccgcaaggtgaggcctcacttcctgcccttttcactcctctagacggatcaacgtgggctcccggttccaggcagaaatccccttgatgagggaccgtgccctggcagctgcagatccccacaaggctgacttggtgtggcagccatgggaggacctagagagcagccgggagaagcagaggcaaggtgaggaggggcctgggggcagcaagtgagggcaggcacatgggt

SEQ ID NO: 76714 - DNA, 1195 bp, Homo sapiens
cgagtccagattttctggttattctcagctggagagttggcctgcatgcctctaataggcaggggagcgtcacagtctctgctctctgggttcttgttctctggttgaggaaaagtttgtggtagaggctggaggcctgggcagcttgttctgagacaggaaggagcctgagcagctccacagctcaatgcctctattttatagatgaggagctaggtccagaaaagacaagagactgacctaaggtcatacagccaagtaatggtagagctagccctagaatttggatctcctcaatccctgcctgtgagtacttgtactacaccaggctttggggggaggtttgtgttttgttatttgtttatttcattcattatttattattctttgtactacagatactttctttcatgcataaaagtagagaggagtataatgaatgccagtgtttagccatcacccagatttcacagttatcaaaacatagccaatcttgtttcacctgtgcctctgcttctccatgccactgggttattttgaagcacatcctgagacatcgtgtcattccatccgtgtatacttcagtttgtatctgaaatacgtcaggactctttcttctccaacattatctcaatagcattaccacacctaaaaaatgaacatgactatttttgtcagatattcagaatagtttaaatcccttattataaaattacaaatcattacagctagctgattttttgttagatttcttgtcaagaaagtttggggggcctttggctcctgcatttttttttttttctgtgcaatcatattgttttcctaagggaagaagaacgaacagtttcatttcatcccaatttgtagaagggaaaagagggcacagatgggtgaaggacatggccagagcctcagagggagtcagggccctctgctggaatgtgtttatgggagccagaaccttggcagggagacagctcattattttaaggcccactctgtcaacatggccaaccttacctgttgtactgagtacgcagagggataaactgggtgctgctcaccctgtagggctccattctctgcctttgagattataggaatcgagcaagggaaggcctctgttctcttatagtcctgctttctattctagatagaggcccatgaggcgtacctagcagggagaagtaggagg

SEQ ID NO: 76715 - DNA, 2768 bp, Homo sapiens
atgacaaagcaggcacctgggatttagtgtgccatatacagtgtgttataggggcttgtagttcagctcctgtctcagctctggggtcaggtttcccagtggaagcagtgtctgcaacctgaaggattaataggacctggcctgatgaaaagagtgagaaggtgtcctaggaaggggtacagcctggccaaagacctggaagcaaagcgagaagaacacgttggaggccctggctcaagcacagactgtcgagagaggtggcaggagccaaggtctgcagggacttgtggacagggcagggagtttagactttgtcctaagacagctcagagaactgactcgcctggagactcagtttgggcctgtcttgcccttgggtgacagacccatgatctttgactcccctcttcctagtgctgagcttgtggggcctgcccaggctataagagtgggagcttggagcattagcctccaagggcagggggccctcgggtcagctgttatccccaggtcagagctgagcccccgcagctgctgagatcaacttggcatctcctccctggtctgtgtggccttgactcacaatagtcttttttctcaaatggacacactgattgccccaagcagactggtgagtggccctggtcccacagtggccacagtctggccccttgccctgtggtgatggctctctggcttctcctggggtcagccagccagtgttgggtgtgcagctgggctgccgatggcatttggggagcagtgtgtgtttgagctgacatcccaggagagctggtgtcaccatcagcattgaacacccaaaggcctttccagcaccttcccctcatgtgtctgcaaaacatatatgtggggtcagcactgttttttatttttttttcctggtgcacactgctttcttctatagagagtaagtgctactcaccatagaacttcctgaaagcctgctaggtcccaggccttggtcttgattgttgccttgtctttggcccaggggtacctgtgggtctggtcaaggattggttgctgcagagaggagcctggaggaagggaaaagtgaatagagcgtgacagtcaaacagactgacagggcgggttgccgtgtctggggccccgtggtgactgtgggtttccttttgcagtgttcctgcatccgttgtcagaggccctgcagctggtcccagggctgagctgctggcaggagttcctcatgacatcctcttccctgcaatctcagggactaggcccacaggtcagcagcctttggaggtgtcgtccttcctcttcctcactgtgaggaagggcagtttgatttccatctgagggacagggcagcgggggtggggtagaagaaatgagaggaagtggcgcagtcctgaccccgagttgcaggctgggagaagcccatggggtctgagagctggaggcaccaccagcagcaactgagcccggggtggggttgcaggagctggagagtccaggcctagatcgggggctagagtggccagtgcaggaggaagtgtttcaggcctccctgcaggtagacctcacacatctgctgacccctctgtggtgagaccttttcctgctctcccttcctggaaggccaagggtctcagctgtatttggggagaatgggagagagtacctgccaaaggttcaggcaggggtaaggggcttcccagtgccaatgagaagggatatctgatatctgtgtctagaaaatccttgcttggaggtggtgtagagtgtgctgtggaagggaggtgtatgaagaggggtctggggtcttagtggcatatcttggggataaggaagaagagcttgatcttagagtcagacagatctgggttccagtcttggctctgcaacataatgactgtgtgaccgtaggcaacttacttagctcctctgagcctcatctagctaacctgtaaatagaggttaaaatcgcaactcctgccttataaggccatggtgggaatttaaaggatataaagcacgtaggatctgcctggcacgggtgcaccatcaccatcatcattactcctatgactacttagtgccctgctgcctaggtgtgcctcttcacccttcctcccaggctgccagtatcttccactcttctccccacccccagccgatgacctttcttctctgagggtcccaggcctgactgtctgtgcccctggcacccttagctcttcggtgagggtgacagggaggcctctgcagcaagaagtttctggggtgattcagccttccccaaaccaggccccctgatttcttcaaagcaagtccctgtctgagcttcagaggctgctgtggtatcctgaatgatggccctccttgatgtgcagggtgggagtgggaggcttcccagctgagctcagctcctccagggctgaccatacagctgtgggtaagcccctgtaagacctgcatctggcctctggcccctgccctgggcagaagcaggcttgtcctggagccgcaggccccgcctcatctccttctgagcagccatccccatggagggggcgcacccctccatcaggttcacactggcacgtgcatccaggcccacccgccacgtggaccttcccttgctccaggcctcaagcccgtgctgtggctcacaaggagacagggctgtgatgaagggaggcgtgagtgtgtgtgagcgcccactggaggggctcgcagccccctggaggcacgtgggcttgccaggctggcgcacattcttc

SEQ ID NO: 76716 - DNA, 1024 bp, Homo sapiens
gcctccagctcacctctgcagtcccccatacctcaacaccctttgggctctcttggcttccaggggcttttacagatacccccagtctggaggggaaactgtttctggctgactggggctaggataatttcttaagaggagtgttaatagaccatgctgtgcttggaaatgcccccagggaagagcagcagctccggagctggctttgtgaagttctcaagtgtagcattccttctgaggcccaccggtgtagatttcagatttttctgggagggtggtggaaagagcaaggacttggaagacacaagataaagatttgaatcttgcttctggctctgtaacagcagagcctcaacttccctctggagaatgaggacataagactcctccataggaggtttataagcatggattcgaatttgtagaggacccagcccagcgaagtactcgttagctcccttcttttgggaaggatctgtcttttggatattttgtagattggccatggaagtggaaatatttgcctgtggccatttttcctagggaaaagcagggctgcctgacaagctgttgcaatcccaaaggcctctccatcccctagttgttttgatgtcgggatcaagcttggggtcaggttcaatgtgtgtctgggagaggggatacccaggcctttgcaagtctgagctctgcggctgcctaggactgtgacaccgaaggtgtggagaacatgggctgaggagggaggggcctttctgagctgagagaacttggcaagttacttttaaccttcgtttcctgtaagtttcccaaatttccttcggttattgatttccaatttcaacccgttttgattggagaacatactttgagtgatttcagtccctttaaatttgttgagacttgtcttatggcctaatgatgatctattgtagagagtgttccttgtgctataaatatacatatatatattttatatatatattatattatataatatataaaaaagtatgtattttttattttt

SEQ ID NO: 76717 - DNA, 2920 bp, Homo sapiens
acactggagtcccttctacttcctgcagcccttcctcagcctccctctggccatcgcaccttcccctttattgctcttcttagagtgaatccaggaggtggcggctcatcctttgggcctggaagctctgccggtattatctgggaaataccctcatccccctgtatccctgtaggcaggccctgctggcatagctgagtttaaaggaggcctgtgctgggtgccctctggactttctggccagacctctctctcctgggtctgtaggccggaagctctgcgtgcctgcagagccccacactgttgctaggactttgagtctccctgtcccgcccttgcctggccagccttgctctcagccagctgtggaactggaagagttggactattcatttcctccaaggtgttaaagactgataacgatgtctgagccacccctacccagcaagggagacaggaaacacatttattgagtgcgtaccctgtgccaggcggcgcttcatctatgtattacctcattgaatcccacaataactgagatgaaactgttgtgcccattcaccaatagggaaccccaggctcacagaggctggtgattggagaagccagcacacattgcccctgactacttttaccctgcagctcccacacttcctccggctattttcatgtgcacaaggaacaatgctttgatccttggtatgaagtgctgatagtaggaattcaggcaccattagactggctggtaggggagatatcttgggctgggaagggtggggaagacctccctgctgcctccctctccagatgcttcacagggcagccaggagcccagccttgagccctgaggcccttctgtggaggactcagctgtgggcctggggactgctcggccaggcacatgcacaggaagaggggaaaggcttggtttcagcttagtgtgggcttcctggggacctcccaagtgtgtcctcccccttaaaggtatcccagcctctgaggtactgagaacagctctggggaatcaaaggctggggctaggtggaatctttggtctcccttcttggctgctgggtctgacctggggcccatcattccagctggcttggcccaggtcccagagagtctggttggtgtgtacttggggcttgggctggatgctctgctgtgcccgcatgctgtgccaaaggcctctgggtgtatttcaggaacaataaagaataaatcaacataggagaaaaggccctgcagcagctgctcagagactggagaaatgcaaagaatgtgtgagcctttggcaaaagtcttgcatcttgaccagggcctgaggaagggcgtgaggctgatgtgatggctctggagtcaaatgggcgtctgtctgtgcccagtttgcagcccttctaggaggccccaggcagccacactgagactcccctccctctgctggtggcaaatttttttgcttcctggtcgctagcatgtactagggagccatattgcccccgttctttactctcacactacactgccagacaccgacccatccaacccccaagcaccaggtgggtcttggccctttccagccctgaccagtcaggagagcctgggttgatgaagacttggtaggcttgacacacatgctacaccccctgctttacctcccccagacgaatgtcaaggacctggcaatgccaggtctaggggtgctaagtgtgagaacatctacctgggaggccgtcactatagctctgctcaggtagtcagccatgtgtccttaggcaggtcattttacctttgaggtcttggttctatgagccatgaaattgaggtttggacaaatgatctttggagtgagtgggcacctctgtctcctctactcgggatgtgcgatgaatatattttatttaggaagttaagttattgggagaagcaacactctgagagcaccatgtggagatatgggtggctgtggctgggggctaatgctcagtgtcctgagtgggggaacccaagcagagacctgatttgacccagagctcagggtgccaggagaagggacaggagcctagactccatggggacttgagttatctgacaagcaggggagagccaagactttatttatttttttgagacagagttttgctcttgtcgcccaggctggagtgcagtggtacgatcttggctcactgcaacctctgcctcctgggttcaagcgattcttctgcctcagcctcccgagtagctgggattacaggtgtgcgccacgatgcctggataattttgtatttttagtagagacagagtttctccatgttggtcaggctggtctcataaactcctgacctcaggtggtccagctgctttggcctcccaaagtgttgggattacaaacgggagccgctgcatccggcctggctttatttttaaagagctgttggctaacctcagttgtggggttggagggtgtggaaggggtgtgacttcctcttaggcaaagatgccgagccctccacaggttggcccactggaggtaatcacctgtagcctcttcaccttcaaagccactcacctgcccggcctctcccacccactttacccgaccagccacatctcagaacatcatggtggttttcaggggctgaagctgctctccagggagcagacgtgagcaacccagaggctgctgctgtctatcccaggcagcctggtgtgacctccaagtctgaaactcttgggggaggaagtttgcagaacaggcaggcctaggtgccagtcctggctttgcctctatactgctgtgaccttaggcaagtgatttgacctaaggtcttctcagatttcttgtttagaaaggaggagtaataatacctaccttgatggcctggtgtggtggctcacgcctgtaatctcagcactt

SEQ ID NO: 76718 - DNA, 2147 bp, Homo sapiens
ctggagtgcagtagtgcgatctcaggtcgctgcaatctcagcctcctgggctcaagcaatcttcccacctcagcctcccaagtagctgggactacgggtacacatcaccacacctggctaatttttctatttttgtagatatggggttttgccatgttgcccaggctggtcttgaactcttgggctcaagaaatccacccactttggcctcccaaagtgctgggattacagtcttgaactacctcacctggtcttagtgcatgttagttgaacaaattagtgaaagatctccatcaaaaaaaatgtgtacttgtcatgtgttgggcccagtgagtccctgctcctggaacctcctcagattgcatcactggtttcaaaaatgtcagtccaccgtgggtgattctggggctggtgaacccagtttcctggcactgccctgtagctggccttgtggagtgcatgtgtcggtcatcctgaccctaaggggacctcagggtgaaagagttgtggagccatctccctagggatctgctagcctgggcacttcctttggtcagcccagattggcacccttcctgtgtgtgtgcaggcgtgcatgcatcagtacagaagcagcctggggctccattcttccctgactcactgcaggtggcaggaagcagagccagtggccgcattctgttggaggaattgcttctttctgcacatgagaactcttgactctgggactgaaaaattgcatgctgggccggggctagggtggagtaggctgaaatccccaattcttactaagggacctgcatttgcattcgaagcaacattcaggatactgtgagactatgagctcattttatgaatcagaagcattacagcataactttaatgttggaaactgcaatttggaatccagatcaccctccctccacctcagcgcgcacgcgcgcgcgcacacacacacacacacacacacacacactgacatgggctctcgcagtcacacacttgggagcaataatagttggagcatcagttcagattctggaggcctccagcaaaattcatccacaccgacttctgcttccacactcagaacgccgttcctggatggtgtgtggacagtcacttgggcagtgactgaaggaagtctgatgggtgcgtgggaatgaggcctgggcagacctgagttcataccccagcatctcctcttgctgtgtggctttgggcattgcttaacttcttgggcctcagttgcctcacctgtaaaatgtggatgatactagtacttcataggctgtgaagattagacaggattatgcatgcagagtgaatgacacatactaggtattcaacagatggcaactctcatttcaccagttcccactggatccagtgtgtttgcctttgactcctatcaaggaagagaaaatgaagggtgtcctgtttatagtaggaaagcaatctaccaggccactgaagcttgtataaatgaagtttattgtgccctgggaacaacagcttgatccactccaccctagacatgtggcccagacccagtgtctgtgtgcctttgagagggactgtggccctgcagccgagggttgagggcccagcttcccagagatcagattgtgctctcaggaacctacccgcccaggccccaggctgagctgctcacgtgggtgggcaggaggaaggctgctttctcagccaaggaaaaaaagtcccctgtttgcttcacctgaagcctcgcagtgtgacctcgcaggaggtttgggtagagccaagggtgggagtttttccttaaagactgctttggctcttttacccattaaaattatgtgcaacggtgaaggaaacaccaagaattatataagaagaaagttgccactgtcagaggagagccggagttgtgctggggtggggctgggggtctccctgagggctgcagttgctggctgtcattctcggctggtggggaagagctggtggggaagagccggggcttggggctgaggcttccctggcagccgcccttgctgttgctcttcctggaacacagcctcgtgctgtggccagccagggaaggtgctccctgttccctctgcctttctcccagccgcagggagctttcgtggtgagagcatttt

SEQ ID NO: 76719 - DNA, 1290 bp, Homo sapiens
ctgctcctcctccgctggagagaaacgtggtgtccgtggggaccggctgacgtgacggagcccaggcccggaaggcgcggcgaggggctagccagctgagggaacttggcgcgggagccccttcccctgccagcgtgcacgggaaagtgggcctggacgcggcgtccacgccaggagtttgggggacagaggtgcaggggcgttggggaactggggcaaatgcagtcagcagaggcctaggctggagcgcttcgcgcgggcgggcgcacctcagacctgtcatcctcccgcgcgcccccgcacgcccgcgccgccgcagccctcccagcccgcgcggtgcctcgcggggagctgtgttccctggtgcctggcggcagcgccgaaacccgggattcggccgggccctgcatatggccggcttggtggagctggtcacgtcgcctcccaagtcgcacatgcaggaccatgtgtgtcaggttgcccccaaggcctctgggtaaaggtctaggggaggaaggggaacttcgtgtgccctggggccttcaggcttcagccccaaggcgggccgacatggaggaggtacctgccacagaaagtggaggccgggtgtccgtcccagcccagcctccagcgagagctggtgagaagatgaaaggggaagttatatgccccatttaaaactttgttggtcacaactacggtggctgcttcctgtttccaccatcccacgtgggacctgtgtgccagcctgtggagcctcgcgcggggggcggtgggatgggggaagagaggctggccacggaggccccggtggcccgcgtatgcaggggatccctgttggcagctgcggctgggggagggaggggatgtctggcttgctccagcagggggagcctggccaggtgatctgggatcttcttgttcctgtagcttcagggttgagactgaaggcctagtgaaggtggaccgagaagccagtcctccctagggggcctcagctgaggggagaaaccacctgtcttgctctagagcctcccaccaaaggtgtggcacacgccccttttggatcagagaaatgcaccctttccttgggtgttaagtggcttcagaacccagggaaaaggagaagccttcccgggttgagaattcgtaggtcttccttttccaactgctctggacagtgaataataggagcgtaaacattcaattactgtgataaaccatctcgttgcatggccctggtccagtctccactctaattggattggcctctggctggttactctggtc

SEQ ID NO: 76720 - DNA, 1032 bp, Homo sapiens
attttcctcacctaagcgatggagatggtgggtcctttctagggactgaggccagtttctcaataacctttacacgcaccaggacgcttttgagccagaaagtgaaactcggagagtctgttaataaaatgccatggagaggattgtgcatgatttaccgtatccaaaaccagagagagtttctttgtggaagaaagcgacttgtgccttccccagcatcacacacacactttcctggcaggctcaatgggtttccaaacatttcgtcaccgtctcctcctgaccttggtgtgaaaggaactagcagcgtggcccgccagcaaagccatcgggggcgccagcctgggcgggggatggggacggcgaccgactcgtgagtggaggtgaggtctgctggaaatccccagccccggccgccgcctgaggtttaaggacgccttccccggccttatttggtcgcaggaagtgggcggcgccgggcctgctggctgaggccgccccgagacagttgtgctgatgaagtggtagagctggttcctgctcgccgcggtgccgcgcgcgccggccggccgctgggcgctccgcgctcccagcctcgagttgtgcaatcctttgtagcacgccagagtcctcctcctccgctgttgcctctcgccctctctctttttttttttttcaagctgtgagctcaaccgatgagtcagagccgtgcaatcctgacactgcatcgcaggactgggggtgacacggagggaggcagagcgctcgcgaggcggacggcacgggtgcggggcgcgccgaggctcctgcatcgcaagcggggggtgacagcccgcgcgtcccgcccgggccctgccagcaaacttctcagcctcgggaggcgcgggctggcggaagccccgcgagcgccgcggggaggcgacggcgcctgtttgtttttaaaatcgggagtgcgtgcaggcggctggagtcccggaggcgaccgaaggcggcgacccgcggcggaagggggacagccgagcccggagcccg

SEQ ID NO: 76721 - DNA, 1282 bp, Homo sapiens
gagtagctgggaccacaggcatgtgccaccacacctggctaatttttgtatttttttgtagagactgggttttgccacgttgcctaggctggtctctaaactcctgcgctcaagcactcctcctgcctcagccttctaaagttctggggttacaggtgtgaaccactgtgcctggcctcatccttggaagattttaatggtctagatactgctgatgaaacacagggcagtgacagaccgctctgagtggagtccagagagctgatgtggccctaggaagcctctcaaatttgccatattctacctttattgggaatcagagtttaggattctgtctagggtgctttatttcctggagtgtttctctcttgtcacactccctggtaactggagctctgtactcctttttcgtgcagtttgtaaagagggttgagggtggagaaaatccaactctgtggataaggtctctggaacacctccccatttccctgaaaggtcaaccttcttggttgccccagagacttgtagcaggggctggagcttctaaaaccaaaactttcacttcacacgtcagtgattctgcaccgtcatatctgcagcaaaactgacctccagggctttcccggaagcgctgcagctttctttacatagcctcatctgcccgcctttttgaggtagacttctcctgccaagggggggctatttggtatagtcttgagccctcctcccctgcacacatgtgtgccccttttcttctctctcctttcttaggtggcctgaatttggaagtttagctgtagtgaagggcggtgccgctccaaggtgagcaaggctccttcagggccactgacttctctgtttcccctgccacctgcctccactatgtatgctgcttcctgggccactcctttggagtggctttcacctgttccctgaaggctgggccctggctccatgatggcaggctcttctagcaatgtgcttcccagtcaggttttctggttggttgggaacatccctgggctggtctgcacaagctcttaggggctcactctgggctggcctaaggccaactgcaggggctgggctctcaggggaggtgaggatggccacaggtctgcagaggaacttggcagcagtgggcactggagaccaaatggctttgcttttgcttccctcacttggatgtgttgtcagtgggagggaagaaatcaggcaaatgaaaaaagtaaaaaggctctaccctgatcctttgccaggagccctgagagtctggcctctg

SEQ ID NO: 76722 - DNA, 1518 bp, Homo sapiens
cagctctcggtctgtgaagaaagggcgtttcagtcctgtggctctgctggcctgccctccctggcagccacacctgttttgtccttctccctacacccggccagacgtctctcccagagtgacagcagcaactggggacatgtacagaggctccttctcaggcctgacaaaggcactcagaacctggcccaggcctgcagggcagggaggctggggagggggcaggtgggagggccagggacacagacagctgtgggctggtgtggcaagcatggccctgccccagaacaggtgaagtcaatgtgagcggaggaggagggtcccctggggttttttccaaggataaaagagaagacagtgcagagacatctcagcacacagtggcttaacttcatgactggggtggttgtgagctcgcggtttgctcagaaaagacctggcaaaaagggctgagaagacacagctggtggaggggtgttcctactcaggctgggaggacagccctgtggaaaagtgtggtggaaaggacacaaagaacaggctgggagagaagcgttggaggacacccctgatgagacattgagtcaatgccagaaaaagtctctctaggcagtgcccatgagagggttacctgaggcccatggggtcttttcagggaaaagaactaggtggtttttttttgttttgttttgttttttttttttttttttttttttgagacagggtctccctctgttgcccaggctagagtacagtggggcaatctgggctcactgcaacctccatcacctgggttcaagcaattctcatgtctcagcctcccgagtagctgggactacagacgtgcgccatcacacctggctaacttttgtatttttggtggagacagggttttaccatgttagccaggctggtctcgaactcctggactcagatgatccgcccgctttggcctcccaaagtgctaggattacaggcgtgagccatgacgctggggctggaactaggttcttaagaagggataacctaggttggggaggagatacagggtaaaacagtaaaaataattaattgtagcctcttatatgtacatagcatgattgagttataaagcagttttttgtccttttgatcctctcaagcccctggaaggtgggcatcctttcgttgttcatgcaatgaacacttaaacagtgcatctgttatgggcctaaaaagtgaggttcagggaaggtcagtgacagttttcctaagtccctgtgttttctacacccttcttttttttctgttgtaattgtaggtaatgaggtcctggaggttgtactttagttctctagagggaaacgacaatagggacacaagaacacaagggacatagggacctggctggcattgtggacttgggatgccctcaacaatatttgtactcccagttccccaggctctggtaaaggttggttgtttacttaaacacaccacgtgtgctggcctcattgggggaggaacagtgggaaaagg

SEQ ID NO: 76723 - DNA, 1352 bp, Homo sapiens
tttgagacaggctttctctctgtcacccaggctagagtgctgagtgcggcggtgtgatctcgtctcactgcaacctctgcctcctgggctcaagcgattctccccactcagccccccaagtagctgggactacaggcacacaccaccatgcccggctaatttttgtattttttgtggagatgggggtttcaccatgtggcccaggctggtcttgaagtcctgagctcaagcaatccacccaccttggcctcccagagtgttgggattacaggcgtgagccactgtgccaggccaatgtcaggcatttagtagctgcctcacagatgtgagaaaaatcctgtgtaggtcatccagaaaattagaggaagaaataggcttagaacttttctctcatgactcccagtgcagagcttgttccacattacatgggcctactttcatgggagtttccagaggtgtctggacacaggggtccttcttaactctgggaaattgtaggttattttatgagagcctttttccccccacccttgagacagagtttccttctgttgctcaggctggagtgcagtggtgcagtcatagctcactgcagcctcaaactcctgggctcaagcaatcctcccacctcagcctcccaagtagctgggactagaagtgcataccaccacacctggctaattttctttatttttttttcgagacaggtcttgccgtgttgcccaggctggtctcaaactcctggcatcaagcacaatcctcctgccttagcctcccaaagcgctgggattataggcatgagccaccatgcccagcccctatgacagcttgtttgcccaacagctactgagctcagataatgggcatcatagctctgtgggctttgcagtgcaggcctcagaatttaggagactgagcctcaatagttattgataatactaataccatacaccactgaacctaagaagccattgattagaagatgtagtgttattttatatacagctaagaaagaggccaggagtggtggctcacgcctgtaatccctgcactttgggaggctgaggccagcggatcacttgaggtcaggagtttgcgaccagcctagccaacataacgaaaccccatctctactaaaaatacaaaaattagctgggtgtggtggcgaggcctgtaatcccagctacttgggaggctgaggcagaagaatcacttgaacccagaagtcggaggttgcagtgagctgagatcatgacgctgcactccagcctgggtgacagagtgagactccatctcaaaaaaaaaaaaaaaaaaaaaatggccgggcagtggcacacgcctgtaaacccagc

SEQ ID NO: 76724 - DNA, 1508 bp, Homo sapiens
gtctttatcagctaccggcactgcatgcaggggctggaggattcagatgggcctgacttcatagactggctgagtaactcgggttcacagcgtggactctgcctccagcccccagctggctcagggccccagacgattttcacacctgcgttttcatggaaccagcccagtgagcacgtgaggctttgagccacccgcccactcacctctgggctgcctcttacttcaggcccctgccacagcaggaggaagctgagtctttcttctgcagttccaactggcagcagggagggtgtgctttgctaattgacctcctgcagccttttctaacccaggtggggccctagtgaggtagcgtcttgctcacttacattgttgcacatattaattgaagtgttgaatttagttgctctttaatgctagccacatccatccagttcacatctgacctagcaggcagggccgtctgaccccacgtcttgccgtgagatctgctgggacgcgcagctgcaggtttgggtgtggcgctgagcagctgactgtcttctgagcaccttctcatatctctgtggcatctcagaatctctggacatctggtgaatggccttctcacccaccactcccctcgtgtgtagtagccttttcttctgagtggagagccttattttcttaacacgtggagtgtctatttggagggtccatgatcatcccgttgctgtgaccagcccaggaatgtgaccagggcaggacagggagactccttggtgttgtgcagagtccccaggtgggtggcagctggagagcccccggcgtaccttgagttcgcaggttggagcctgctgaagctctgcccgacagaatgcgtgtggagggaggcccagacccagctggggccctggttatctccagtgtatatttgctaaaaccaaatttcagaactgtcaaagactggagtttgttcttctgtgatcagattgaagtaggaccttgtggctggaggtgtgccagggtcagagagaaaatggagagtatgggctcagggcacgcctggatgctcattaggggtactcaggccagcttcatgtgttccatggcaagtgatggctgtgtgtgtgtgtgtttggaggtggggctggtgactgtctctgtgcttttctagaatatcgtgtttattcctagatgccccaacctcatcttcacgccctacagtggcattgagcctggttctgatcattgctggtcatgtgaatattaagtgccatagtgtctaaggaacaagctgccttctcgagcccaggccccagcaataactgttcctctcagttccctaatttagagaccacgtgtgtgccccagggttgtcagcagctcggttttttgaagcttgaaacacatttccatagaaacaatgctataaatggtggttgggtacctaggctagcccacaaagagccctggtgtcacctcagaagttgctgaaataaggtattagtgaaattgagagccca

SEQ ID NO: 76725 - DNA, 1056 bp, Homo sapiens
actgtgtgcttggtgagctggctgtctgcatgacatccccagcctcccttagtgcttgctggtggggctgccaccttggtgtctctgctatttgcttgggcctgtcagcaagaccctggtgagagtaggaaggggatttgggggtataaaacctgtatcggggccccactcaccctgaggaagcctttgaggggacactgaggagatgtctgtggtgaggagctggtttagaggtggcagaagcatctcttcctactggccctccttgaagaaggataaatattaataccagctgccattagaggatcctttcgtttctcatgctcagcactgtcttttggcttcacacagagacagagctggggaaagcaagtctgcagaccatagtagcagagactggggctctttaaaatgaaagtcctgtcccacctggtcatgaggcagtcaggacaggctgtggcacttcctgttcctgcgaggaagaatgcatcctcctgacagtaattgcagggtgcagtgggagccccaaagcagggattgcagtctccgtttgtctatgaaatgaggggattagactacaggggtacctttcctgttcgaaaattcctgtgaatggagcctggcaggcggtgtctttatggtgcctcatagtgggacccagggttgtcactcagaggcttcctgtcattatcccaggtctgcgtgccactcagagagacctgtggaggagtggctttctcgccatggctgattagttggacttgcttttcttttttctttttttttttttttttgagattcagtctcaccctgtcacctaggctggagtgcagtggtgtgatatcagctcactgcagcctctgcctcccaggttcaagtgattgtcctgcttcagcctcctaagtagctgggactacaggcgcccaccaccatgcccagctcatttttgtatttcagtagagacagggttttaccatattggccaggctggtctcgaactcgtgacctcaagtgatccacccgcctcagcctcccaaagtgctgagattacaggcg

SEQ ID NO: 76726 - DNA, 1115 bp, Homo sapiens
ctcggcctcccaaagtgcaggggttacaggcgtgagcctgaggctgatgttacggttctgaagagcaaggctctggaggctgcagcctccccagcagagtggaactctgcctcctctcaggactcacaaccacaggtgcctgaaaccaggggagggctgcatatgccaggtggacaggtgtctctcatagagcttggagcccattctagccttcaaactgggatgatggggctgttctggatgtgggaagaggagacagggcatccctcttgggccactgaaaacatccacatcttttttttttttttttttgtaatttaaacagagatggggttttgccatgttgcccaggctggtcttgaattcccgggcttaagccagcctcccaccctggcctcccaaaatgttgggatgacaggcatgagccaccatacctggccaacatccacatcttgagcttaatctgtttggacatccttctgaatccttagcctcccgctgagctttaggaatgttatgtgcccagaagatctgagtgtttcattagtaattggaattctcctctggaatctgaccatcccagtggaaaagggagatcatcccggcatctggatcctccctgcacatttgattccacttggaaaactttggtgctgcctttcgaggacagaggccgagggttggctctctccaacaggcagttacagcttgaattctgcttcttccccaaggttgggtgagactcttggggccacagggtgtttgcgaggtgccactttgcttttcagactagaagttggagttctggtttcaggcttggtttgtggaacagttgaggcgcctggtgtctaagctgcccaggtgatctctccagttctaaagatgtcaccctggttgagatgttctaccctatctcctttctgagagcgctaaaggagctacagctttgtttgcctggggctgtcagcatcacctgtcacatcctgcccagtttcctcatccagaaaaaacaagaggtgtcagataaggtgagctccagctcccgtcttgccctcagatcttctgggtataactctttgaagcaagggcaccttgactggaatcttggtcattca

SEQ ID NO: 76727 - DNA, 1023 bp, Homo sapiens
agctgggactacaggcacccgccaccacacccggctaattttttaattgttttatttttagtagacacagggtttcaccatgttggccaggctggtctcgaactcctaacctcaagtactccacctgcctcagcctcccaaagagctgggattacaggcatgcgccaaccatgcccggctatttcttcttgttctattttgtttttttgtttgtttgttttccttttcctcctacctccctaacttcctccttcctcctgtcttcctttgtcttctgtcttctgctaagcttgaccatttgaatttgcataagttaaatgaacatgtgaacagattccattgtcctgtgtctcatgagaaggtcatgggtgctgtaagttaggaaatcatcatatgagattaagcatgaaaggctcttagactaaatgggcagagtgcgatggagaggagatccatggagtaggttttaaactgcagttatatcatccaggattgcagatgaaaaacttgtgcttgggttgacccagccctggtgtggggctgggagagggcagtgcccatgtgcagcagacactttacagtaagggcctagccctccatgtcccctcctcagcctccccattgcaggccactataagaagcttgcaaggaatcgaccagcaagatgtgtctgcttcctctgtggcctccccatagcacatgctctggaacaacttagaagccaatagccactcggtgaccccctcttccacttgcactagaggtggtggaaaggctcaacaagatttcttctaccatctctccaaggaggctgtgctgacacgtggcatttaggatctgacttctccagttatggaggaaaagaaaagtagctgtaaccacaacagtcgtgaccttccccatcacgttttttttttttttgagacagagtctcgctctgtcgcccaggctggagtgcagtggcgcaatctcagctcactgcaacctccgcctcccaggttcaagtgattctcctgttctcct

SEQ ID NO: 76728 - DNA, 1045 bp, Homo sapiens
acctcccatgcttccccagaggactggaatgcctctttcctctcatccgcttggctcagtcctgctccccttccagtcctgtttgtgtcctcctccttgagaatttctccctgtcccaccctgtgggcctcccccgggactccagcaacatcaccctgggccctgtgctgaggaaaaccttgagtcctggtctaagaattttcactttctcttttgggccatgactttgatcatatcccctgttcagcaaattaaatgagcctttgggtgaataaatactacaattcttcaactaaactggaagccctgttttatatatctttgtatccccaggtctggtgccccactcatagcaagtctcaataaatgttttgtgatgctgatacaaagagcagtggccatcagatttcgtccacttggacacccaagccaagcaccaaaggccgtggttcctggtctcaattctgagcattaagccaagcctgcctcctctgcctgttagctgccctcaggctcctcctggctttgcacctcattgttttgctccatttccagcatctctttcctgactgtcagtatcttcccagctttggccctggctccttttgtcccagtcagcctgccctgtgatgccctacacctctgctctggctctgaggtgagatagtttgttacttgggttggcctgaccttctgaggaaccaatctgatagaaggaggtaggaccaacttgcaggcaagacttgtgaagacagccaggtgcggtggcttatgccaataatcccagcactttgggaggctgaggcggaaggatcacttgagcctagaagttcaagaccagcctaggcaatgtggcaagaccccttctctgtaaaaaaatgcaaaaaattagtcaggcacggtggcacgtgcctgtagtcccagttacttgggaggctgaggtaggaggattgcatgccactgcactccagcttgggtgacagagattctctctctctcttcatatatctatatatatatatagactgtgaggagggcaaagtga

SEQ ID NO: 76729 - DNA, 1011 bp, Homo sapiens
actactgtcatgtggactctttgaaatgttttgcttttaaaaataagtcttcatgttggaaggttgcaaacccttaacatcgtcccaacactgctttccaaagtggagaaatggaggcccgaggggtgaagtgactatgcaagtccacacagttggtttagtagcaggactgggcctcgtgtcgcagttctcaatgttgcctcattgctgtgctgccagcagccagctcaggaacaggcccagccctccagccccacagccacctccttctcaaagcaggtcttgacaggaacccaaagctgctctggaatactggcctgtggctgctgctgctgctttcctcacctttatcttctgggatgggaagtcctgagtggctttctctctgccttctagctcctccctggagacaggaagaaaaaaaaaaagaacaaggctgacaacaacccctgcactgggagcgctctccttcctgatggtgctgggcctgggaggacctcgcctaatagactctgacctctgctaggctccactcagcctcctctcagagctgctcacctcctgccctcacctttgacttgctccagatcctacaaaccagagttcctggtcctgccttcctgccctagttcccggtcccatgctttggttacatcctgacatgggctgtgtgtgcccagcaccggaactgcctgtctccttgcctggccagcccgatctggagccagccactcctcaggaagttccggaaacagggctcataccctaccttccctggcatcctcagcaccccacaggcctggccctgcaaaccctcgttgaaaggaggaatgacctgttctgtgtgagtgctgcccatgcctcatcatgacaaattagagcaaagggaggtggaggtgctgagagggcatttctaccaaactatgagcgacttctcttatacactacctggggggatgtctgtcttgtgttgagaccagttatttagatctgaaatcaaaatgtcataaa

SEQ ID NO: 76730 - DNA, 1024 bp, Homo sapiens
tgtgaactcactggtcaaggctgcaagatttgctctttgggtcaaggcagtaggggcggccacaaggaaccaatctcagttaagttattaatgcactttgcccagactagtaactctcccctgacgttccgcatttcccttgcttctcccggaaacgtggggcgcccaggaatcctaaacttccaatccctaagcttccaaaccccgcccctgggaggggagggggcgcggagccgggcctagtcgcgcgcctgcgtactgcggtcagagggccgaggcctgggggcgagctggggtcgtgcagtacagcctctttccggcaaatcacgcgagatttcgttcacccgggctccacagggtcagtgacgcgcgagcggctcccgcgactgtggctcccgaagctgcttcgggccccagcggtgaggaagaagactctcaaccagggtgacttctaggcgtcctcccggagctaccggggacactggcgttattgcccgcaacactgagatagggaatgctcgagaaacagaagcaggttttggggttttttttgaattactgggggaaagcaacctgaggttttgacgtaattgtgtttgaggtgcctctgaaactttcatttaacacagatttgttgagcacgtaccatgcgccgggcataggggattggactcacatttttttgtgtgtgtgacggagtctcgctctgtctgtcgcccaggttggagtgcagtggcgcgatctcggctcactgcagcctccatctctcgggttcaagcgattctcctgcctcagcctcccgagtagctgggattactactgcgcccggataattttttgtatttttggtagagacgagatttcaccgtgttagccaggatggtcttgatctcctgacctcgtgatctgcctgcctcggcctctcagagtgctgggattacaggcgtgagccatcgcgcccggcctggattcacatcattgaacaaagcagacgagtccttatcctcttagcgctgacgagctg

SEQ ID NO: 76731 - DNA, 1051 bp, Homo sapiens
tggtggcaggcgcctgtcgtcccatctactcgggaggctgaggcaggagaatggcgtgaacccaggaggcagagcttgcagtcagcagagatcacaccactgcactccagactgggcaacagagcgagactccgtctttaaaataaataaataaataaacaaacattttgccccacttaatcttcaatgaacttgttcctattagttaaaaattctaactagatttagtctttcttcatatatttgctttaggaggcaaactctgacaggcgagtttatctttttggatcctaaatgtgatttttctccctcttcattgggaaacacaaatggacttcttttttatttttaaattgttgaatacttcaaatcttgtgatttaaaaatttttttatttataggagtattttatacagaaatcttgtgaaaccactgcccaaccagagcaatgattgttcaaagagtggtattgaattctcgacctggtatgtatttgcgatgaatgaacaactctgatctttgataagtattaatgcaaatggaggaataaaaactaatgtgatgttcatgtggtaaattaaggtagtaagatattgacactagtaaagatattagaagaaactctttaaacgatgtaataattttcaagtgttagcttatcaagaccatttttaaacagtgtgctagtttttcaagtgataacttatccaggcatttgttgatgaaataaggtattttggaatcataatgtctgaaaggttacattacaaatatatgtggcttttgtttctttagagtatgttattattggtccttaaaatttgcttttcttttttatgtgaaatgtactaacatatcagtgctgacatgtaaactgcatcataaaaacagatatggaaagaacctgagagatttgggtcactgctgcccacttgaggaagtcacttaacttttctgaactcaattttagtaaaatgagcagttagattaagatctttatgtactattcccaccttataaatttaacaattctatgaagagtaaatttgca

SEQ ID NO: 76732 - DNA, 1784 bp, Homo sapiens
ttaggtatattaaatgcattttttgcttaggatattttcaactaatgatggttttattgggacatatccctatcataagttgaggaacataagtctacctttgttcaattttaataatttttttttaggatgacattgtctgccctcagttcttttagtttcaaattacttttcattaaaagcagcgtaatctaaccttaattgtaatgaacactgtcatatacctgtaatatcttgtatactggtacatttttacatttaaatgtgacaatataaagccatttaatcttcaaatttcccccctagattggccatttcttaggttgttccagagtggtgggaatttgtggaacacatgagaaatgcatcctcttgacctcagaactgggctttgatgctgcaattaattataaaaaagacaatgtggcagaacagctccgtgaatcatgcccagctggagtggatgtttattttgacaatgttggtggtaacatcagtgatacagtgataagtcaggttgtttgctgatttctataacaaatttgaatactgcactttatatgttgtgatatctttttacctaatactgagaaaaaaatttataaaattggagggattattgtgacttaatgtgatgatcagtattgtatttaagtgatacaaaagagcttgctgatacctacttccatttacttgcagatttgtactatgaacttcaatttcagttatttgctaccaatattatatttttcacttttggtttatttttgtgaaaaattacagttgcattgttgaaatgctgaagcactgatccctaactcaccactgaccaactcacagccatggccccagacctatgggtttcataggctgcatgtatttatgcatatttactaacaatattataaaatatcaacatgaggtattaacactacatagtcctttgctgcatctaaaattatttgcagttgagattattaaattgtttaaatccaaaaaaatacagttctaccactaataagtagcaacaacaactaatgtaattcttttgctgattaccaaccatttatttgccttggtgttcctttggaatgtaattatttctagctagttaaaattcttaaatacctctaacaggtaaattaaaaaaaaaatcgaactagttgacagaaaggattaaatagtcaaggaggcttccattatggcagccataaaatcagtaaacataggaaagggatattttatcattatttttctctgtgcagatgaatgagaacagccacatcatcctgtgtggtcaaatttctcagtacaacaaagatgtgccttatcctcccccgctatcccctgctatagaggcaatccagaaagaaagaaacatcacaaggtgtgttcttcctctttgcccttattaccaggttcatggggttttaaatatcatagatgtgtatgaaatctattgttcttcatagacactttttctttattaaataaaactttaggtcgggcatagtggcttatgcctgtaatcctagcactttgggatgccgagacgggtggattgcttgaggccaggagttcaaaactagcctggccaacatggtgaaaccccttctctactaaaaatacaaaaaaattagccgggtgtagtgatgggcgcctgtaatcccagctacttgggaggctgaggcaggagaatcacttgaacctgggaggtggaggttgcagtgagccaaaatcatgccactgcactccatccagcctgggcaatgaaaacgaaactc

SEQ ID NO: 76733 - DNA, 1770 bp, Homo sapiens
tgtagtgtcattcattcattatacaaatatttagtacctaccagttgcttactgggaagcttgtatggaagccctttaagctcatagtaaacacattagaagtgggaagtgaccgttaatgggcacagggtttccttgtgaggtgatgaaatattgtaaaattgatcgtggttctgcttgtacaactctgaatgaactaaagatattttaattgtactctttaaatgagtcaatagtatggtatgtgaacgatatcttagtgaaactaatttttaaaaaagatttacattgcagttttggaaatctgttgagtaaggaattgggaataggaatgtttaattgtgtatttgccgttacacctatagctaatgtacatagtacgttgctctgttaaagatgagatccccacagtacacttgataagatactgagtgctctagtacaaattcttttgagttcagttgcatatcttaatgcatcctgctattttttattttattcataccgtacacatacaaatcataaacttggacacaaaaattgtatggtagtacttagttataatatgaatacccagtgcttgagaaaatgctcgtgttaatttttaaagattattgaagtgaaaacactgaaataaaaagatgtcatagataacataaaaaggacagtaaatagttgtctggttcctcagagattttacaatcctggaatctcaaagttggaggaaccttaaggatgacttaaacaacaaacatctgataatttcttggcttgttaagacaagctggaattggggaagaggaattcttgttttttttgagacagcctccatttgttacccaggctggagtgcagtggcgtgatcactgttcagtgcagcctcgatctcctgggctaaagcaatcctcctactcagcctccctagtagctaggaccacaggcatgtgccaccatgtgatgctaattgaaaaatttttttttgtagaaatagagtctcactggctgagatcgcgccactgcactccagcctgcgtgacagagcgagactcagtctcaaaaaaaaaaaaaaaaaaaaaagaaatagggtctcactgtgttgcctaggctgagaaaaggaattcttaggccatggagattcagggtcaaacctagagagatgtaatcactattcacgccaatgatttctgcatacttctggtgtgggtgggagtcctggctttgcaacttaataacttggtaattaagtaatatactgagccttggttccttcctctctaaatagagggatggataaaccatatgaaactgttgcagtgcttgaataagaaaaatatgtgtggaagaaaagtcagggatttatgatactttatgtgggaaacttggaaggagcatttccatttatatcttgtaaatggttagttttttttttttttttctcgacacagagtcttgctctgtcgcccgggctggagtacagtggagcgatctcggctcactgcaatctccatctcctaggtccaagcgattcccctacctcagcctcctgagtagctgggtctgcaggcacatgccaccacacctagctaattttttgtattttagttgagacggagttgcaccatgttggccaggatggtctcaatctcctgaccttgtgttccgcctgcctcggcctcccaaaatgctgggattacaggcgtgagccactgctcccggcctaaatggttacttttttacaatgaaaaatgaggatttcaggtagcttagaaa

SEQ ID NO: 76734 - DNA, 1041 bp, Homo sapiens
ctatcaaagtgctgggattacagttgtaagccaccacacccaacccttcacagcatattttgaagtgacagtgccatatttaatcaaccattccctaattgggggtgtgtgtgtgtgtatacattgcttccagttgtttattacataggataagacggacatctttggacatagctctatccatatttaagatagttttttagattattagaggttgaaatactgcatcaaagcgtagtatttttatgggttttgatgcctgttgagcttgttgtattttaaaagaagtgtttcggtttgaattctttatttgcttgcttgttgtgattttttttgtatatgtaaagaagtgtctttatgtacctgtgttttcccactgctcttaatgccccctctctcttttttacccctattctaggttacattgattacccacctagtacaacatcttacgggaagagcatagtatttcctagaggaatatgaacataacaggaaggtatcattggctctgaattaaatttgaacttgtcccctgaatagctacaggttttggaagctgaatcaatgttatcagatgagttagaatccaaaccagaggtgagcccagtcagcttgtttccttttcttttggtgggctatatttcaaagtttatcttcagtttagggggtcagcaaactttttctttaatgggccagataataaatattttaggttttttaagctatatggttttgattgttactattttttcaaagatttaaaaattatattttttgtgattgtttttatatctgtttttcagtatatgtgaaatcatacatttagataatgtaataaaatcttataaataaaaatatatgtttatgtataaatatatacataaatatgagatacatgtgatgtataggtgtataagtatataaatatttactactacaaattcttttgtttattttatatatatctgtaagtattttctttctaaatgtgattggggatttaaacattttttgttgttcacttttcttactttaaat

SEQ ID NO: 76735 - DNA, 1123 bp, Homo sapiens
ttctagcttgttgcaagatctacagccaagtgatagcacttcttttattcttcttaacctaacaagagcaggtattctttccttttttttgggctctgcttatgcctaagaaaaaaattaggggtggggcatatttaacttagtcatacttaaaatagaaagaacctttattattttattattttggagaattggtgtgtctggtgaccatttgaatatgtagagggagagggaggactctagtatgactcatatcttgtttgggaaattatgtagtgccatttactgagatcgcacaggaagagcaaggcttgggggaggatgattagttccaatttgcacctatttatgttgagattttggaggtatattcaggaggacatgtcctttagagagttagaaacatgaatccagagttctagaaaggtctgttttggtgcttatcagcattcaggaaacgtatgaaacaatgaacatggattctagagaagtctcaagcataaacagaaaagaaggcaagtctgggaccctgggaaaaaacatttaagaggacaacagaacaggaaggagcagctggaaggggatgaagagaactgggagagagtggtagcagggaagccaagggaggaagaagttttaaggcagaaaagatactaaatcatgccaaatactacatgatgggcttattagtgagaagaagtgtgtgtctggtgaccctagcaagagcaattgttactgtggtagctgaggtagaggccagggttaaagagatggggagtggatgggaggtaagacaatagatacacaagttagaaggtacacttgttcaagaagcttgactttaaaggaacagggaagaaggtaaatagctagagaagtacttggggttttctaattctttttaaaaataagggtgagagacttgagttaggacatatttaaagacataaggaaatgctggccgatagagaggaactagttgcagataggagagaggagataacacaagtatatatggggggataattgaagaatgagaatgaaatacagtaggtggggattagtctggttgaccaagaaagacagctttgccttgaaaccagaggaggcaaggtaatgacaa

SEQ ID NO: 76736 - DNA, 1039 bp, Homo sapiens
atctcactttgtcacccagggtggagtacagtggcgccatcatagctcactgcagcctcgaactcctgtgctcaagtcatcttcctacctcagcctcacttgggattacaggcttgcaccaccacacctggctaattaaaaaaacattttttaaagacagggtctcgctatgttgcccaagctgatctcaaactcctgggctcaagtaatcttcctgcctcagcctccagagtagctgggattacaggcgtgagccaccacccagctatagttttaacaaagtcttcagttgattctgatatatccagtttttggacttactgtttgccttgagagtcaataggggctttgacttgtcatctctagcaaagagtgttttcagatatttttccttatgtgattatttttgcagaaatgaccgctccttcatctgtcctgcagaaggttgtgggaaaagcttctatgtgctgcagaggctgaaggtgcacatgaggacccacaatggagagaagccctttatgtgccatgagtctggctgtggtaagcagtttactacagctggaaacctgaagaaccaccggcgcatccacacaggtgtgtgcagcaccaacattcctttgggcagtctgctccttggctctgcatgtttgcctctccttaggaaagactcaagtgggaatagaaatgaaggtctggggttgttgctagaactctgaagatgggatttctttttcaaatgacttgttgcacttataataacatttattgtatttttacctgtgtgtgtagagtagacagtgttgatttctgttttcaggagcctaacctgcagggagagctgtaagaccttctcagacaacaatgatgtggggagatgtggacaaaatcagtctgtgttcaaatctttctgaacactgcgcagttatgattttgggcagtaacatttactgagtcacacaaaccatacagaacctgttctaggcactaaatggggcagggtgggaaaaaaatacaaaagataagatataatccctgactt

SEQ ID NO: 76737 - DNA, 1074 bp, Homo sapiens
ctctgttgtccaggcgagagtgcagtggcgtgatcttggctcactgcagcctccgcctcctgggttcaagcaattctcccgtctcagccacccgagtagctggtattacaggcgcgtgccaccacgcccgactaatttttgtatttttactagagacggtttcaccatgtggccaggctggtcttgaactcctgacctcaagtgctctgcctgccttggcctcccgaagtgctgggattacaggcacgtgccaccacacccagccaacctttcaccttttgatttcattcctaaatgatacctgaatctcttatttcataaaggattgtaaaatggtggtttttcttattcctttactcctttcacattagttggaattcttctgtactgtgcgactctttagttggactcttccactaatatcaagtagggctatttgatcatttgcataggcaagacaggataaatatgtaattcttttaattgtgaattttgagaataaggaattgatgctctagttacttctagtatttcatgtttgatgctatttcaaatgaaatgttttcttgattttatttttgagttgttcattggtagtatatagaaatacaattgaattttgtacattgatcttgcaaccttggtaaatgcttgagttttagtagtttcttttttttttttcttccagctttttagttcaggggtacatgtgtaggatgtgcaggtttgttacctaggtaaaggtgtcccatggtggtttactgcacagatcatcccatcacctagatattaagcccagcatccattagctattcatcctgatgttctccccctcctcctacaccccatttttttttttcttttctgtttatttttttagagacaaagtctcactctattgcccaggctagagtgcagtggcaccatcatagctcactgaagcctttgaactcctgggaacaagtgatcttcccacctcagcctccccagtagctgggactgaggcagaaatttaaaaataaatatgcattcattcactccaagaaaagtaacaggcaaggcaagggttaaaaa

SEQ ID NO: 76738 - DNA, 1772 bp, Homo sapiens
ctacaatttttctagatctggtcagattcccccaaagaggtttttgtattttgcattcccagcaaaatacaatcagcaatgatgattgctgtaccatgtgtttgtcaattgtgaatttgttcctagcatttagaaattgggagattctacttaaaaatccttatttccagtgtcttaaaaaaaaatcagagaatctgccttaatctacccatggcaacagttggctagagctgaataacagctgccccttttctaggtactctctaggttactgcagcccccacttggccattttacttacttttgctacctatcagtctcctatagacatgagtttttgacccctgctctaagtatggttttctgggtaggtagaatggagacggagagtttgggacttgaagacatagaggacaatttagattattatgttgtaagagccaccagtgtgaatgttgatgaccctaaagagggtggcagggaatatgacaaggggatattaggaacacaggattgaaatccttgaggaaagcacatgtcctagaggtccatggaagactaactgaaaaagaaggcatattttttgtggttgccatggtcctataccaaagaggttttgtgaaggcagcattacagaaggtctggaaaggaccagcagctgggagcagggagtgtgctaaagccctcctggtgtactcttcctgccttcccccatatactgaagtttgagaggctgggaaggtgcggaatgggaaaaggagcagctgcttatgttcagtttaacattctctgggtttctccatctaggtcttgagttcattctcttcctgtccttttggcttccttgtttaacctggtccctgtttcaggagagaagcctcatcagtgccaagtctgtgggaagaccttctctcagagtggaagcaggaatgtgcatatgagaaagcatcacctgcagctgggagcagctgggagtcaagagcaggagcaaactggtgaggagggtgggcatagtggaacgctgtactacttctagggttccaagagccaaatcactgtcctgcctgcttatctggaaattttctgattctgttttgggtagatagacctggtctcatttgatgggctgatggtttccaaacatagctatacagtagaatcatctgcaaccttttaaaatttatatactttttgttgcttgtccgcccaccaataaaacaaagcaatctgataaatgagataatttgcaagatcctagaatctgtagttttaaaagtttccctagtgagtttgatggtaactagtgctgatccatgaacaagcatttgagtaacacagtgataaaagatttccacatgggaagagtttaagctttttaatttttttagatggagtcttgctttgtcacccaggctggagtgcagtggcgccatctcgactcactgcaacctctgcctcctgggttcaagcagttttcctgcctcagcctcttgagtagctgggattataggcaggtgccaccacacctggctgatttttatatttttgtagagacggggtttcaccatgttggccaggctggaagcatattttatttaccagtcatgactacctttttgccctgcctgaaatttgataactctttttaattcttattccttcgccatatctttccttaattattccaaatattcctttctaaagatccacctatcctgtttcatatgctaattcttcagacgctgaacacaagcaaggatcattatcttcta

SEQ ID NO: 76739 - DNA, 1803 bp, Homo sapiens
acgcatctgagaaaatggcaataaaaacagatacttctgaatttttccacaaagatagtttttttaaaaaagcttgagaaaggtgctttagttagagcaggcactcttgctatcagtcatcctgtctccacagctactgagaaaatatccactcatcatcattatgatttgagatggggtcttgctctgtcacccaggctggagtgcagtagtgtaatcatagctcaatgtaaccttgaactcctacgctcaaggcatcctcccacctcagcctcctgaatagctaggactataggcatgtaccaccagtccagctaactttttgtggtttttttggtagaaatgaggtctgtgttgcccaggctggtcttgaacgcctggcttcaagcgatcctcctgccttggcccctcaaagtgctgggattacaagcatgaaccactgcaccgagccagaatatccaattattattggtgagaagaaaattattccaaagttcacctactagtagaaaatcttggttgtctgggaaattttaagtttacttaaaatgaacctcatgctcacataaacacacaggcacattctaaacagataacgggagagaattgttttaaattcttaatttgttaatgacatgcataatcacatagtacatagactgtgttcatggcaattacttgtattcttagaatgccagtttttgcttcatgcagccatttatattagagcagtggttctcagccaggcacatttttgccccctggggatatgcaatatctggagacatttttggttgtcacagctggggagaggggtactactggcatctagcaggtagtggccagggatgctactaaacattctacaatgtacaggacagttcccttccccaaccctcaacaaagaattaggtggcccaaaatattaatagcactgaggataagaaatcctgtactagaagttgtaagtttttcatcccccatgggctagatctgatatgcagatgtattttattttgcccatacaatatttctaagtaatttttaaattagttgatagcatacaaatttctggcttgatgaaaatgtagttgatgtagtaactctgagcctatattccagcaggatttgatactttccagtgtctactatctcctactgtctacacccactccatggacgcatttatgtttctgcactagccccttataggcatttgggcctgtgctctcttttctgtacctaattctctaagtgtgaggcacaaagcaggaacccttaactttaggctaccatccctccacctgagcctccccactttgatttccttgaactattctctgttatctgctgctctttttttttctcagacagagttttgctctgctgcccaggctggagtgctgtggagtgatctcagctcattacaacctctgcctcttgggttcaagtgattctcctgcctcagcttcccaagtagctaggattacaggcacgtgtcatcacgcccagctaatttttgtatttttagtagaggtggagttttgccgtgttggctggactggtctcaaactcctgacctcagatgatctgcctgcctcagcctcccaaagtgttgggattacaggcgtgagccactgcgcctggcctgttaatctgctactcttcatttgtccatcctctaacagtagccatgactcaaaacccaagttttccctgccttgactcaaacccaagttagctgcttaatatttttcaaaagcagtaattttaagtgtagtgattaagcaagtgatacgagat

SEQ ID NO: 76740 - DNA, 1005 bp, Homo sapiens
taccttggcaacttgttcaaagagatagggccttgtttgtattcgctgcttcatttcctccagttctttcttatattctttcgctcttttacggtcattgttcctggaattagcaagacttttagaaagaatttcatcttttctaatccagaatacccttcatttccagtaaagcagtgtaactctcgtgtacactgtaaattcctatctgacttggaaaatcatgaccctgctgtgattacaggagcctacctacctcgataactctattttgcattttctggcaataggccagtggtctgttggatcccaaggcaagcaccccttttgacacatagaggacactgaccggttctctttcagctttgctttgaacacttcctccaggcttttatggggatccatggcttttgcacgcaaggtcacagatttggacattgcttgagacttctttttgtgtatctccagccactgaatactctcatctgctttgttctttttttcaagtgcacttctaaaggaaggaggcagaaaaagagtatagattaccaacctgggtatactgaaaagcaatcttaggccaggtgtggtggctcacacttgtagtcctagcactttgggaggccaaggcaggtggatcacctgaggtcaggagtccaagaccagcctggccaatacggtgaaaccccagctctactaaaaatacaaaaattagctgggcatggtggtgtgcacctgtaatcccaactactcgggaggctgaggcaagagaatcgcttgaacccgggaggcagaggttgcaataagccaagatcgcactgctgcactccagcctgggcgacagatcaaattccgtctcaaaaataataataataataaaataaaataaaatagccgggcatggtggctcatgcctgtaatcccagcactttgggaggccgaggcgggcggatcacaaggtcaggagatcgagactatcctggctaacactgtgaaaccccatct

SEQ ID NO: 76741 - DNA, 1192 bp, Homo sapiens
ggaagaccgtaaatgacaatctccgtacagtgatagaagtatgcataggatgctgtggaagcatacaggggggaaacacagagaaagactggaggagttaaaaagaggcgacgtcttctggatgctctgagatgttatcctaatgaaatagagacgggcattctaagcagaggagagtcatggaggtagaaggatactgtgtgatgagctatactgtggctggtgcgtggttattgagggtggggactagtgaaaggtgaagctcagaagtaggcaggggccagctcatgtacagtttggctagatcttaaaacctctggggagtgatgagaagttgctttgcacttgaggggcttatcacttgtcaagatcagtgtaggcaagttgggtagcattagcctaagctttggttacaaacaaggtttctttattgaatttttaattccctgctactcacatttcaccttgtttgtcttgtggctgatgctgctcagtggagtgatgctgaccacacggacttcatcgacacagctggtgccatgctgcagtatgctgtcagccttctgaagcccactaaggtctcggctcgccagctgcccccaagcgtagccagggtggatgccaaaagccgagttctgtttcctcttgggttgggacatgctgctgagtacgtcaggcctcgggtggcgctcattgggtaagacgataacagagcagggccactcccttctcactttgctgccagaggtcacacctgaactctgctttattcttagggatgcagcccacagagtccatccgcttgcaggacagggtgtcaacatgggctttggggatatctccagcttggcccatcacctcagtacggcagccttcaatgggaaggacttaggtaaggattcagatactatggggaagtatccagaggtcatatagttaggcaagatcagggcccacagtagcaagagggagtggacataaaatatatctggcttgctaggagatggaagaaaaccttattattggattagggatttaatctttcctctgcccttcaggttccgtgagccacctcacaggttatgaaacagaaagacagcgtcacaacactgctcttctggctgctacagacttactaaaaaggctctattctaccagtgcctccccgcttgtgttgctcaggacgtggggc

SEQ ID NO: 76742 - DNA, 1027 bp, Homo sapiens
tttaagcctaggagtttgaggctgcagtgggctatgatcacatcattgttactcagactgggtgacagagttaagaccagtctcttgaaaaaaaaaaatgaatagggatttctaatgatgaagatgtttaagctccttttgctgcttgactagtttcatccctgagaacttccatttaaagatatgttttttctgatgggtgcagtggctcacacctgtaatcccagcactttataggaggctggggagggaggattgcttgagcctaggagtttgaggctgcagtgagctatgatcacaccactgcactccagcccagtcaacagagtgagaccctgtctctaaaacgtgtgtatatgtatgtatatttttctttttttagctgaaataaaacaaggacacttgggaagaatacctacgtgattattatctacaataattattttcttcaccttactgtgttaagagtttcattcacttttattttttctccaggaacagattatggcctttgcaagcaaatgagtactcctctcctaaagaaagattacgttgatgaaaaagaacatcctgcccaggacccatcatacatattttcaagatcttatttaatttaataaacttactttacattaaaattctctttttcttctttgcttaatgggcctgtggcacccaaataatgaatgataatttgctgtgaggagcgtatattagccagaccaaaggaaaaaacttcgaaggaagacttacaatttggttgaaaagagctttttattactaaaaaacccacaaggtgctgtctcactcatttccagttaatcatttctaaagagaaaatttacattttgtttttgttttaatgttggtcataaatttatacagttgttttttgatagaggtaagaattagactcgatgcatttttgttagaattgctgtttaaatgttaacatcagaatgcaaattaaatataaattgctttaacctttgttacaggtatactggactttctgaaaggaaaacca

SEQ ID NO: 76743 - DNA, 1029 bp, Homo sapiens
gtaaaacacacatactgtccagcagactcctttggtcatcccaaatacctctgaactccagggaagatgcattctaactccacgaacttacctattttgttaaccttgattagaccttctggagaagtaaccaatttgtccatcttaggagcaatttggaatgagagtttttatttttttctgtaacgcccatcctgcctgcagtagaccctttgggcttaagaggtcctacagattctaatagtttcctctttgtagatgtgttaacatatttaaaatacttaggacatggcctggtacgtgacagatggtgtttaacatcattgtcatatgaagaacactctctgtgggccaatggaggtgtgccttaaaattcttcatcttgcctgattttgtttgcataacttctggagagtctgtgtcctcctcatctaggccacctttccattttttgtgaaagatgaccttgtccctgcagtctccgccaggagtcacacagcttttcacagcagctgccatctttaattctttttcctgagattccagcaaggttgtgacattgtcacttttttgttctagactcttttaaattttctgcatttgcctgaaaagcacccctgtaagaatagatttctcatggctctaaaaattattcccaagaataccttacttggttcaaaagcagactgtttctcttcatttcatctcaaatcagacttctgggcaagatgttctttagagtaagcaaacctacaacctaaaaatctcttcaagaggcatctctggtcttgtgacgagacctcttcaaaaacccacagtaaaactcccctccctccagttggccaccagtctgccaccaaacatgaacaaattctgctgctaatcggtttcccttgtgatctggttcctgaggtcttcggatctgtgcaatgaattatttattgttttattaaaccgacagtggtgtcccagagaggaaccataaataaaatggaaatctggtgctgtgataaagtaataactagcatt

SEQ ID NO: 76744 - DNA, 1036 bp, Homo sapiens
ggttttgctttccatgtataattcaacaacgcaaaatgggaccatgtcagaatctgtatgatcctattctgtgttagctccaatcagccagctgagagccatcctaaatattaataggatgagagagtaactcctaactgtgcataaattacagccttaagaaagaaggccacccggtctctggggacatgttttgggagggtgtggctgcctcatatagcctacctttgctttaatcagcattttatcagtcaactctgggattaatgaacatatccgactttatgggtatgtgtatattcagtgccagtaccacctcccaggctaatgtgttaacagtgttttctatgattctaaacttgttttctttgtatttctaagaaatacaactaggccctaacttttggtctgtggtcagaggtcagtgtctgtgctattccaggatctattatttcagtttgcccttttattctctccgtttgtaacagtaccttcctgtcctggtccctgatcactttagctaatatcctttgaattatttatctagttcagagtttccaataccgttcctgacaaaaccccacttggatttggttggctctctcagcccacatcagtacagtggaccaacatttccagggagaaccatatttaatgtccctcatgctctctttttgaatccaagtgctcagagctcttgactgtgaattatttaccccaaattcattatcttgcacttttttttgagatggagtcttgctctgttgctcaggctagagtggagtggcgcaatctcagctcactgcaacctccgcccccaggttcaagcgattcttgttctcagcctcctgaagagctgggattacaggtgcccaccaccattcctggctaatttttgtatttgtagtagagatggggtttcaccatgttggccaggctggtttccaactcctgatctcaattgatccacccgcttcccaaagtgctgggattacaggcatgagacaccgcgcctggccttatcttgcactttcaa

SEQ ID NO: 76745 - DNA, 1187 bp, Homo sapiens
cccaacactgacctctgcgcttattcactcatgcccctgccttagggccttcgctctaagctgtccccactgcctagaaattcttttcctatatatccacttgatgaattcctgcaactccttcaaatacttgtttaaaaatcactttcttattgagatctacttaatactataacctctcaccttcacatgctcccacctctacctgctttctcaactccccttactctgatccacttttcttttttccacaccacttatcacattctaacatactggaaagcttactgatatttattgtctgtgttcctctgatagaatataagctcctcaagagcagaaatctttttgtttactggtgtaacccaagaacctagaagagcgtccaaggtggaattcaataaaaactgacaatagaaatgggctagggtttctctcagccttagcgccattttcttggaaacctctgcatcatgagagctaagtggaggaaaaagcgaatgtgcagtctgaagcacaaaagaagaaagatgaggcagaggtccaagtaaaccgctagcttgttgcaccgtggaggccacacaggagcagaaacatggaatgccagatgctggggatgctggtacaagttgtgggactgcatgctattgtgtagagcttgtctcaatggatccagaacttcaccgccctctgatcgctgatcacctctgagacccaccttgctcataaccaaaactgcccatgttggtcctctgccctggacctgggacattctggactatttctgtgtttacttgtggccgagtataacaaccatacgataaatcatctcttctgctgtcttagctgaagaatcaaaaaaaaagaaaaagaaaaaaagaaaaaaaaaattggctgggcatggtgcctcatgcctgtaaatcccaacacttgggaggctaaggcaggaggatcactggagcccaggagtttgagaccagcctgggcaacacagcaaaaccctattaaaaaaaatttttttttaatgaaaaaattagccaggcatggcagtgcacacttgcagtcccagctacttgggaggctgaggcagaaggatcacttaagcccaggagttcgaagctgcagtgagctagaatcatgccactgcactccagcatgggtgacagagcaagaccctgtctcaaaaa

SEQ ID NO: 76746 - DNA, 1018 bp, Homo sapiens
acagagcaagaccttgtcaataaaattaaatttttttaaaaaccccaagtttttttggtatttagaaggaaagcattttaaagccacatttggtgggggaaagacaaatttgggaaaatgtaattatggggaacccctattccttcctttatacatgaaactatcattgtaatatttttatctttggcatgtttttcattttgatttaacatgtttgaagcagtagctatttttcagttgataacaagaaagggaaaatgtttttattctcttcccacagttaaaatccaatataaacggtgcccagtggcactgatcctagtggcagttactcttctgtaaatagtgcctcccacaatggatatgggtttggaggcagacagagcttatcacctcagattttcattctgatttttcattggggcaatatgaaccccctcctgaatgacagtatcttcttatctaaaggactttgattcttaatgaatgggcaagaaaagaccttctggtttgtgaagaaaaagaggcaacaatagcaacagctttcctccaagtgattattgtagcaaagtcaagcctgaaacaatggagaatgaagttatgcctgactcattttgttattacacccaaatgagttcattgtacagaatgggcctttttgacacgtgtctaatgatattttgatgcaaatgaaataatacacataaaaaatgacctgtttacaggaaagactgatgtatttgttgataactaccagtgacatcaattctcatttctttattggcagttacagtatttgaatttagggttagaccttaaaggatatatccagccaggcatggtggtataagcctataattccagctactcagaaggctgaggcaggaggatcactagaactcaggagtttgagaccagtctgggcacaagaagaccctgtcttaagaaagaaaaaataaaagtctaggccaggcgcagtggctcatgcctgtaatcccagcactttgggaggccgagg

SEQ ID NO: 76747 - DNA, 1037 bp, Homo sapiens
gccactgcactccagcctaagtgacagagcaagactccatctcaaacaaaaaagaaagaaatactagtttcagcataataatgatggctaaggtttgattgtttactatctgccaggtattatgttaaatgttttagatcaattatcttaggaacaatatatattggattctgattgcatttctcaattaggaaagtgagtagcactttataatacctccttcaaaagctaattaaaagaagaatcatgaaaccccagaaatatatgctaactttttttctgttttccttagggcatccaattctacactcagttaaagaccattacttctcagtggaaagaagaagatgctactctttcctcacctgctgttgtcatgcctaccatgggccgttagaaacaagtttgtttaagactgactccatcctgagtaatctccctttatttttgaccagcttcatttgtcagctttgctcagatcagatcgatgggattggaatacattgtaactaaaatcttcctcaggactattaacccccgcaaagtttctatagggaactgcctagtgtaacaatgaaaccagatttctcacttgctcttcatacttctattttgaggtaactgttgtaactatgaaatgcttatctgaaagtagtgcttaaacctgatttctaaaaattatcccattttctgatgatttgaaggggagaaaagccagtgtatgtaaagaaaatgttccagccaggcgcggtggctcacgcctgtaattccatcattttgggaggccacagtgggcagattgcttgagcccaggagttgaagaacgtggcgaaaccccgtatctattatttaaaaaaattgaaaaagtaaaaaaagaaaagggaaaaaaaattttttaaagaagatgttccaataattgcaagaagaactcttagatggggaaacaggacagaaataactcaccgcttttggttgatcctcaaacatagcgctacctaaatgccactgggagagacctcctgcaaagttttctttag

SEQ ID NO: 76748 - DNA, 1048 bp, Homo sapiens
acattgggttgtttccaagttttgggctactacaaataaagttcttatgaacattcatttttcaaatacctatatggacataattttaattgcatttggtaataaattttgatttatatttacattgattatatactctattacttatatttatatttacattgatttttttttttgagacaaggtctccctctctcttcctggctggagtgcagtggcataatcacggttcactgcagcctcaccctcccgggctgaagcaatcctcccaccttggcctccctagtagctgggaccacaggcatgtgccaccactgcctggctaattttttaattttttgtagacaaggttttgccatgttgcccagggtggtctcaaaactcctagactcaagtgatatacccgtctcagcttcccaaagtgctgagattacaggcgtgagtcaccatgcccagcacattgattttatatgatcttaaattcagtacctattgtgttagataccatgctaagtattttcatattgttagatttatggtacatttgccaggcccaaattaggaaaatataatgacaaaaagattttttttaatcagtactatcctggaaatataggacatgattattatggtttattgtttgttcatagtttgctgtgtcatagattcatatcttttctctttaatgactgtatggcctttgagagaaacataccccctatatactatagcaaatagcatatagtagctatttgctaaattttaaataactttctgctctcatttatcaaaataatcgttcttttgcctcacaggtttcttccaaggtgaaatccagtcccacctggtattcagcatcttccttctcttcttcagtggtgagtttatttggcatagaggttgacttctgagaaggaattcagtatagttttgggtatctctatcttctttacataattgtcatcagagtgtatgtgaaactttctagttttttcctccttttggattatttccctcctgaaatggattaccatgtcaaaagatacaa

SEQ ID NO: 76749 - DNA, 1052 bp, Homo sapiens
accccatctctactaaaaatacaaaaaactagccaggcatggtggcgggcgcctgtagtcccagttactcaagaggctgaggcaggagaaggtgtgaacccaggaggcggagcttgcggtgagccaagatcgcgcaactgcactccagcctgggcgacagagtgagactctgtctcaaaaaaagaaaaaaaaaaaaaacaataagaaaaaaaaattagccgggtgtggtggcatatgcctgtaatcccagctactcaggaggctgaggcaggagaatcgcctgaacccgggaggtggaggttgcagtgagccgagattgcgccattgtactccattgagtgcaggcaggtctcaaattcctgaacgcaagtgatcttcccacctcagcctcccaaagtgctgggattacaggcgtgagctactgtgcccagccacctttttttaacatgtgcccaagtaacatccaaatagagatgtggtaaagataattacgtgggtatcacctgaagaggaaaatactggccaaggactaaagagttgggcatcatcaggatctagatagttaagccatgagagttgataaaatcacccaaggagcatatacagaatgagaagaaaagaaggcctaggaccaagccttgggaaacttaaagagttaatggcagcctggtggggtggctcacccctgtaatcccagcactttgggaggccaagatggtcagatcacctgaggtcaggagttcgagaccaacctggccaacaaggtgaaacactgtctctactaaaaatacaaaaatgtggccaggtgcagtggctcacacctgtaatcccagcactttgggaggctgaggcaggcagatcacttgaggtcaggagtttgagaccagcctggccaacatgttgaaaccccatctctactaaaaatacaaaaaattagctggatgtggtggcacatgcctgtaatcccagctactcagaaagctgaggcaggagaatcacttgaacccgggaggtggaggttgcagtgagccaagattgcaccactgcactcc

SEQ ID NO: 76750 - DNA, 1848 bp, Homo sapiens
cgtggctatacttaggggcggggctaggcaaagattgccctatgaggcgagggaatgagactgggctgcgagttggggatagggtttctctttgggggcgtggcttatggaacctcgttttcccgccgacggttggccacgtcacgtgacatgggttggaagatggcgtctcccacagacggtaagagccggcttagagatctttgcctgcagcctccttctttgctctactgggaacatccactctgtctctgcccctcgaacatacatttctttcttgggctcttctcctttcccttttattttttttcttgagatccatcgccgtcttcagctcaccggttcttcacagcagctccggaggtgcccagtttccccgctctgtaccaggcgtgtggaggagggcactagggagggactcattctgggtaaaaggacaggggggtcgccctgtgccttccttatctctatttgggcgaggctgagggtcgaggaggagatgtttctggaggacgtggcttactgtagttttttccttggggtacccattgaaaggatcagttctcttctgattgagcgcacggatggaatgattctcacaaaccctcgcagggctgctggctgacctcatctcgatactgaaccgcaagagaaacatgatctctctcctgtctcctcagtttgggaccattgccgtggcagcaagagaagcgggggacgttctcggcccctcgccctgagagtcgcgaggagaatcagtattgagcttttaagtgtcgtcttgcacaggtcgcaacctgtcttccatctgctttacgtgttgtttcttaaggctgagtgaattaacgatttctgtttatatattgtgtaaaatgcaagtcatttcaagtaacaattaagttgttttggtatactcccatgcttttcctcttggttctgctttagagagttagggtcttgcagtcatttttaaactcatttttagttctaccatcctcatcccaactatatatcgattttattgatatataggtttccttcccttagacaaaaacattttatatttggaaggaatcttggaagttcattgcaggaatgaagaaattgaagccaaggtgagctatattaagtacctgctacatgaaaggcataatgctaggtgctttgggagaccaaaagatgactcaaacatataaacatttttttttttcagtttcagttctctttttagatgtcacctcccaaagagtctttcttagaacacagtatctggagttgccctttcccaccattattcattatctcagtatcttccttgtcagcatagttactctgttaactttgccccttttgcgctagattgtaaattccaagtttgtcttgttcatagttggatccaggtttagcacagtgcctgacgaacagtaggtctttaattaacatttattgaaagattgattagatatatgcagaaataatatattacttgatcttaagttttaagtttaaccgagtcttaaattttgtgagcgcaggtacatactgtattagaaattatggctgggcgtggtggttcacacttctaatcccagcactttgggaggctgaggcaggcagatcgcctgagctcaggaattgaagaccagcctagacaacatggtgaaaccccatctctacaaaaaaatacaaaaattatctgggtgtgatgccacaaacctgtagtcccagctacttgggggggctgaggcaagagaatctcttgagcccagggggtggaggcggcagtgaaccatgttcatgccactgcactccagtctgtgtgacaaagcgagaccccgtctcagaaaa

SEQ ID NO: 76751 - DNA, 1020 bp, Homo sapiens
taccatgcccaactaactgttttttttttttttttttttgagacagggtcttcctctgttgcccagtttggagtgcagtggtgtgatcatggctcatttcagcctcaacttcccgggctcaagccttccaagtagctaggactacaggggcacatcactacgcctggctaaattttgtattttttgtagagacggggtttcactatattgcccaggctggtctccaactcctgagctcgagtgattcacccgcttcagcctcccaaagtgctgggactacaggcatgagccactgcacccggcccgttttttaattttttgtagagtctggggtcttgccctgttgcccaggctgatcttcaagggatcctcctgccttgacttctcaaaatgcccagccctgatttttatttttctgcattttaatgtgattctttctgtgagaaatttaaataaataaaattggattgacagaacagcatctctaaaaaggcagtttaaactttctggtaagagatattgtatcttaccaccctcccaaccagctaactcctggtccttccaagttcagttgaggcattattttccttgagaagctttttatgccccctgggtctgacttagcttgccattttttgtcttgccatagtcctggcatctttctttgaggactgaaacagtgttatagttattggtttattctttctcttcttctaaactataagaaaacagacaaagctgttttcttattatttggatcttctatgcctgagcaatcatacttattgaataaataaagttttgtttttctttttagtaccaggtgttgctgaatttgcagcttccttcaaaagtgtaagtaatatcccttacctactgaggtcaatccaaagtttcgctcctgagtaaaagctcagatctctgttctttattttattttattttatttatggcagagtctcactcttcgcccaggctggagtgcagtggtacgatctcggctcactgcaacttccactt

SEQ ID NO: 76752 - DNA, 5401 bp, Homo sapiens
gaagaggtctcactatatttcccaggctggtcttgaactcctgggttcaagtgatcctcctgctccagcctcccatagcattaggattacaggtgtgagccaatgtatgtgtttttgtttttttgttttttttaatgtgaaaaaaatacctactttatagagttgatttggaggtaaatgacttgatgcatgtaaagtgttttgcttgtcacataataggttctgagtacattttaattaaaaaaagagaaagacgcaaagctgaaataatgtttctcaaccctaccttttgtgcatgacagaatcatcaacatgcagctatggagctcttgaaaaatgcactgtaacaaatgagcaccaagaaaaaaattaattaaatataaaaaaagaaaagcacatatgaggagtcccttgctctactttttccactggacccttccctacccctcatattctaaatcattatgtctggagtgtggccaaggcatttatagttttaaaagttacacaggtgattctcgtgtgcaactagcattaaactgccaacccagagctattctaagaatgggctttctttcatagttttaagttcactttcataaatgaaaaattgtaaaattctgaagtttcctaaaacctctacaataaaattgtgaaattccaagtgatgaccattccagacttctctcacttaaaatgatgattttctcattcttgattcttctttgaatctcccgtatgccagagaatgttacttactgattagtgtttcaaacagttgaattggaggctttcaccagaactgaatttcaagtaatttcattcattgctatactaacttgttaggcataaatcagtaatagtggtcatacctattcttccacagtgatttctctgagactgactttcaagatgagccatgttttttgcagtgactatttgtaggccatatctaaacctggagaaatccaggtttttgaaattataatctgccagtatttccaaacaacctgaaggctatgtgacaagctgcattttttctttttcttttttttttttttttttgagacagagtaatactcttacccaggctggagtacagtggcacaatcttggttcactgcaacctctgcctcccacattcaagaggttcaagcaattctcgtgcctcaccctcccaagtagctgagattacaggtgtgtgccatcacgcctggctaattttttttgtatttttagtagagatggggtttccccatgttggccaggcgggtctcgaactcctgactcctgacctcaagtaatccgcccaccttggcagccaccgcatccggcccaggctacacttcttataagaataatagggtctcctcacactttttatgtgtctgaatggatatattattttttgacagcctattactagttctccacccaaatggatggctgagatagaacgtgatgacatcgacatgttgaaaggtaagtgatgctagttaccacttttaactggatatttatgtttttccatagaccacctctctattttttttttctgtttccttacaagtatttttggcttcagacttctcatttaaacctccttatttgtagtttttcatgtctgcaatgcccttctctaccttttccatgtgtagaaatcctgccaattcaagactcagtcatagtgaattctgctgctggtgctaaattcttctaatgtgaacctgattttgtataatacagttaacgaatagctctaacataaattttttcatttaattcccataaaggtcctgtgagttgggtatgatgatattcaaagttcataagttaaccaagatagaatgagttaaaatttggctaggcgtggctcatgtctgtaatcttagcattttgggaggccgaggtgggtggatcactggaggtcaggagtttgagaccagactgaccaatataacgaaaccacgtctctactaaaaatacaaaaatcaaccaggcatggtggcaagctcctgtaatcccagctactctggaggctgagtcaggagaatcacttgaacctagaagacagaggttgtggcgaacaatagttccactgcactccagcctggctgacagagcaggactctatctcaaaaaaaaaaaaaagttaaaaaattttaactctggttttttttttttttcagacggagtctcgcttttgttgcccaggctggagtgcagtggtgcgatctcggctcactgcaacctccgcctcctgggttcaagcgattctcctgcctcagcctcccgagtagctggaattacaggcatcccccaccacgtccagctaatttttgtagttttagtagagatggggtttcaccatgttggccaggctggtctcaaactcctgacctccagtgatccacccacctcggcctcccagagtgctgggattacaggcgtgagccaccacgccccgcgtaaactctgcttttttaagtctagcctctttccattataacacaagtgccttatttagaatttactgccatatattgtcagtactattaaatgacaacctcttagtgggttaagacctattttttatttttttatcccatcaatttcttctataaagaatactataagtagtgaatattgttgtttgataaatgatttgaaactcaatcacaaagtggaaatttaaattaaaaaacattaattttccatgattttgccctactttatttattttatcatccttctggtgataagattcatgatgattgtgaagtaatagactgaaattaaggtaaaaacctgggattcttgaggtatttaaacagctgaacatatcaagaaagtctacttatgctaggtgtagataatgactgtggcatgataaatgagattaaaaaaaaacacctttatttgattttagaagtaattcattgttctttatgaaatgcttaaatgcagattccctcctcctgccatggaaaaattaagtctcaagggcatctcaggttcattcttctaatgtttcaaacagacatttatataatatctcatcagcatgtatttcttaaggcaactttaaatttttagtgagggatcatagcattatattctatgcaaactgacctgtgtcttaaacctaaaaggaattgggtgctatttaaataaaaattcaggaaagaacatttttaagtattgtctttgtgtgtgtgtgtgtgtgtgtgtatgtgtgtgcaagagactggagttttttttattactcagtctccccgagaatttggggatcagagtttttaaggataatttggtgggttggggggacagtgagttgctagtgctgattgattgggctggagatgaaatcacagggagtcaaagctgtcctcttgcactgagtcagttcctgggtgggggccacaagatcagatgaaccagtttattgatctgggtggtaccaactgatccatcaaatgcaaggcctgcaaaatatctcaagcacagaaacacccaacagtgaaactgccattgcagaattgtaactgtgatggtgaaagagatctgacctaaccaactccatttgctcctaacctccaacagtatgctgtctttttacttagtaaacttaaagatttttataggaatttgatttgaagggaaagtttagatttttatttagtctttgttttctaaacttagggaaatggggaatagtaagtgttttgttgccactttattataagtcgaaataatgtggacttacaattaacagtggagacagtgtccattttgtcagatcagatctgtcttcaaggctttcttaatgctatcaaaagacaaggttttacattttaatgatgtattccaaacaaatgttataaataatgtttcctgaggatgaatcacttaatttgttactttattatttttttctttttttatttgagaaaaggtctcactctgtcacccagactgtagtgcagtggtgccatcatggctcactacagccttgacctcctggtgatcctcccatcccagcctcctgagtagctgggactacaggcatacaccaccatacccagctaattttattttatttatattttttttttgagaaggaatctcactttgttgcctaggctggagtgcagtggtacaatctcagctgtctgcaacctttgcctcctaggttcaagtgattctcctgtttcagccttctgagtagctgggactacaggcgcctgccaccacacccagctaatcgttctatttttagtagagacagggtttcgccaggttggccaggctggtctcaaacccctgacctcgggtgatctgcccgccttggcctcccaaagtgctaggattacaggcatgagccaccatgcctggctgaatttttgcattatttttatacaggtgaggtatcattgcccaggctggtcttgaactcctgggctcaagtgatcctcttgccatagcctcccaagtagctgggactgaaggcatgtgctaccatgcccagctaattctgtttttatgctagttcttttcttattaagtgggtaagcttatctgaggaattttgcaatagtgggaaaattccctgatttgtgtgtgtttaagattgggggaggagttacggatccattttctacttattcagtggtaattaagcttgaaaacttgtataacaagagttcccaacccaaggaagttgctactagagaagagtggaaagaaatgatgttgaaataaatgattctgtttcagaactggggagtctcaccacggctaatttgatggagaaggttcgaggcctacagaacctagcctatcagctggggctggatgagtgtgagtaccccgatcgcatttgttcaggggtgtattccaccctgagctgtgtattccaccctgagctcaggtattccaccctgagctccagttataattcagaaagtatattagggaaaagagaagcattctgaaggtaagaagtcaatctaattcattgactttttatggtggagtgtggtggaataattactggatttactaggtaacaaatgatttttcttttttttttttttttgagacggagtctcgctctgtcgcccaggctggagtgcagtggcgggatctcggctcactgcaagctccgcctcccgggttcacgccattctcctgcctcagcctcccaagtagctgggactacaggcgcccgccactacgcccggctgattttttttgtatttttagtagagacggggtttcaccgttttagccgggatggtctcgatctcctgacctcgtgatccgcccgcctcggcctcccaaagtgctgggattacaggcgtgagccaccgcgcccggccgatttttctttatacagtaa

SEQ ID NO: 76753 - DNA, 1104 bp, Homo sapiens
agcctctgaagtagctgggactacaagcatgtaccaccgtgcctgggtaattaaaaaattttttttgtagagacagagtctcactatattgcccaggttggtcttgaactcttgggtttaagtgatcttcctgcctcagccttccaaagtgctgggattatgaaccaccgcacccaaccagcattttagtttacaaataaatttaaggctggccacagtggctcatgcctataatcccagctagttgggaggctgaggatggagaatcacttgaacctgggaggcagaggttgcagtgagccaagatcatgccactgcactccagcctgggcgacagagtaagactctgtctcaaaaacaagaaaattaatttaaaatttctaattttcaactgatagtcgtcacttcctcagacctctttatccttcctttatttctattactgtcatcagcagttggctttcttttaccaagaaaacatttttgaattggttatggaatcaagaaatagagaacaacaaactgcttcaagatatggttgttagctgctctgctaagttcactcattagtacctaactcttctctatatactggtaatttatttcttatgattaaagtttataccttggcaaaattactagttaccatgtatgtcatggacctccttgatttataatgaaaaggcaaatctgtgattagtaaattcatgaatgtgagactttcatagtcgattttgttccttgattttgtttctagctttggataataaatgctgtaatgatcattgtgatcaaggctttatctctttgtgtcaatgtttttcaatgaagtaaatgttatgtttgttatatcaagaagatgctatattaccaaatagatttgtcagtagtattatctatagttatagctgaaattatggttcctctaattagtttctctttttctgctttcctactgagaaaggtaatgaagtattttttcctgctttttattatttataccaaagtagagtgaacggaataatgacccatggcccagcttcagtaatcaacatatagccaatcttgttttacttataacaatttcctgtagctactttaaag

SEQ ID NO: 76754 - DNA, 2283 bp, Homo sapiens
tgcagtggcgcgatcttggctcactgcaacctccgcctcctgggttcaagcgattctcctgcctcagcctcccaagtagctgagattacaggctcatgccaccatgcctggctaatttttgtatttttagtagagacggggtttcaccatgttggccagaatggtctcaatctcctgacctcgtgatccacctgcctcagcatcccaaagtgccaggattacaggagtgagccactgcgcccagctggctactgttattttttaaaaatataacaatagtttcattattataactacaatttttttaacaaacttgttaaatatcatcaaatagccaatcagggtttagatttctgtagttgactcataaatgcctttatacagttcattttttgagtctggatctaaataaggttcatatactgtatttgatatgtctctgaaatcttttttagcctgtcatacttccacctgcattttatttccccttgtcatttgttaaacctagtcatttgttctgtagatttttcaaaatctgggttttgttgattacattcctgtggtagagcttaacatgttcacctatcccttttttatctgctgattgttagatctagaagcttgcacagatacaggcttgattttttttttttaattttgataagaatatttcacagttggtgttgggtacattatgtgtgctggtctttctttttgtgatactaagattaatagttgatggattctagatctaactatcaggaaataaaaagggataggtgaacatgttaattaagctctaccacaggaatgtaatcaacaaaacccagaatttgaaaaatctacagaacaaatgactaggcttaacaaatgatggggaaataaaatgcaggtggaactatgacaatcagatttattcattgtaatattcttcatcagtcttatacctagagtagcaggctttgatcacagtctagatttactgttttattataggttgcaaggtagtaatattctgtcatttctctcattgactagaatttttctaaaaaggactgtatcttatcaactatttggttacctcgaaaactgcttctactggcatgatgggataaatgattctttttctttctttattagttttcagaataatgagtttgttccctaagcatcagtaaagtttattttaatgactttcaatggaatcaaaaacttggtgtggcatttgttatttttttaaatccacacaattaaagccattattactgctaactgtatttctaaaaacttaaggctttgggggtgggggtttgaagtcatttaattcggccaccttcagcactaaaccaaaactgtataagagaaatgcttgtttctgccaaatgagtcccatgagcacagctgagattgttcagaattatcttctacctcaaaatttggtgttctttcaatttccatagcattgctttgcaactgattgccgttttccttgaccatcgtgaatttagctgacatgaaatagctttaaaatttagaatgagaaacaattacattgatgtgtattgaacttcttacatacagtctctctttgttttattgtgtgtagtgtatttgcattaaaaacaagatttttttttttttgtccttacagattattcatctactctaggggttggcttttacttgacaccctaatctggtgtttcaatgtctaaatcctctttcctgcattaattgagaggatgacatgggtgaaaaataagcagtaggaactgatgaatccccaaggaccagtgatcctgtttttatgcaaatatctgcactgataaagatgatggaaagaaaaaaaatgcaaaaaatatttgtcctcaaaacatgattgtttgtcacttcccaagagcattgttaaatgttagtataaaaattatatgaaccttctagggctgatagtaactaggttgtgtcttttggaagatgagtgctaccctttgaattggtacatgattatgcctcagataacccttttggtgtgcaaattttggaatgcagtaacttttcttatagggatttatagtctctcagatgattgaggcctcttggcttgatttgggcagttaatttatatgaaattcccttgaaatatatagaaatatttaaaaaagtaaaactctgccttagcatatgaagaattccatttctattatttccatctgagctcagagtcctccctcttttactggaactatgttacagtcaccttctagctggtccctctgcctctca

SEQ ID NO: 76755 - DNA, 2484 bp, Homo sapiens
caggcagatcacgaggtcaggagatcgagaccatcctggctaacacagtgaaaccccgtctctactaaaaatacaaaaaaagttagccgggcgtggtggtgggcacctgtagtcccagcaacttgggaggctgaggcaggagaatggcatgaacctgggaggtggagcttgcagtgagccgagatcgcgccactgcactccagcctgggtgacagagcgagactccgtctcaaaaaaaaaaaaaagattaagatgtctccattcaaaacttaatactttatcccattaatctacattgatgaagttatctatacaactttactatttggtactttatttgatggtagtaactaagaaaaactgctttcaagaagcagaagtttccacagcactagcctgtggtactagacttctccaccctctgggcatgtgatttgcaaaaaagtgatcatttacatttagaagttgtttcccatctagataaaattctaaacagttcttttgatttgtaattttaatatataaaggagggaagggagagtataactgtgattcttacacctttttgtttttttggagacagggtctctgttgcccaggctagagtgcggtggtgcagtcatagctcactgcagccttgacctcccaggttcaagcaatcctcccagcccagcctctcgagtagctggaaccacaggacagtgccaccatgcctgactgatttttttttttttttaatttttattttgtagagatggggtctccctgtgttgcccaggctggccacatcctcctaggctcaagcaatcctcccgcctcagcctcccaaagcactgggattataggtgtgagccaccatgccctgcccctggtatttatttatttatttatttatttatttatttatttatttatttttgtgggctgacatcagaattatttgtctggcttcccttattaggccaattaagtcctacctctcatagaactaaattaatagtccttgactgaggagaaaaatcatctagcctttaacctctagatggcagcatgagtctttctgtaccactaacagaaagactacccacatctcttgaactggatttttgatctatgtaaaaacttgttgtgattttttttctttttttctttttttttgttttgagatggagtttcgctcttgtcgcccaggctggagtgcaatggcgtgatctcagctcaccgcaacctccgcctccgtggttcaagctattctcctgcctcagcctcccgagtaactgggattacaggcatacgccaccacgccaggctaattttgtatttttagtagagatggggtttctccatgttggtcaggctggtcttgaactcctgaactcaggtgatccgcccacctcggcctcccaaagttctgggattacaggcatgagccacagcacctggccccttcttgtgatttttaccagactacttgcctagctttgttgataccttgttgatttttatttttagctttttgtttttcttttttatctcttcatctttttttacatatttccttgtttgtttgtttttttttaaatttttttttgagacagggtttccctctgttgcccaggctggagtgtagcagcacaatctcggctcactgcaacctctgcctccggttcaagcgattctcccacttagtagaaaaaaattctaaaaatgtggttaattcaatagtttttatatctgcatataagaccctaaaaatgggttaagttctcttgtctcaatactttcccctaccagtgacttatcttgtatccttggactctgttggttttcatgtggtatcaggcaatgctctattacattaaacaggaatgttagctaaagttgatgaaactacattggactaattagtccttcaagaaaaatttaattgttttaaaataaagctttcaaatatttagccattttgaataacaaaagaatgaagtgtcctgttcagcaactgtttgggtgactacttcatacaaggctatgtaggggataggaagataattactgccctcttgtagattaaaatctagtaggaaaggaagataagacaactaaggtaaatgattcttaaaaaaatatagaggagaaaagctctatgagagtacaaagaactatatggatgggggagaagaggcaattgcattagattgctacaggagtggcagataaacttcattttatttagttaagacctgcctaggaccattgaattgagaaagattttgagagggagcctagattcagagaaggcaattagtgatgtctgttatagacaagggaaatgagtatggtaatatttgcaatttctggaacattggaaataaacctggccaggtgcggtggctcacgcctgtaatcccagcactttggaaggctgagttgggtgatcacctgaggccaggagtttgagaccagcctggccaacatggtgaaacc

SEQ ID NO: 76756 - DNA, 1479 bp, Homo sapiens
ctgggactacaggtgtgagccacagcgcccggccagaaatgcttttttaatataactgagattagtgtgtgtgtgtgtgtgtgtgtgtgtgtgtgtgtgtgtagttttaacttgtgctttaaaaaattttattctatcttaagcattttcctgtgtcattaaaagttctaccactgaagatttttgaataggaaagatacacacctttaggaggcattggtgcacaggatagagtaggatggtagagagaggaggcaggaagttacagtgggaatccagggtgaaggattgagagcttgaatggatgatggcagtgagaatgggaagaagtgcactgacaatagatttttcagatttggaatttttaggagtaggtaaatgtctggatggggatgttacgggataagctgaaattagagcttaccatgatgttttagcctaattaatgacagggaagtcagaaggaggctagatgcctgcttaacaacaacaacaacaacaaaaatcacataattcttttacttgctcctttgtaggcaggcatctttattttcttagaaataagtaaatgtcatttgtagaggctagaggttagtgttattaataagatatctagttcagtcatattacctaggcaacaggtaatgttttagatagtgaatggtgagttatttgatctcaaagaaatcaatatgtgaaataggatgtacataacttcagaagttgacttgtgaagtccctattttctttggctggtcattaggctgctaagtagaatgactgacttttgtatggttttcttccacaatagtgctttttctttcggttccctacctatgaacttttcctgaactttcctacaagtttaaaaagttgttatggcctctctatacagtagacatccaattctttgttaactggaaaaaagtttcagaagtttaaatttgaagtaacaggaattggtccaaaatatttgttgttgctcatgttttaaataagcgacattggattatatcagcactgggataattcccattaggtattatgactgcaatttacatgcaattggaaattagtgattgagagggaaacagattgccaaattatcttccaaaaaggtactccccactccatatccttgctaataacaagtattataattatttaaagtcattgccaacttgataggcaaaatattgtcttgttctaatgttcatttcttctattgtgaaggcgaactttttttttccatgtttcttgatcctatctgttgatgagggctggaagttcaagaaagtataaatttaaattattttaacctgaaaaataaagccagagaacttgattgaaaagcaccccaaagactgtgttgaaatctgcattgcaaatactgatggaaacttatccttgttttctttgttttatgcattactttaccatcttgccatagtcattagctttgcacctatttaggttaca

SEQ ID NO: 76757 - DNA, 1045 bp, Homo sapiens
agtatgttttaatgactatcttgagtggtttttaaaattttctgaattttccaaattaacaaaaacacattctagtctgttgaataggaaaaaaatactacttaaaaaaataaggaaaagttgtatgccattttagaaacaaaattgtacttaaatctctgaattttctaggcagttaaatttttgagctcttctgtggactgtttctaaataaaaatgagtagatccattaacaattgatcagtttatacaagtgataaatagcaaggtgaatgtttcccatacatatctcatttcccatactcaggatgtgcttgcataagtaggaattgagagcaaaagaaatggtaggctgttgggtcatgggcaagagacgatttagttggccaaagaagcatattttcttaagcaaatgttggccaagatgttactttatgttttcgggctgtcttcactgtagttggagaactgtgaactcttggtattaagtactcagtaggagcaaagaaccatttggaatgtctgtcaatcttaaatagaactgcagctgtttggctgagaggtgaaatggacctggatttcttttttttggcgggggggctttgaaagtagtttttgtataacaaagaggtgatgagaactaaagtgattacaaaagtgttcataggagttcagtttctttccaggctttgggtttaagaatgactgtttctgcccatggggaaataaattggcatttttctgctttcgtttgttttttagttattgatgttctagaaatttcaacaaaataaggagtgtttttgtatttcaaatgtagtgcccgtttctttatttctttctggtactttccactggtttgtgttgataatatgatctggaaggtagcgataatgcatgggaatttataaatgatcacaaaatactttgtcacaggaaatctggagaaataatgactttggcatatgtataagagaagtatctctaactgttaagtctaaactaaaagcttgttacttttcggtttggtataaccaaaaaaaat

SEQ ID NO: 76758 - DNA, 4377 bp, Homo sapiens
gagcttgtaaataacctttatttcacagttcctgctgatactggacaccagtctgacacttaagacacttggaagcttaaggaactttttgttataaagaaaagcagatcaaggaccatcttatgcttattgggtgaatagaattgagatccatgcactacatatgacctaaattttttttgtttggttggttgttttttgagacggagtcttactctgtcgccaggctggagtgtagtggcacaatctcagctcactgcaacctccgcctccccggcttaagcaattctcctgcctcagcctcccgagtagctaggactacaggcatgcgccaccatgcccagctaatttttgtatttttagtagagacaggttttcaccatgttagccaggatggtctcgatcttttgacctcatgatccgcccgcctcggcctcccaaagtgctgggattacaggcgtgagccaccgcgcccagccatgacctaagttttttatggtagtgatagtctgtgttgaaactcttagcatttccttagaactatttttattccaaggagaataaaatcttaatatataaaatgaaaatgacatttgggttctgtgaagtgtaaaacggacctcaaatcaacaaggggtcagataggagcaaaatcgaaaccatgtcaattgcatcctccatatctttaaaaaaaaaaacaacccatttcttgacagggctcaaaatttcaaaatctatcagagctaatttggttgaggcttcatcctatggagatacacaaagattagtattgacttgtgtataactttaatgacactcttgatttggtccagttatgtagaagttagttggtaaaaactgttctacatttctgctttgcagagaaatcttgtgattgggttggtgtttttaaaacctgctagtcgcatctaaataagctggggaagatggaagagagcagcatgtgataaaatgttccttttttcccttcctatactattttgttaaaagccttctagaatataggtaccaaaaattaactcactttattctttctagttttcagtagtggggatctgttaagccttattatttaagaaatagatattaattcttatctttggtatttttctgatttgctttattgtaacaagagctgcacattaattaacacattaatcagtgcatgcagagatggttacataacagtctgagccatgaactcagtccagtattgaaaaataagtatctccagaagtaattcttattctagtatcaaacataacagtcctttaaaatttcctttggaatgttgaaaagagatcaaatgaaaccttcagaatggttatttatcagggaacaagaaacctccaatttcgttcacccattgtagctccactttctcattttaatgctcaatccacagtggcgatggtaaaagatgtcctgcaccttcagagatggcagtgggagaggggacatcacctttccatttattgcttgttgcaatttggcctgtttacagacagaattgctctgtgggttcttttagtggagagtggaggaaatcaagataggaacaagaaatcagcatttacacatgacccatgagttggctaatttttaacatgtagttaagaaatgattacagcctgcagagtcatgacctcaacttttcatcagctccattggattgtgcctcagtttggaaatgaaggaggtacacgggaagttttaattgtacctgtgtgatttatccctagtcagctctttaatttcttctggctgtctgaggtttccgacatgctgtaaatttccccaactttttcattatctgcaatttctttatgacttgtgaatcggagtggagagagagtgtggatttacagcagagataaacatgtccataaagtctgtatctgtgtcagtaattgtactgctgtcagtgactgtcctgttttacaggcctctcttgggaaaggaacaggcttcactaccagcagcactgaagtgcttgctttgatttgcattaacttgctaggagattaggtaggaatggtgggataggaattgatactggaccttggcctctcttgtttgtttgagatcaaatgacctcctaggataactgtgtgttgaagatagaacatggacagacaatattcatttcctaaatgaaaatgaaacttgaattgatatggtagatgtgaaaaatcctttctaacttcattttataatgtacctttaaggtgacttccctttcctatcactgttgataattaaacttaggttccctctggcccccctcccccattttccttttcttagaattaaaacacagggtttcacttttagagcactcatatctgctcaagagtgggccagctagagttaaggtgaagactacatctgccttatcttaattctcaactattattggctctttctcatctgcttaaggtggtgtgcccacaaccatttaccatgagaaaggcagtcacaaggagcaattcttaatataactgtctttaaaaggctctttaggatctctctctttagtgttttcttccttatagtaattttgaaagaaactgaaattaagagaagtcctttctaagtagatggaaaagcaaacacattgttttcttctagtacatttcatactcaacaaatccctcaagaattgaaactatccttgcataccctgaaccttctttgaggtagggatttgttgttgttgttgtcgttgttgttttgagacagagtcttgctctgtcgccaggctggagtgcagtggcgtgatctctgctcactacgatctccgcttcccgggttcaagcgattcccctggctcagcctcccgagtagctggtcctacagtcgcgtaccaccacgcctggctgattttttatattttagtagagacggggtttcaccatgttggccaggatattcttgatctcctgacctcatgttctgcccgcgttggcctcccaaagtgctgggattacaggcatgagccacctcacccagcctctttgaggtagtttaaaagcagagtaggtgacagaagagtttaacagtgaggggataagatgcatgataagcatcaacctatagtcagcccacaagtccaaataatatactgagcaattaagttgatttctccataagttctcgtctgcttacattcctttttgactgcaactgaccatagccatttttttttatcatgggagtgggaagattaaaggaggtgatgtgatacaaaattgtttggcatccttccagaagctgtggtgaaaagtgtggttaaaattgttgcaagaataagatttgaaattatctgtggttttaattccttatcacatctattgccatagtagagtttattcttacttaacaagggataaactactttatttgagcaagagggataatctcttcaggcccctttgtcagtcatttcttgtcctcctttagaacagggagttttttttttttaactccttaaaacattttttttaataacactttgttgagatatcattcacataccataaggtttatgtttgtaaagtttagtgttcattggtttttagcacactcaacaataaaaaactatttgggtatctaaactattgagatagttttctccttttctttttcagtccatgctaatggtattcctcatggagtaagcttgtgaaattacattgttacctaattctagtttgaggaaacttctagtgtatcacttgctatgtccaatgtagcaaacaaatacaataatctaaaattaacctaacaaaacctagagttattgtgctagtgctgtaactccttgttttaggaccttaaatttttttcttcagtgaatgcgcaagttgaaagtgcttaacattcattttgatgcagacctttattttttcttttattaattttatacaatctgattgtaagcacaggtttggaccaagttaaggagtttcacctgtatgcccagtcaatatgttgaaagaagagtgagaagtctagctgggtctgattacagaaataagctttctaattgcttaggttgaaaagcttgttattactaagaatttctcttcccagaaaatagtttgaaaggtggggaaagtatgtattctagcttcacaggggaagcatttttcttctgataggagggaaaatagtttatagttgtttgcatccatttctgctgctgtcagctgttaagttcagtaaaaacaagggtttaattagccaacagtctcacagtgttggaggaaaacgttattaaaaaagaaaagaacaatacaataaaatattatttggataataaattgtgtatctactgttctttgaaatgactct

SEQ ID NO: 76759 - DNA, 1808 bp, Homo sapiens
tccttggaactataattttaaaaacttatttcaaattatcaagtaaatgaatatcaatgccacaaataggtcaggaaagaagcccctcttcactaaattaagaagaaaagtcattaagtcttcttttcctccaacagttcattatgaaaaaattttgatcacccagcaaacccccctctgtgtgtgtatattttatatatgaatatatatatatatatatttttttaatctatattacgtattgatattctcttcttccttagccatttggaagtaaatttcagacatcatggcactttacccctaaatgcttaagaacacatctcctaagaataaggatagttttctatataatattatcacatccaacaaaaataatttaaaaaatctaatatattttcacattcagacctccccaattgtccctaaaaatcttgtgtagcatttttattaaaaccaagatccagtccaagttctggcattgtaaatgccattacattcttgataagagaacattgagcactaaattcttcacagcagctctcttttttttttttttttttgagatggagtcttgctctgttgcccaggctggagtgcagtggcgcgatctcagctcaccacaacctctccctcctgggttcaagtgattcttctgcctcagcctcccgagtagctgggattacaggccacgcaccaccatgcctaactaatttttgtatttttagtagagacggggtttcactgtgttggccaggctggtcttgaactcttgacctcgtgatccgcctgcctcagcctcccaaagtgctgagattacaggcatgagccaccgcgcctggcctcacagtagctcttttaataaatatttaccagctttttcctgtggtgaacatatatttactcaaatgactatcattttcttctagaatattgagttttgagttctctctttacaataagcctgctttatcaagctcctttatttctggtatcctctccttcttccaaatgaattacctgtagaattgatattttctccaataactactctattccacagtcagagtaatatttttgaaacacaaattgacatgtgaccttattcccttcttcttaaaatctgtcaacagcttctcattgttctcaggatcaagtcaaaaacctttaacttggccttacagctctgcctgatctaacgtttttcacaccatgctccctttctgagcatgtgttccgcacattcagaaaacagagggaaaagtgaggtaaataatccagggaacacctcttggaagagatgaaacttgaaatagaatttgatgtctaatatttgtatataagaggaaagaatacacttcagaatgggaaggaatttttgagaatggataagatattttgggggaaaattgataaattgtaacagactagagagatgagtcaaagtgatttcaagattttaagcccttgtgactaggagaatacaatttagtgtggaactgagatatgcattataaaacttcagttttgtttgctaaggtgttgttaaagcatctttgaaggccaacgtggcatgatcacttgaggccgggagttcaagactagcctggacagcatagcgagtctccatctctacagaaaaatttaaaaattagctggtgaggtggctcaagcctgtagtctctgctacttgggaggctaaggtgggaaaatcacttgagtccaagagtgaggctgcagtgagctgtgattgcaccctcaccccaccccctatcctctgcactccagcctgggagacagagtgagac

SEQ ID NO: 76760 - DNA, 3104 bp, Homo sapiens
cattagaacaagataaaaatgccctaaagcctcttatctgatgtctggtgtaacctgctgtaagcaggattgccattagtttatgttagaaatcaaatgaccctctccagtgcaggaagtactgattaaacctgaagtgtccccggaggactctacagctgtcagaggggtggtgactgtccgtcacgaaaagggaaatctgggccagaggtcccagtggggcggtgctttaagaacccgcacgtggctgccccagctgttctgctttgcctaatgaattgttttacaagaagaggctgggtattatcatcacaagctgccttccttagggactggagcaggccaaataataagtaatgttagtgatggtaattgaaatgtgatggctctcctgagatctttatggccctggagctggttggcacttgtggattgccttgtcctagcaagtgccttattttttttctgttttgtaataccgttgtgtgcgtttttctcttctgtcccccatggaaattcattaataaaagctatcgtaggaacattacaatgatgttaactacaaaaggaacagttttaactttttcatttcaattatcaaacactgtaatggtaaataagtggtttctggaggaaaccactgtaaagatctctctgtgcttttaaaggaatatgttaaacttatacaaataatacaagctcttgattttaagaatattttaaaataacatgaaaggatataaagtgaaaagtaaaatccttatctgctgaatttatgagcggtaactgccacgaacagtttctccatggatgcttccagacattttctgtacatagtaaagtttatatacattaccatacacagatgcaatcataatatacatactgttttgtgacttatctttgaccccacaacatgtcttggatatctttccacagcagtatacatagatctgcttcactgttttccaaatgcttcataggatttcactatatggatgtaccaattcaagactctttgtagatagtttgacttggaccttataaatgaagccttaccatacaagcaggttgcatccactgacttgtgttccatagttcaaactctgcttttacatgaagtgattttccttacttcaggaatgttacattttagtccagtattgttttaaaataggaaattctggaggtaaagcttttaggggggaggtagtgtgagtcttgtcatgcatcattagccggacatatgtgtagtgatatgcaccccactgtgtgcttttaatttgttgcttagttaaatgagaagtattctgtcccagataggtggggaaaacaaatagcctttgatgagtgttgtccaaggcactgactggcggcttcctctaaagttgaatgagtgttttctcccctaattttctacttcagaagttccaggaatcaagttttgaacgcattaatggacttgggaaatgatttgtcagcacgtggaaatgaggacttaggtttcttgtgtaacagcttggctaacaaagcaagtttgtgcctcatgaactttaagggccttgctgggagtggcagtgtgatgaatgaagcaaagcaattttccaggagcatttcaggtcagtgataggagaaatcagttgtcttctcagtcaaacagaaacttaattttagttgcatctgtcttaataagagaatctgtatgcaaattgaatggtagaaattccacatctgccaaagatgggagcattgcaagtcttttttttaactcgaagctctttagtcccattctcaacacttcaaaattgaggtttgaccaaatattgaagagatgtcatactactaaattgcaaaatgcaaactagttttgtttcagactttttatacagtgcttttcttgtccttgatgttagtcatttgaattgatgcccaatctttaatttaataattggaggctattattaataacaataactgatttacttcttgtccaagcctttattagattcatgggatgtaggtatacagagatttctggggctgttctgggctattggagatcttgtagacctaaactattcaaagcagtagccactaactgcatgtgtttgtttgaagttaaattaattaaaaataaaatttaaaatctaattcctcagtcactctaggaaatgctcagtagccatgtgtcgctaatgactaccacattggacagcactgctctagaccaaaggtcagcaaactatggcctgcaacctgtttttgtattctctgagctaagaatgttttttacgtttttatgggggctgtaaaagtaaaacaaaaacaaaaaacggaagaatctgaaacagactgaatgtggcccacaagcctaacataacatccttacgtcccattcatacttatgttatgttaggcttgtgggccacattcagtctgtttggttctttacaaaaaacctttgctcagccctggacctatgcttcctcttggtgacgttttggctttctgatcaaattgggttaggactttccataagtcatcagaagactaaatctaataagcaaatagacaaatttcagataaagtttcttactatagatagactatggaatgagtccagagcatacacaaatcagttccctgaagctaggacaagcgggatgtgcatttgaaataggaaaatagtttatagtataaattatcaatttcctacaagctttgtgcataacacctatagtttaacagaacatctttcttattttgtacactattttgtgtcttctgtgttctatactctcctatcttactctgacagaaacagaatgagcctgggcatagtggcttatgcctgtaatctcagcactttgagaggccaaggtgggaggatcacttgaccccagagttcgagaccagcgtggacgacatagaaagaccctgtctctgccaaaaaataccaataaaattagccaagtgtggcagtgtgcccctgtggtcccagctacttgggaagctgaagtgggaggatgcatttgagcccaagaagcagagcctgcagcgagctgtgattgctccactgcactccagcctgggcaacagaatga

SEQ ID NO: 76761 - DNA, 1050 bp, Homo sapiens
agtgagatcatggcagtatttgtctttctgtgtctggcttatttcacttaacatgatgccctccagtttcaaccatgttgtcacacatgacaaggttttattcttcaatttttttttttttttaagacagggtcttgctctgtcacccaggctggtgtgcagtggtacaaacacggctcactgcagcttcgaccctggggtcaagagatccttccgcctcagcctcccaagtagctggtgtgggagccacacccagctaatttttttttttttaattggagccatgggggttgggaggggtctcactttgttgcccaggctggtctcgaactcctgggctcaatcaatcctcccaccttggccttccgaaaggcagggattacagatgtgagccactgtgcccagcctcaaattatttttaaaccatcacattatttcagtctctcctaggaagaatgcagcaaaaagattctttttctggtattctcaacatctgagagattgtcttcccttagcaaatgtaactctaacaaattcttattaaatataaggtctatgaaatctacctataaaatgagcacctggcacttctgtggtaagtcagcttgtcgctttcaagacaggaccttgacattcatgaggtaactgcaaatttccaagtttgtgataactcatagtgtatcatttttcctctaaaatgtggtaaagtacagttaaaaaaattgttaccgtttgggcctttggtatgaattattctataattagaagtaagtaaagtattctcccactaaaataaatgttacactgcaatatgtttaattacaaatagaaatgttaactggaacttgtctgaatcttcaaactcaacatgtcagatgatcacgggttgtgtggttgagatcatgaagtgtgtactaagccacaaaaaaagtgacacttcaacaataaccttgaaaacaaggcacgtgatagaagagataagggagatcattgtgaaacagtattctgagagggaacctttgtgaagtgatcgcttctttctaaagaact

SEQ ID NO: 76762 - DNA, 1455 bp, Homo sapiens
aatctgactagagagacaaggcaaatgtataaaaagtttgatcacagtacaagagagcatgtactgatccacttgaggagcatagaagttgacagaaatgagagattacagtaggctaaaggtgtttggaaaaagtcttataaaaaaagtgggatataaacgaacaacaacaacaacaaatcctacatatcaacagtggcaagttggtttccttcttgctgtaagattccatgtaaaatgtagtattttatatagcagttgctatttgattaacctgcaaaaattatttttttctcatattcatttcccttgttagtatcccagtttgttaggttagacagaaaaaaaaaattgcttgattgtctattcctccacatatagatcagtatgttaagggggcgaagtaactttacatcataatttggccactgggccatgcaacagcctgtctagctttaccctgctaagcctagaagtggcaacaaagagataagaaagccaccatcaagtgtctgtggcctagtatgaatttgacctgcaccttgacaatgattttgatttcagctttccatggtgaatggatttactacctatcagagtcacaaaaacccttaatttttaaaatattttggggtttttcttctacatgttaaatgttaacttcctgtgacaggcggtgatgatttctgaattttcagtgggcacaactcattattgaagcactgaagtagttggttactattgcagctaattcttatttaaatgagcaagagttctttggaaagattaggcagcatggttttaaaaattcacagcaacactgatgtatatcagttttggcttggcaggctttgacccagggccgtgcagtgttttataaccctcagctacataaggacacatacttatagcatcacttttgtagtggatatttttataactctacaaaacgattagactgacgtaaagcaattctctaaattcataggtattaaaatattctggcagctgtctcctttttgcctttaagttgagacatcatgatgagataagactgcaccaggcctgatcggtacatgaatgaggttatgcgtggtattctcacattattgacaagggtctttgtcactataaataggagaaatctttggggaggggttgccattatagtaattccgattcaattccagcaatattcttgtttttcataaacttttttccttcaaaacacattccatgcaatcagataagaaagaatgatataaaaatgcctttgaattctaactaaaataatttagcttatagttgaaatatataatatctttatctgggagtctgaggtattgattagggttagagaatgtttaggagaacctggatgaaagaaacttactggtaaattggctgtaggctacagtgacatgggatacagactcttctgtttgcaaaatagtc

SEQ ID NO: 76763 - DNA, 3215 bp, Homo sapiens
taaataatgcaaaaatttattattgataaagaacatagtagaatactgtatagccatgaaaatgaaccagctcttgctacatgcaacaacatgaatgaatctcaagaatatatataacattgaatgatgaagctagacacaaaagagtttatattgtacagtttcatttctataaagttcagaaacatgcagagctaatccatggtgatacaaatccaaataatggttgcattggggctatgatgatggctgggagggggcctgaggaagaggcttctgcagtggtggtaatgattctctatgtacctatatgtggttgttacacagtatatttatgatttgtacatttttctgttcatatgttatacttttttaaattaactaaaaaaaatttaaagacaaatagtgactgagataaaaatgaaaatgaatacactctaagggctaatagccagtctgaccttaaattgaagtggtagcacttaaagcctttctggtttgatatgggaagctcatgaaaaaaggatattgagcatcagtagttttccagccagttaggaaaagatgttgaagatgaaggaaaccaaccctcccgcccccctgctccaagctccagatttcaaaatatttcttgagcaggccttatataatgggatacgagtagctggaattgttttcgaagatatttttgtcatgggcagctatgaatgtacacaaccttttctgccttagaggtttgttttttaatataaacctccttaaaatacaatttttatacccagagagtcattaattgaggtcaccggcatagagaaagggtggtgatgaatgtgattcagtagatggcagtattccctttgaagtttttagttaaaatgtgggtgtactggggtagcaacttttttcggtgggaatgaagaaaagtcacatactgggataattagaccagaaagaacattttattatttttttccatatgtggtattactattgtgaatgaagcaataataaccacaacatacagagtaagaggaagtttgtttaatgtagtattcctttaagtgggaattattggatagaacccttggaaaggatttggccagtgtctttttttcctgtcatatatttaggaagattgagataatgactaactgctttatacaaagatgtcagtgaaatttattaatgaggtgattaggatgcagttgagcagaaattaaaagaaaaaagtgattgaccagtctgtttttgctggttattttaatataaatcaaatgctatttgaatagattctcttttttaatgttgaaattgtcttataatagtagtgcttggtgggctttaagactctttgccatatgggggttttaattttaaggaatttgacatcgattatagtaacatgccatagaagtcaagagttatcagccagttaaaaggacgaaacatggctatcgtgcagaacaagagatcaattaacaaactaatcagttggagtcagaagaactacatgcaagtcctgactttgctccttattaggtagtgaccttgggcaaatcacttaacctgccattttttttttctcatctatgaaaactataggtgataagtaactgctgtgccttccccacaggttgttaagttcatcaaatggatgcattgtcttaaattaagtgtgctgttgttaggcagggcgaggtggctcacgcctgtaatcctaccactttgggaggctgaggtgggcgaatcacttgaggctgaggtcaggacttcgggaccagcctgtccaacatggtgaaaccccatctctattaaaaatacaaaaattagcctgacatgatggtgcatgcctgtaatcccagctactcgggaggctgaggcacgagaaccacttgaacccaggaggcggaggctgcagtgagccaagattgcaccattgcactccagcctgggtgacagagcaaacctccatctcaaaaaaaaaaaaaaagaatgctgtgttaatggtgatggactctacagatgggctctacattgtttttatactgttcaattaacttttgtttcctcctgttctgcctatagtcatcaggtgcttgctaagaaacattgataatcattgcttcaatagccatcattatgagtacctactaataggtacttcattcactaagtgctttaggtacatagtctctaaagcctcacaacagccctgtaagttggaacattgtcgccattttacagttggcaaaggtctggactagcccaagagctgtgaatcaatccaagccatctgactccatagcctttgcttttagtttattatgctatgcctgccattatgcacttgagttttgacttttctgtatctagtattttagaagccagggccagctgggcgcagtggcttacgcctgtaatcccagcactttgcaaggccaaggcaggcagatcacaaggtcaggagttcgagaccagcctggccaacacaatgaaaccccatctctactaaaaatacaaaaattagctgggcgtggtggcacatgcctgtaatcccagctactcaggtggctgaggcaggagaattgcttgaacctgggaggcagaggttgcagtgagctgagatcgcaccactgccctccagctggggcaacaaagcaagactctgtctcaaaaaaaaaaaaaaaaaaaaaaagccaggaccatagatagtatttttatgtatcagatacttaaatgaaagacactgagccttagtggaaaaatttattattatatttccctttggagttaacagaatcctagtgcgtgcaattactaatttgggagtgggaggagttgtgctcctgacctgagcctacattttatcattaccagagcacatgcagattgtttcttgaagattcagacaaggagaggaacacagtaaaggatgtaaagaatgttaatgtctggtttgaggatatgttataattttatttgcagatacccctcccaactatattttaatgttagaactagttttttctttgtgtgtgtatgctttatggcggtttcccattcattgtaatagtcattgatattttgcatggggttatcttctagagaatacatttaaaactggtaactaaatatgctgataactaaatacatttttgctattcatattaggttaaaaataaataagtatatatgaacattttcatttataaaca

SEQ ID NO: 76764 - DNA, 2648 bp, Homo sapiens
tgtgttttggccagcttctgatttagtttgtaaattgtcactagttgtttttcaataagttgtaaattttagaatatttttaaatttacaggaaaattaagaaggagcgttcccatataacccacatggaatttcccctgttgtcgttagtgtggtacatttattacagttaatgaaccaataaagtccatactttattcacatttccttagcttttccttaatgtttttttttttctgttccaggtcccatctaggatactgtattacatttagttgtcatgtctccttaggcttatgttggcatgacagtttctcagactttccttgttttttgatagccatgacagttttaaagagtacagtcaggcacattgtagaatgtccctcagttgggatttgtctgatgtatttttcataattatggtttgcctttcactacataaaccaggctatatgtggaggttgttcttaatcataatgagctctataaggaaggcagattaggattttaaaatattggctgtggttaaccaaagataaacattaacatcattctttgttggatctgaaacactggctacattttttatattttatcatttttccgaagcagccagtcctaattctggctagaagtaagagtctaggttatatgatctgctcatatccctgaaacagtttcttttctaattgcacctattggggcagttgggatgggttttaatgttactcctaagagctttatttaatctgtattggccttttaattagtaatgggcaattttgggtgaattgctaattgattagagttgcggaaattatccacaaagctgttttgtccctgcagcctagaagacgtaagattaaaacaggatcgggtttagttactagtgtaagatgaatgcttgaaaagtattattttagtggctttggtttgtgttccggcctggtgttggttttaactctgctaagaattattgtcttttaactcactgaggtcctcaattctactccattaagggccacttttctgccaatcaaaaagcagcatccctgagattgatttttgttacagtgggtagtaatggctgcctagtgacaacatttcaaactcttttatgtaaacagaaagcaatcaaataagtactaatccaaggattatgtggacccaaatcctgtggccaaaagaatctctgcagtgtatgtctctggctctttgccttctagtgccaagcagcccctcttcttcctggaaagcttgcttgttgcttgtgctgcctgttagatttcagtgtgctaaaaccaaaacactcctgcagctcctgaatgaaattcaaaaagacacttacatttccataaataaattaggaattcagtggtttctttgggctaatcagggcaggctgataaaccttgctagctgtttaataaatgaattgtgacctattaatatggacgcctcaggaattcaccctggtggaagcagagcagtgaaatagagaggggcatggccccttgggaaatcagggcttcatgtttgcagcttaaatatctctgtgaagtatcaataaggaggtaattgaattttgaacacaaacatgagcgccggatggatgaaagggggtgggggatctgatcgtctcttctctgccccttcattctcccctccccttttccttggagaccactctagtaaagatagatgctaaatccattaaataaagattagactccgtcgtagtagaaaatggcagcttagctagatccccaggcaaattggagccttttgcaatacagaaaattaaaatatacatttttaacaagtgtgctatcttcctagcaataatgctaggctagcttgtggggtttactcctccttcagattggcttttgtttgggcagatcactttctcttgtattaatgccaatcttttctgtattcctggaacagaagggactgggtttatttatttatttttaaagcttctgttgaggcctttcctctagcatcctgcttgcttgtaatcagaagagtgggaaggagattagtgtcccatgaattgacggtagataaatgttccctccccttcactggtgggtccagaagagcccaatcacttgtatttcagggatgactggagactgtacagccaagcaagaaaagggcttacagattgaaataaacattgatgttttagatgcaattttacttggctttatttcctgtagataaggttattgatttgctttgtcctcctattttaagccaggtaaagtcatattaatgtaagaaaaaagaattggcattatttggttacagatcataatactccttttttagcaatagcagaaaacaaacatcaagccttaaatgcttttgttatgttgatgcgaatgcccagtattgttttttttagactaacccttttttacatgtcaatctacaattctaataaccctttcctatagtcagtctgtctatcaacaagtataaattgagcatctgttaggtgtgtagcatggtcaatggtgagaaaagtctatcctctactaccacagttacttcttttctttgttttttatggttttgttttttgtttgctttcattgtttttaattgacacataataattgcacatatttgtg

SEQ ID NO: 76765 - DNA, 1001 bp, Homo sapiens
tggctaaccacagatacttctttgaaaacaaagtgaatcatggcatactcctgctatatatatatatatattttttaattaatttatttattttagagacagggtctcactctgtcactcaggctggagtgcagtggtgtgaacttggcccacctcagcttcgacctcctggactgaagggatcctcccaccttagcctcccaagtacctgggactactcaccaccacacctggctcattttttgatattttttttttctgtggagatgggattgctctgtgctgcccaggctgggattacagggatgagccaccgtgctcagcatactcctgcttatcaaagttctatgtctccttgggtcctacaagataacattcaaattctcaggctttcacaaagtgccttcctgacactgatccaggctttccgtagtgtcatcattctatgggatctacacctgaggctctggggatttcctatggaagaacaaatgtggaacttcttggtctcagattaagggctttgtgcatcatttgccagatggtgtttcaaatgttcacaattctttctttcaacttcaggggtatattgttgttcagattttcaacaatttgcccttatgacattcactttataatttaactttgtttgcagcaatggaggaaacctttcttgttaagacaattaaggtgtctatgctttctatcatcactgctatatatatatatatatatatttttttgagatagagtctccctctgttgcccaggctagagcacagtagcgtgatctcggctcactgcaacctccgcctcacaggttcaactgattcttgtacctcagcctcccgagagccaggattacaggtgcgcgtcacatgcccggctaatttttgtatttttagtagagatggagtttcaccatgttggccaggctggtctcaaactcctgacctcaagtaatcctctcgcctcagcctcccaaagtgctgggattatag

SEQ ID NO: 76766 - DNA, 1472 bp, Homo sapiens
ttctatgacttttatcagattttttaagagatctctgttatggattgaattttgtcccctgaaaaagatatgttggagtcctcttccttatttggagataggctctttacagaggtaattaagttaaaatgaggtcattgtgtggggcctcatcccaatatggctgaagtctttatacaaaggaaaagtttggacatggagacagacatgcatagagggaagacagtgaaaagagacacagggagaagatgccatctacaagccaaagagagaggcctggaacagagctttgcctcacagccctcagaaggaatggacaattctagcattagctcaagctgctgtatgatgtacttgtgtgaaggattatttatgggcccaaatacccttctctctataggagtttataatctctatagactaaaaggaattaggtccccaaggttgctgccgttcttagcctagatttaaaaacctttaatttttcactattttatgtagttccatatgcatatggagatttcatgatcattaggtgaaaattactctttaaattaattattcatagtaaagggaaagggtttgccttttgaaaaaagtatatcttttccatttttctaagtcttctacagtttaggccataccggttttcagaaatcccttctagttaaagtctactaaacactaactaacttactctttactttctcaagcactaatggaaatactggattataaccaatctaatactctctgggcatttctactagacactttgctcagtgtgatttaaggcagtttataatcactccttgtggtcttgaggccagttttcaattcatgagactcatatatcctagctagttttaattaattttgcaaggaagatgccaggagaagcaatattaaatgctttcttataatcaggttatttcatcttttgcgttctcgtcagccactaatcttgtaattttatcttaacaaaatacagaacttgctttgacatagtttgttctttactcatcatgtttttcagtacatagaacttatggtttgggtaaccttatattcatgattgtcttaacattaggatttggggatagaccttaattagtatcacattgtgtttcatatatttggtcttttagggtaatcatattagccaagaacagtcaggagtaatttgaacagggaaaaatttatttatttatttatttatgacagagtctcactctgttgcccatgctggagtgcagtgcatgatctcggctcactgcaacctccgcctcctgggttcaagcgattctcctgcctcaacctcccaagtagctgggactacaggcatgcaccaccatgcccagctaatttttgtatttttagtagagatgagattttgccacattggccaggctggtctcaaactcctgacctcaggtgatccaccctccttggcctctcaaaagtgctgggat

SEQ ID NO: 76767 - DNA, 1203 bp, Homo sapiens
cctggcctatgtccagaaattcttaacatgtaacccaattcactcaggttttagattaagtatgtttccttttactctaaatgctatttgacaagtgaagtattgtccctaatactgcacctattttttcttttttcagtttttatattttttatagagatgggggagggtctcactatgttgcctaggctggaattgaactcttgaactcaagcagtcctcctgcctcagcctcctgagtaactaggaccacaggtgtaagccagtgagcctggcttcctttcttttacttacagttattatattccatttatctaccttgactacaccatgggcagttgggcagtgatctttgttacatttcagagggcagaattaggaacaatgagaagttagagagaagttggattttgttttggggtttgtttatttgttttgccacactcttggaagaactttccaaatgtccaagaattaaatggaccctcaagaagtactgagtttcctatcagtggtaatgctcaggcagagctctgcaattaactatagaatgttatgagatactgcaggttattaggtgggagtttagatcagatattcttttcaactacatgaattaaggattctattatttttgctttcaacagaagatatacaaaataaacagccagtgtccatcttgaattgcaccattgtttataatatttctgtttttttaatcttacagtcctctctgttataacagttattacttattaatggagatagcaatgctattagtacttgtattgaattagtaagtgttctgatagaaaaattaaccagctttgccgggcgcggtggctcacgcctgtagtcccagcactttgggaggctgaggcaggtggatcacgaggtcaggagatcgagaccatcctggctaacatggtgaaaccccatctctactaaaaatacaaaaaattagccaggcgtggtggtgggtgcctgtagtcccagctactcgggaggctgaggcaggagaatggtgtgaacccaggaggcggagcttgcagtgagcagagattgtgccactgcactccagcctgggtgacagagtgagactccgtctcagaaaaaaaaaagaaaaattaaccagcttttcaaacagcatttagagtaaaaggaaacatacttaatctaatacctgagtgaactgggttacat

SEQ ID NO: 76768 - DNA, 1045 bp, Homo sapiens
agttcatggctgacatgatggaaggaataagcagctctgcctgagtgggggtttcaggaaaagcttcacagaagagacactggaagctgggtcttgaagagcacataaaaatctgccagatggacatcagcagtactggaatacgaaagaggggaggagtgatgggcctgtttaagtaattagaataacgtggacaggaacagaagtgtgaagtcacatggtgcatttgaagacctgctagttgttcctgtgtagcaggagcatatggaagaaaagcaagagacaaagttgttcattagatgtgagctccatgagagccaggacctcacctggcccattcgttattgtatccacattgcctagtgcataacagatgcttagtaaatatccagtgaataaataaataaagaggtaggtaagggccagatctagaagtgatttttgtctaaattccacaaagactgactttttttgctcttttaggacttgtatatcttctataggttcttaagcataattattaatgggcatttgtgtgtttttggggtaaatatgaactattaaattatttgattacctgccagaactcgtagtgccacattttgccaaattaccaacctcaaaaaaaaaaatggaaataatttttattgaggtgaactctataataccctgtttaactttatagaagttgccttggagtttaaatgttccattttctccctgattaaaaaaggaagagatagaaaagttagaggtttttatttttttagtttgatgtttcatattagactacagtgtgatatattatagtttctataagcagtagaaactataaagatagatataaactgtccagaattaagtactgagagaaaaatattaaaagcaaaattaatagaaccttgatattgtgggacaatatcaagcagtttaacatacctgtaactagagttccagaaggaaaggagttaggtacaggccagaaaaaaaaaaaaatttttaagacataaatgatcccaggcatggtggttcacacctgtaatcc

SEQ ID NO: 76769 - DNA, 1063 bp, Homo sapiens
gaatttattgttcagtcaggttgagaaaataagccatatttattgaaaccacaatgcaaacaattaaaaatcaaattatcagttaaattatcagctaagtaatgtagatgctgatttgtccaaatcagccaagtaatgtagatgctgatttggacaaatcagcatctgtgaagtaaaagaatgatcgcagtaaaattggattagcgaggtcatcatttacatatacagttgttgatagtgtgagggcaaagtattaatagtagaaatttagttagactagtggaattttaacttaagctattcctttttgtgacttgttagctatcaaactggcctggacctgaaagttagtcttgctacctatctcaaaagcttcttttgagaagattcagtaagtaaccaaggactctttctctccacttgccagcaaattttgtagaagcaacatgttaagccgggcagtttccctcatagttgttttatgggcaaagtgaaaattgtattcttagattcatcagtatgatttcttaaatatttaagagagagaaagcttggaaggtagtagctccttattattaggcttaacctgagtttgatttggtagattttaaaaaatatgtaatctgtgtttgattcttggttgtatgtaatttgttcctcatctaaagaatttaacgatggaaataaacattcgtgacatgaaaagttacccttctctctctctctctctctttttttttttttagacggagtctcactctgtcgcccaggctggagtgcagtgacgcgatctcagctcactgcaagtttcatctcccgggttcacgctattctcctgcctcagcctcccaagtagctggcactacaggtgcccgccaccacgcccggctaattttttttgtatttttagtagagacggggattcaccatgttagccaggatggtctcgatctcctgacctcgtgatctgcctgcctcggcctcccaaagtgctgggattacaggcatgagccaccgcactcagccaaaaagttacccgcttctaaagctttttctgtccatc

SEQ ID NO: 76770 - DNA, 1773 bp, Homo sapiens
tcaaatctgtattcttaggttgtagggttccattaaaaaaaataaataatctcagcccctcctccctccacccccgtttccccccacactcattttgtataatatggtaatgatatcaccgtagcagtaattacgggtcatcttcatttctttcatctctgcctgttctggtggcttcattcctttgacgggaaagatttggctctgggtgctatgattattttgttaagcgttattcgaatagacaggagtgagagaaattaatcaatccaaatgcaattagcatcatgtttaacccagtgatggacgtctcaaggtgaaacagccaggggagtttcagacattattattcaatccagtggttcttatctaaattataatcaagagaggtttttattggcttctcagtgtgaagatgtaaccctttcccttccctgggggtcaagaagactaggccttcatcatccctagacgttagctgttgccagctgccagccccttgaagtcagatagacagggcaggaaagttgtctgaatatgcaggtcatttgaaattatctatactgtgatcctggtctgattttcctgagagtggaacctagcctatgaataagctactctgtctaacttggggcaaaatattttgtgttctgatcaagtcactttgactagttgttgttcttctatcttaaccttacatgatagattattattgctgttcttactttatggatgaggatattaagtctgtgaagctactagcctttggtcataataagtgtttcaccaggatgtattactatgtaaaggccctgaagcatgaatgttctgcacaaatttatgagtatttaataaaagttctagcccccagagtattaattcattgctctgatctcattgcctttcattcaattgagttgtacccttgaaaaggaaaccaagtaaaactatgaaatagacctgtcaggtcctcagaaaaggaaacaaagtgcagctaagaagttgttagctctcatttctcgaacacagatctttgggggttttttgctgttgttttggtttgtttctagtaggaagaaggatgataagaatacatatttgaaatctagtcttgttttgctcttaaaagagggcagagcaaggagagttgatggagaaacagtctttcacttgaatgcaacatttttcaaatgcctgacaattaagattcttctacttctgccttcaatcatcaggcatcatggctgacacttcccatattttatgttcctgcttgatgttttatattctgaaaataaatctgttggttggatatttctgtccttttttttctgttatgaaaagccattaaaattattttccatattggaactgtccaaatttgtttacctgcacattgagtcctggcttttctttttcatattacttcttggataaaacactgtctgcaaatgggtgttactatgaattgaagaaaaaaagtttgatataaaattatctttctcaggctgggcatggtggctcatgcctgtaatcccagcactttgggagactgaggcaagaggattgcttgaggccaagagttcaagaccagttcaacatagcaagaccccatatctacaaaaaattaaagttataaagtaaaataaataataaaattttctttctcagcagtcactggagggaacattgttcttggccactgcacgcttttggaagaatcctgataaagagccaagatacccaatagaaagataatctagaaagtgtgct

SEQ ID NO: 76771 - DNA, 1046 bp, Homo sapiens
gttactctaaaagaaatgaatcttagatagttttcccaccaggcatcctattgcttaagtaaactttctgtttgaaatgaaacaaatagttttacagtagctagcatttattgaatgcctgtgtgactttgtattaatcctaccttgaatgaatgaggaaaggagctcagaaaaataacttggtaatttgcctatgtggcccagggtcaatgtaagagctgaagtcctgctcttttcacaatattacattgtctcctttgtttcctggccactcatattacaatctcctaaaagcaacctgttattgctcttctgaatatgagaaacccagtggaaagtaatttgtccccgcttcacaaacatttttaattatgttgaggcatagaaatatttaaagtagtttgcattggaattgaaaaactgaactatgagtttcttccacttcattaaaaagtttcttaaaatttacattgttccctacataaaagctgagcagaattttatcaggcaattgcctcaaagttataatctggacaatctttctgtaataaaacccatatgtcattggggaaaggtgcagagccctggcagagagggctggtcttgagagaggttctgcacccaatctcgttaaccagggtgcctctggtaatccctcatccctcaccagtgagaaatcaatctgtaccactgaatctttttcaaccagccaccagaaaaatttactgcagagaaggcagtttggggatagttatcgtggaaagtgagccagaagcaaggctaaatgtaggatggaggaattggagagtctaaagaagagattatattaaaccacacaccactttcagagcaggcacagtggagtcctcctttcagccctgacctctccaagtatacccaggtatttacagctgccatgaactggatagccctggaggaactacgaaagtggtgggggataacagaaacagtggaaacctgaaagttgattgtagtctatccatttgctgtctctcagtgtgtagtagccagtcccctctccacac

SEQ ID NO: 76772 - DNA, 1772 bp, Homo sapiens
taccaagctacaaccattgtgaagaagaagggacagaaccaggcagtggggaatagaaatggctttctcttctctgtaagcaggcagtagtcatctctaaagatttttccccaaagagatttgaaattcctgatgggagcttaaaaagctaagagtaaaatacatttatttataagaccctactagaagaggtgtgtgtgggtgtgtgtgtgtatgtgtgtgtgtgtgtgtgtgcgcgtgtagacgaggaatacagaatagtagcagaaggctgtctccctactcctaatgggattttgtagcagtatgtgcaagtttgtttcagaagtcaaaaatgaacagatgttagtataaattacctctgtgtctgatgtcttgcaaattaaaagcgcagttggcatcactaaacaatttcactaggtttgggggggttcggttagcgggcggtgattactgtagcaggtcggtaagaatcttcgccctgcagcagagcaaggataaagaaatgaggaataaaataagggctatatgaattaatcagaaatgttaacatctctgatgacaagtgaacaggagggcacgtgctctggagcagcccctgacccacagcaatttctctgtgcacaaaaaggggttggtgcttagcatctgatttatagggcacagccctcttttagggagcggctgtgtcatacattcgtatatctcctgtatgggactggcgagtaggaaaactttctctcctcccatgtaggagatgatgtcttttgaattacttctacttttacagtggtttcctgcagctctgtgtacttggattaggttgaagggggaggaatgattgagtagaaaaagggttgttaaaaaggattggttaaattcaaggagagcttgccactgagagacttcagaatatctatttatttttccttttaaacccttttgaccccttaaattgtgtggatcttttaaaattctaagtcttaaaatattggtcattttcccatttggggaaaaacagtaaggagttggtgagtctgaaggtcagcaggcagaaatcattggttagagcaatgcagtgctccaggcccaggatttttggaacaaggctctattctctccagaagacttttgtattgaccgtgtctggtttccagagctcctgcttctagccatgttgcaggatcattagttacatgtttaaacttgagagtagacagataacccatctagtagaaataagtgagacccaatctgcccaaaagtataagtaaatttcttttccttcaagctgagggaaaagattccaaggaacggagttttgtttgctagcctccctttgtgcagtttgttcattcattcattcattcattcactcactcagaaaatactaagtgcgagagaacttacccccctctggaaagtgttgtgttaatgattagcactataccaagcatgttcattgctaatatccaagagaaaagtagggtattaacatgctctccgttacaaatgaagagactgaggctcagagatctgcccagcccaaggtgtcaccctgctgctaagtgctagagctgaaacttaaactgagttcaaatcctgtgttctctgcaagaagcccatgctacctcctatgggcaagacagtacttgattggattttctctagagtagttagtccttgaccccagtctctccatgaacttggcattatttgcattaagggaaatgattttcttgccaaataagcaaggcacatttaaaaagact

SEQ ID NO: 76773 - DNA, 1024 bp, Homo sapiens
ggatactgtaatataacagggtttatattccctcagtgcagttcatctgtggatggtgtcataaagtagggtttatagagctttggtcttctctcccttggcattgtcagtccttagctatttaatatagccagccaaggtttatgtgtctttctccggctttcagcaccatcaatctttgaatgctatagttacaagtgggtttatacagctactttcctacatataaggctccaaaatgaaagtaaaacatttctcaattacaagggctactccagaggtctcccattttagatctcagaaagcatacgtagtgtaacagccccttcctcatcctcatcctcatcctgcaaggccatgttttcagatttcttaaatggatttaacagtgcagaaagtttctgatcgctgatggctggctctggaagccaggccttctggaaccatgcagtaggcacggggtaggctgtgtggtctcccaagaacacatctccgtcctggccaaagaagtgaggtggctagggaggcactctcaggaatgagaaggaccttcaccctggcctccttgttgcctttcccaagtccagagcaaatggagctagatgaatggcctccagctcccctctgccccaatttaagtttaacagtttcttgttttcttgtacaatgaagaaataaaaactacacaacctctgggaccacagggaggcttttgtaacttcagtctatacattccccatctttcactagttcctgtgccccaacaaagggaaaggaaattccattaactaggcatagaagcccagtgttgggtcttgcctcatgtgctcacaaccccaacccagaccaaatcaaacagaccattccttccttcatggatttacagcaaatcctgtacaagaaagttcccataagacttgcatgcaattactagcttatatggttgtcttcctccactaaaatgtaaaaactgaaggcagagactgttaagagctttggtcttctctcccttggcaaaagatcc

SEQ ID NO: 76774 - DNA, 1800 bp, Homo sapiens
atcattcttaaaggtcgaagtcctgctttctcatttctggaagtgattcaggagccccaggatcttacggttgatttgactcagtcatggcagtcagttgtgacatgttgattggatgggttcttttgaattgttcttgatctcttagaaagtgtttacgatgtgaggagaccagagaccaagtagattctggaccagaccatgcagcctgacctgtgaactctccagtatatactaagttcccagaatccccagctgaagaaaccagaatcttctcgaaatgtatatctgttttttaaaacttctatacctcttatgatagtcccatttgcttttcattccttacttcccagccccaccttctagttctgacttcgggcagagggatccctgagtccctcctggaattagcttgtatagtgaaaggcccatccaaggttgtctaaagaccaatgtgaaggtgacagaaaggacttttgagttctaattaatctgttacagcttcaagcaagaaagtcagtatagcctgaaagacaagagaaacgggatggtttataggagttcccatttggttgaaagctagaagccctaattgaccttaaagtaacatgctatgggatggtgggattgtcccctctgacagcacatatgaaatagttcatctatataatagaaacgcacacacacgaaaaagaatcttctgacttaaatacaactttcatggagttcttcaccacttatctgtctctgttaaaatctgaaaatctagcccatggctaaaatctattatatgtgttctccatatttcttgtataagccagtccccagcatctgatgttttgagaagtgcatggagtttcctaaactttgcacaaaagaatatcctggggccgggcatggtggctcacgcctgtaatcccagcactttgggaggccgaggcaggtggatcataggtcaaaagatcgagaccatcctggccaatatggtgaaaccctgtctctactaaaatacaaaaattagctgggcatgatggtgcatgcctatagtcccagctacttgggggcctgaggcacgagaatcgcttgaattcgggaggtggaggttgcagtgagccgaaattatgccactgcactccagcctgggcaacagagtgagactctgtctcagaaaaaaaaaaaaaaaaaaaaaaaaaaaaagaatatccctgtggcaatagtctgatggtgtttggacacaagaaaagttatggttttgagtcgtgagtgtttgctagggcatggcactcttcagtttaacagctgatccattaaaccttttctgacatttgtgccttgttctcatgctagaattaatgctggatttttctctcatttgaccatcaatgtagttttacttattgaaaggaaaaaagacttaacacaagataggaaagatgagtatgagaagtaaaacattctgctggggtgctacatagaaggttaggttgtaggggctttgattttaatttaaacttattatcgattgatatttctgtatctcactaaatgcggttgaagagtgtgtgtgtgtgtgtgcgcgcgcgcatgtggccaaaaaatagtgccataatgtcaaattcttcctttgctctgtttttgagagttgatgacatcaggcacttttcagtgtttggggaaattgattgggatacctcccccaaaccaactcaagtctgtaactggaagccaggtggttggttttctggtccgctttgtcctctttcttttaccgtcatcctattcaccagcacttaatgtaag

SEQ ID NO: 76775 - DNA, 1047 bp, Homo sapiens
tgacagtctcctgcccatatttctaagctctctgggtctcgttgtgctatttctctgtcctctctggggtttgtaacaccaatcatctgcaggtttcattagcatgctgtttacccctgtctttcagatcattaatgaagatgtgaagtgagacaccaatcctcacagcccccaccacgtgctccctcccatgcctggcgctgctggagtcattatccttcctggtgtgacagggtcagaaccaaaccaatttgcatcagtctttggtgatgttgtgaagcgtcgcctgccctgcaatcctgctgctgtaacaactgcttcagctgtctgttctggagtgctcttcgctcctttggaagactgatcagatctggccaccccagttctggctgaaagccctagagcgaccgcaatggtagggcaggattcagggctacacatggctgacattgttccttcttcgttttgctcttctgagctggacagaaagcagtccctctttggaaaacaggatggacaagtgcatacattagtggaggacgcagcagatgtggcaggcatagaattttactcattgctccatctatttctatcaaggaaaatggggagtgctcccaatttccgcccattttctagcccaggcctagtcagatgtgtgggcttgtatattctgggaacctggggctgatgtggtcaagtcacttcttggggacaaggtcaattcttctccattttctcatgtcatttggtcctgagggttttatatcttctttagcaattccatgactatgcttctcatcctgcagggaaactgactttatatacacacttgtctcccaataaaagtgagaaccacctcctacatatcccttgtgtcttccagactccaactcagatgaaatgcacttccttctctttcctgattgtgcagcgcctccaactggttgtttgtgatgaaaacatgagtataattacagactcttctctgacccatttctactcctgacccccaactcatcttttcttccttctctccaattgggaagg

SEQ ID NO: 76776 - DNA, 1012 bp, Homo sapiens
cacttttattgggagacaagtgtgtatataaagtcagtttccctgcaggatgagaagcatagtcatggaattgctaaagaagatataaaaccctcaggaccaaatgacatgagaaaatggagaagaattgaccttgtccccaagaagtgacttgaccacatcagccccaggttcccagaatatacaagcccacacatctgactaggcctgggctagaaaatgggcggaaattgggagcactccccattttccttgatagaaatagatggagcaatgagtaaaattctatgcctgccacatctgctgcgtcctccactaatgtatgcacttgtccatcctgttttccaaagagggactgctttctgtccagctcagaagagcaaaacgaagaaggaacaatgtcagccatgtgtagccctgaatcctgccctaccattgcggtcgctctagggctttcagccagaactggggtggccagatctgatcagtcttccaaaggagcgaagagcactccagaacagacagctgaagcagttgttacagcagcaggattgcagggcaggcgacgcttcacaacatcaccaaagactgatgcaaattggtttggttctgaccctgtcacaccaggaaggataatgactccagcagcgccaggcatgggagggagcacgtggtgggggctgtgaggattggtgtctcacttcacatcttcattaatgatctgaaagacaggggtaaacagcatgctaatgaaacctgcagatgattggtgttacaaaccccagagaggacagagaaatagcacaacgagacccagagagcttagaaatatgggcaggagactgtcaaatgagactcgtcctaggaaaatgaaagtcgacacgtcagggaggaatgatgaaggtgcctctgggtgggggcctgcaaacctgaaaagcagagatgggtggcagggtcaggaggttgagggatatgataaggtttggggtgtgttggagggagacagaggagc

SEQ ID NO: 76777 - DNA, 1108 bp, Homo sapiens
cggccctgttaataccccacttctcttacgtgtctttgctgaagtacccacaagccctcactccctgcccactctctccctcttaaggtcagggcagacacctccatccggacccttcctccctcactgccttggcttcctctactcttggccttgggactgccccacctgaactcctgggtcggcccagccctcccctaggtgatcgcctcagcctacaggggccgggagagctggggagggagaagcagcggcttgcatcacctgaccctactcagccaattcacgaagacaagatgtcaagttaatgagcctgtgggcctctaattagctgtcaattacctcaaattaatcacctcctcgcctaattaagcattatcggcaggtgggcacaaagcagaccattgtgtgagagccatgagaaaagctgggctggcaaacttggttaggatcagctctgtgcactgcgcccgcctccccacagcgctcagccatgggcccagctgagaggccctggggccctctgcccaccactgtccccagacactggggtacttggggacctcctgggaagctgagtggactggaagggaggtacagagcctagaggcaggtgagacagctttggggcagtggggcggtaggaactggaggccacggagaagggcggagcttcaaggcgtggtgaccagctccaggcacttactgagagccaaggcgagagctgggcagaggggacaccaggttgtggctgggcgtccaggcctgtgcgggcaggcagagctggcttccaatgctggcctggccacttgtgagttctgtgaacccagaaagagacaatgtttttgagccacagtttccatccctgggaagaaaattttttttgttctaaacactgtcctgggtctttgtgagggttcagtaggatcatgcttgtggagcacctgccacatggtaaatgttcaatgtctttactagtggcaacagtggacatgggtggtttaagacccagggccacctcacctaacaactgctgaagctgtattgtatccccaaattctgagcccccgggcctcaagcctgtagtgcacccttgaaaaatgtgagt

SEQ ID NO: 76778 - DNA, 1028 bp, Homo sapiens
cggcacagggcagggtgaggctgggggccacctggacagctctgcgctcccactgactgtcaaaggccaccactcccatgccagatctgtcccctcaccccaccctagccgccccttgtaatctgtacccactacttcagccctggcacaggaagacctttccctatctcctgtggtaacagagacccttagcctcgccgccatgaaagcttggaaacatctttcctctccttggtctcggtcatttagcaaacattgtaccttactaattaagctcactgtaaaggggtgatggtcaggtgaacacaaatcattaatggatgctctggagagacaaagaacaaaaaaaagctagcacttattaagtgcctactgtgtgctgacaggagtggtaagagattccgtgaatatgttacacctgtatatactgttatgtttaatgaattatttatcaaaatagataatacatatacacacaattttttaaactaaaataagggtgtagaggaaaccacaggcttccctcactcccctgccctccagccatctgattctgtttcccacaaccaaccagtaaccagtttttcatacacttttccagaaattaaaaaatatttatatgtatatacatatttcattttcacaagtgaaataaaacgtactgtccatcttccttttttaaaaataataccgtcagccgggcgcagtggctcatgcctgtaatcccagcactttgggaggccaaggcgggtggatcacctgaggtcaggagttcgagaccagcctgaccaacatggagaaaccccatctctactaaaaatacaaaattagcctggcgtggtggcacatgcctgtaatcccagctactcaggaagctaaggcaggagaatagcttgaacccgggaggtggaggttgcagtgagccgagattgcgccattgcactccagcctgggcaacaaaagcgaaactccgtctaaaaaaaaataaataaatactgtcttggagattgaatgtggaatagcagcac

SEQ ID NO: 76779 - DNA, 1198 bp, Homo sapiens
ctgcctcaacctcctgagtagctggcactacaggtgtgcaccaccatgcctttctatttttttttttttttggtagagatgggatcttgctatgttgcccaggctagtctcaaactcctgggctcaagtgatccactggcctcagcctcctagagtgctgggattagaggctagaggtgtaagcgaccacgcctggccctagttttgtttcttaaaacccctgagcccctattacttggggaaaatgaggataataacggctcctgtgctcacacagcccttctccccagccttgacccctgctgctgctccctggcctggctccacagaatttgatgaggcagcagcatatggaaggcccagcactgtgtctgatccacggggaccgctcgatcacaagctctcacagaagtctcccccaaaaggattcttagtcagctgggaggaaggacgcctagcaatgggccagccaggggggcagaaggagcaggcagcagccagtttgagtaactacgtggggtcacccactgggttgtcactcatgggggctgaggccaacccagatcttcagggttctccctaagtggccccttgccccccaaggttgcctcaagtttggccctgtggctcctcctgtgtaccttcccccgaactgggaacccctccccaccttctgctcaaggtctgaatcccttcacatgaatatcctgctctctgccttagtggctggacgcttctcaaaggagatgcacgctccctcaggaggctccaggaccctctgcaagccatcacaaactcatgaggtcttggtacagacaagtgtgacaaaccccttcctgagagcctgtttggcttgctgaggggagagggtggggagggggcccttgtgcccaagtaacccccaccacacacaccctactggagtccccacaccaggagggccggaatacacctctgacctccccagccttcctaacaaatccacttgaacaggaaactcatgttgacagcattctattatgggatattaagtggaattggattgtggggctaaacctttccctggctgggtttctgcattcggttggcctcctcacctctgcgcctaccacagtccttccctccagcagggctcgacgggagggaggggggtttcctgcccaccttcgtcaaattattcccccagactctgtccccg

SEQ ID NO: 76780 - DNA, 1009 bp, Homo sapiens
aagcaagagaacagagagcaaggggtggccaaaaccagtgagcgttgcaaagggattgagagaaggggcttgaggggacgttgtgggcagcaagaaggcttctgaggctgggatgctggagaggtcaagactagatgagggatgtctcagcatggtccagagtcagaacccagcggtgcctgcagccaccaggggtgatggaggacctgtggggaacagggaggatggcagaggccaggtctgggccttgcctcagagagcatctcccagcaccacagggcccgaggagagcagagtcttggggctccggcatctgagcgcgccttgacctaagccatgtcctccagctgcggtggactgagcctctccgccggcctgtcttcatccatggcctcctcctcctctggcttctcggtactccgggccaggctgtccggcccagacacagtccccagcactttggtgctgtgctcctgagctttggcccggagcaccgcaatgctgttctccctcagttcctcctgggagatggccgcctgagcgtcggggccccgctcgtcctgctccatcttgtcgagcttgggcagggcctggcgttccccctcgggcttcctccccgactcggctgctgcctccagcgactttttgtgcatccctagaaagaattgttggtattcgggtttagaaaagcgcctgggaaagccatcttgaactgaaaacggcaaagatagagagaggccagaattaaggacgagcagaaagccttactccccacaccgcagtcacacaagtcccagggctggaccagggtcagggaatggggagatgggtcgccagccctgtggaggacctccccctgccaaagccctgggcacctgggcctcgggtggcctgttctgtcccttccaggccacagcacatgctcccctgtccctcccccatgggattccggatcttagaaccccaagaggagctggtgctgttctcagatataggcccagagggcagg

SEQ ID NO: 76781 - DNA, 1057 bp, Homo sapiens
ggcaccgctgggttctgactctggaccatgctgagacatccctcatctagtcttgacctctccagcatcccagcctcagaagccttcttgctgcccacaacgtcccctcaagccccttctctcaatccctttgcaacgctcactggttttggccaccccttgctctctgttctcttgctttaaagagtcctccttcccagctctacattctgctctgcccatgcctaaagcccattgctgcaaatgcattgtgaattgcctgccatggctgtgacacagacggaggactggaactgcaactccagcgtcctcagcaccccactcctcagtaaaagtcttctcccaactcagcctgttccttcctgcagacctggctgggcctgggcttccacagtgtgaagacactgtgcaggcccaggcaggcccagcctctgccccacccatcagtggagtccagatggcaggctacagttgggaagtctcagcctgggcccctcagccacccttggtctcatgccccgccatggtcaccctcaggaacccaccctctccacacccagcctgtcccactggctcctcccagcacaggcacctatgtggcatgtggtgatgtacgctgcgtgccatgagtccatgtcctatgcctcacaaatgctgtggttcactgcactgttcaggagtccaaaccttctaccctgggtcctcgggcccctgagcctgtgtcctgaagaatctcgactctcgtgatatgctgcttgtgaccttgacttgccatgaaggcacctgcccccacagctccttgcaaactatgagttcacatgtgccctgccttgaacaacccaatctggctggtaaatgacatctacgaagccacaggcctggcctcaactgagaagccaagcctggagtaggcctggggctatgcatacgcattaagggcctgctggagaaaccttcactccagacagacagggggctaaggggctagggctgagcacctctcagagcaagcctttgacctgttcagaaggatgggaaaaaggctggaaggaaagca

SEQ ID NO: 76782 - DNA, 1356 bp, Homo sapiens
ttcttttttcttttctttttttttttttttttttgagacagtctcactctgtcacccaggctggggtacaggggcacagtcatggctcagtgcagcctggaactcccaggcttaagtgatcctcccacctcagcctcctgagtagctgggactacaagcatgtgccaccacaccctgctaatttttttatttttatttttgtagagacagggtcatgctatgttgcccaggctggtctggagttcctggactcaggccatcctcccacgttggcctcccaaagtgctgggattacaggcatgaaccactatgcctagctcataagctttttgcctggcagcagctggagccaggagccaacattgaagggttataattttatgctcctctggctccaccatcaaatgaatgggcacccatcctcctctcccaccaagctgtgcctggcaggtggatgggtgtggacttttccaaagactgacattcttgcgggggactgggattccctggattgagtggtcccagggagtggctggtgcttatctatagaagctgagagatttcatgcagctgctcacaggctattcccttggagagtctggccctctgctcctctggcccatccttctccctgaggcagggcttctggaagccagagcagctttcagcctcccctgggtcccagctggggttgagtatgggtgggaggagaagcagcggcggcagagggcagggctttgatctcttcctctgtgctctgccccctcagtgcttgatgaagccaccagtgccctgacagaggaagtggagagcgagctctatcgcatcggccagcagctggggatgacgttcatcagtgtgggacatcggcagagccttgagaaggtacccgtgctcacaaggatggcctgaggaggagaaagaacccaaaggctcagcctggccagggccagaggcccctcaaaacggggagtagcagtagcagagagaaccgagtggcctcctctgccagcggccagggcagcctgatctccatgtggtggtggtctcttgtagtttcattccttggttctgaaactctgtggaggaggaagatgggagctgatgagaatcaaagtggaatgaagctctggcttttggaaggagagccacactgtggcgggtcggcggccctcaggagagaccaggaggactgacagcgaagatcgagctcaggttcgccacatagatcccgtgcaggagccacatgggtcctgtgcaggacccctagcagtggtgggctgagcccaggtctaggtttctgtgggggacactgaatctcccagtgttcagtctcccaggactctgctgcctcag

SEQ ID NO: 76783 - DNA, 1047 bp, Homo sapiens
gatgagaggatcttgaggttcttggaattggcaggcctggtaagtggggagagggaccctcaggacccgagcccacctgggagcaccagctacaggtaggcaggtgctggccctgctatgcttgggcccaggactggaagtctgaacctggggtggagaatgggagtatcagttgacagtgtgtgctgttggccaggtttaggcacgaagggggtagtgctctcattggagaattttaaaacaagaataggattgatgaaggcggtttgctttttactgtcatcatgctccagcaagtctaaacagtgtcattggtagaatattcctctctgcctggggcagactgtcccacagtcccccgccttggtatgccactggggcatatatttgtcttagaggtgtgtgtgtatgctggggagtgagggaggttccccatgatggcaggtagcagggctggccatttcatggacatcctgccctctgggtctgttacagtccaacttggtggcaaggacagagggcctggaccagcaggtggactggaactggtaagaaaagagcttgggtgctccagagatagccccaccataaagacagtgggtttcagggtccctgtcaaggaatggaacggctcctgaccccaaagtccagatgtttggctggtcagtcgggtgcaagtttatgcccttgggaacagagttttgcctcactctgtgagggctgtaggcctatggtcgaaagggaaggggcttctgtctcctggggctcacctctgtgcagagaaacctcttcctacccagaccattctaggtaaaagccaagctatattcttcctcctctagcagtcctctctcctacctttcctcaggtatgatgttctgtccccgggggagatgcaacggctctcctttgcccgactcttctacctgcagccgaagtacgcaggtgaggtctcgccttgtggctgcacatgccatgcgctgtctgcactcacgggtgtagcagcatgtgttcacaggcacccaggcacacctgtgaatggctggg

SEQ ID NO: 76784 - DNA, 2244 bp, Homo sapiens
gcatgaaggagggtctgtaggaaactggaattgctgttctgtggggagccaggcatccatgcagaggcagaaactccagaaccatttagctttaaccactcccattcttgttattagtactctggtcacactgtgatgccatgaagacccaccagcattagaatttgttgaataccgctctgcaacctgggcagttacttagccacctgattcttagtgtcctcatctgtgatgatatttgagactcatgggcattagactgagtaagatcagtcccataaggggctttgtccagccaggcagagagtagaagttccacccctacccctgtattaatgtgctcaggctgccatgacagaaaaccacaaaccggctggcttaaacaatagaaattaatttcctcacaattctggatgcttatggtccacgatcaagttgtcagcagggttggtttcttaggccactccttggcttgtagatggccaccttgttgctgtgtcctcacgtggcctttcctttatatgtgcgtgcccctgccacctctatcttaagaggacaccagtcatattggattagggtcccaccccaacaacttcatgttaacatcatctctttaaagaccctgcctccagctgggcacggaagctcacgtctataatcccaccactttgggaggctgaggtgggcagatcacctgaggtcacaagttcgagaccagactggccaacatagtgaaaccctgtctctactaaaaatatgggcacggtggtgggcacctgtaatccagctactcaggaggctgggacaggaaaatcgcttgaacccaggaggcggaggttgcagtgagctgagatagctccactgcactcaagcctgggtgacagcaagactttctctcaaaaaaaaaaaaaaaaaaaaagaccctgcctccgaatgcagttacattctgagtcactagggggctggacttcagcatgtgattttgggaggatgcaagtcagcccataataatccacaggtggtggctcccgggagcagtgcctcccccacagcaatactgaccctgcccatcttcctcacgccccctctcttctctgacacagacccccagggtggccagcggcagagccagcagacacagcatttctccttgagcgggtctccatctctgccccctcctctgacaaacccctaatcaaggatctgagcctaaagatctccgagggacagagcctgctcatcacaggcaacacgggcactggcaagacctccttgctccgggttctgggtggcctctggacgagtacacggggtgagagccaggccctccctgcctctgacccagcctgggccctaggggtggggtgaaggcggggacggtgtggtagaatccattcttttctgttggggaacaaggaagagaggagacaggcagttgcctcttctgggagatctcacaatggaggtttctgtgggctctgcaggctcagtgcagatgctgacggactttgggccccatggggtgctattcctgccacaaaagccattcttcactgacgggacccttcgggagcaggtcagtctagttcagggggctcactcctccctcctcaaccccgcccacccacagctgggacctctggcactgtgacaagtctcaggtcctagagtcagggcaaaaggtgaggtggtgaagtggcccgggcctgggaactgctggctctaagaaccttctattcacatccatggattgggcccactactcatagcagctcctgaggcaggtaaatggggcaaggactcacgccaaataccacacgcgtatgtcaaacacccaaggtcggattctggggcccctgccctcaggaggctgtcagactgttccccctaaacacacttctgaaggttgtagggaccttgccctgctgtctgccggccagagcctctcccatctgacccaggccaggcgttcccacctctcctccttgggaggttccagtgggttctggagggagggtgggctgtgtgcagctccgtcttttgctcgccctcctaggttggtgtggtttttttcttttctcaggtgatatatcccctgaaggaggtctaccccgactcaggtgagctggtcctccttaggtcatgtcctctccttctgtcatggttgtccctgctctacctgactgtggcctcatctgtgcccttggggagaggctccagccaggccgctgattcaaggaagag

SEQ ID NO: 76785 - DNA, 1613 bp, Homo sapiens
tcttcacacagacaataccattaaggcatgactgaagccgtgaatgggcgctaccagtagacagatcctgagaccaagatcatttgaatggccttggtttctaaaggagggtgtgatatgggacaggcggccccccaacctggctgaacctctccagccctgtggacatcccagcctttccttgtcagagctgggcatgtggagcacatgaggacagaccgcaggctgcagagactccttcagacccagagggagctgatgtccaaggagctctggctgtacagtaggcgagggggcccagggaagtgggaaccatggggttggactggtctgcttcccttcccacacctctctacctcctgtctgcaaggataaatgtgccatgatgaaggaattaaccggggatgaggagggggggctgttgcctttctgtgagtatcctcaggagaatgaggatccagagagtccacgtggccctacttggcgtcctgctccctgtcttagggttgtgtccgctgtagggcatgtggatggttcctgggtgtctcacagatgtgttttctacagtcggcatcaacacctttgactatctgggcagcatcctgagttacgttgtcatcgcaatccccattttcagcggggtctatggagacctgagtcccgcagagcttagcaccctggtcagcaaggtgagactccctcttggtcaccccacatgctgtccctctctgtccttggcccagtgtctgtgggctcgagtcgagacctgcttgacctcttcccatcctgtccagaatgcctttgtgtgcatctacctcatcagctgcttcacccagctcatcgacctgtccacgacgctctcagatgtggctggctacacgcacaggtgaggccgtgtcccacccctctggctcctgagcaaagtgtgtgctgctggcagaagtggctgagtgaaaaaaggaacagagacataccatgtactcgtgggtgtgagataggaaaaggagttcaccttcacctggctcccagaccctgcctcagattttcttttcttgttcagaattgggcagcttcgggagacgcttctggacatgtccctgaagtcacaggactgcgagatcctgggcgagagcgagtggggcttggacacgtgagtagcgggctggcagagcagtagttgaggctgcaggctgtggcatcacctggcttgggttaccctggagtcctgccctttcccagctgggcagcagagttgtaaggagtaaatggaaatggaatgccaggcacatgtaagttcacagtcgatgttgctgttccggcatctgttgtgttaatttacaccattccccggccagtggaagcaaagtacacacaccttctgcctgagataacaggaatctgcagtgtcctccccttcctgtgcttcctcctcccgctgattcctctccctgcccctttccttggggcatgtctgtctttgttcccccacctcactcagccccagagatgtctgtatccgtgtgtctgcgtggatctgtaatatttctgtgcattcaggatttgcttgatctccacactttccttgggcagattacctaactgttctgtttctt

SEQ ID NO: 76786 - DNA, 1011 bp, Homo sapiens
agaggattaggaggattaatgaaatcatacctgagaaggtctgagaaccgtgtctgcctggccatcaccatcgtcattgtcatctcttggccttctcactgccctggcataaccgccctgtcttggatcagttgggtgtggcagccaatggatccagtgcctgccctgtgcttcttgtccccctcctttgggccaggccctgggaggaggagatgctgtgagcaggaatacccctgtcctctctgcagaaagctgaggggcagccctgtctctgcagagctcctgccacaccacctagccctggggttttctaccccataacagtccaggaaagggtcagactgaggcagccacggttttgaggcagagccgggctccgcttgggcggtctttgtgatccaggactccaacaagagtgaggccagtactccctgttgtcagcacacatttccctttggtccgcccaggttcaagcacatgcagattcgggtgaatgcggagcctgctgctttctacaggtgagtctggagagatggttccccttctgccttgccagagctgagagtggagaaggaaagatgaatcctcaaccctcccaccaccaccgagctcaggggctgagtgttgtcacacttggctgtgaccctctccctctacctccccctgcccttgcctgcctcatccttaggtccaggggtttgcttctgaagctggtggttccttactgtggccagctttagtcttagtggcctagcgtggggcctgaaattgtcaaatgaatgaatgcctcatcctcttgctggtgactgtaagacatccgtctgcctctgctcttctgtctgttaagaagctttcttgccagtgcctgaggttcaagcctgatcctttgtctccgtagcgtgggatggaatgggagcttctcagaaaaccaggagacctgctccccacaatgctgtctaatggagccaagcgtctggtctcctgacggcagcagcaggagcagcagcagcg

SEQ ID NO: 76787 - DNA, 1034 bp, Homo sapiens
tggcactgtgttgaataaaaacatttaactctaatgaagttaaattcatcagttttcccctgtataggtttttaaggtatcttcattaagacatttttctacatttccttctattaacatgatagtgttacttttcacgtttagatttttaatccatttgtaattttttaagttttttgtttttggttttttttttttttttgagacggagttttgctcttgttgcccaggctcttgttgcaatggcgcaatctcagctcactgcaacctctgcctcccaggtccaagcaattctcctgactcagcctcccgagtagctgggattacaggcatgagccaccacgcttggccaaagaatttcctttgtatccgtggtctgttcccagcctaccatcttcagcatttgaaaaccattctttctgcatggcctggaccctctacagaacaatgtggatgagcttaataactactccctaaggcttaattattgtcttgggcttttctctgcctccccaccttctcttcaggcccaggttagatctgcaatttctccagcggttcctgcagatactgaaggttttgtttccttcttggtcatcacaaaatgccttgatgttcctgacccttttgtgcctgaccctactgggtgagtgagtgagcccagactagaggagggaggggagctctggtttggggtccctttccatcttttttttttttttttttttttttgagacagagtttctctcttgttgcccaggctggagtgcagtgacataatctcagctcactgcaacctctgcctccctggttcaagtgattctcctgccttcgcctcctgagtagctgggattacaagcacccaccaccacgcccgactaaactttgtatttttcagtaaagacagggtttcaccatcttggccaggctgatctcgaactcatgacctcaggtgatacacccgcctcagcctcccaaagtgctgggattacaggcgtgagccaccgcgcccggccccttttcatctctttggg

SEQ ID NO: 76788 - DNA, 1493 bp, Homo sapiens
gtgtgccttgcctccttggtttcataccttttcagatcacttccaagagttgtgggggccagggcaggccagctgggcaaagtccatagattagctatcactttttgcacctccttccctgaatgcacctggcaaccggcttgtctgctttgcattgcacttctaggaagagagccattgccaaaaagactgttgcacctgaaccccatcatcaattgtctacttaagagtgataggcttccccgtgcagcccctaccctttccacacggccctattctctggtgggcgaatccatctgtgggttgggagtgagtgtggagctgcttttccttaagcttttgaggaagccagaagtggggtatcacatacttgtacctcctacctctttggggaagagaaaggaatgaaattgggtggagccgggtggaactgggcctgggaagagtagatagggtgggacgaggagggtggggacaggtggggactgtgcaagaggaagtgtggcatatctggacgttgtgttggaaggtatctggacactgctgcatgaattcaggcaagtcgactctacctttgtggacctcaatttccttatctgtaaaatggccaggtttgtcttaaagtcctaaaaatccataagtttctggatccattggataatgagaattttggatgatggaattatagtgcttagaaagggagcttgagagtcaggctgcttagactttgtagcttttaaaagctgtgtggtcttgcgaaagctacttaatgtaaacccggaacctccaggtgtgaactcggactagggatcctgtagatagcgtaggtgtgatggaattgtagttcacatggaaggaaggtgagaaccacatataaacaaaattaccactgaaaagcctgaactccaaatgcttgagggtgaaaagctggcagatacttgttaacacttcagggaacatcatgctctcctcaggaaatcggctaattgcgtgtaagggtataaaaatatccacacagcttcagtatattgttccctcttgtttttcctgagattttggttgaattacctagttaaatgcacataggaagcagtcagtaaatggtagctattttcctaattttgtttacaaagtatctagcagagcactcatttgtatgcagttgtaaaatagcattcaacaagtgacataatgcaagaaaaacaaaaacccaacgtcttgcttgttgacatcattgtctgccaaaatgaaaaagcttgtctgtgtgtacacagtttgttcttcaggattccttttttaaaaattgtataatgttaagtgctgtctttactaaggactgatatggattatctcctgaatccaaagaaaagtaatagttttctttttaaagtaaatataaaaggcataaaagttgacagattaataaaagccaacttctagagttaaatgatatggtacaaatagaaatatggtgagaggttataccagatttg

SEQ ID NO: 76789 - DNA, 1071 bp, Homo sapiens
actctttaacacactttaaaacaaaactcgtccacttctccccatcctgctcttctgtgtgtgtgtctgtatgtctcatttttccagcttggtacttggtgggccttttaatctaaatattcctttttgttttttagttcaggaaacacttgacgcttctgcttctttaattgttatttttctcctctagtctttccgttgtgtctttctgaaactcctattagattgatgttggacctcctgggactctccttcatgtcccttacctttcttttaccttttccatgtttctgtctttttgctctatgtcttagataatttcatttactttttcttttacattgaaaggtcttactttatctatgcctagtctattatccagtcttttcactgaatttttgaaaatttcggcgattatttttaatttccaaaatgctcatgttcttgaattgctcctttttcatagcagcctgttattgtttcatagatgcagtgttcttttatatctgcctgaggatatgaattcaaaaaattttttttcaaagttttttttctgtaacttgaatgatttgggatcttattgggtcatttgttctatttgtttatttaatccttctcttttattttcctgtagttgttttttattatcttttgttgtccatttatacttaggaatgaaggaaggcattgactagaacaagcagctagtatgaatttcctctgaagttggctaagtttgtttccacagtaggcctctcttctgaatgggagttgttcttacctccagtgtttggggctacaggtttctctacactgatttcctcaccaaggaatctcatctgctctttatctccaggaatttctggcccactgatataattcttttttgttttccacaggatttattatgattttattcttttaaaagatatacatcctgtcattttaatagaaacttaagaaggaaaagaggtggtcatttgtgttcaggctaccctcttgaaccggcagcagcctccccttaggttttctgtctcaggtggttgcatggccttctatttggttgacaaa

SEQ ID NO: 76790 - DNA, 1013 bp, Homo sapiens
gtgggtaaggccaagaaggagcctggcagacaaatggatggctgctggccttgaacatggcagagctgctgggtgtgccagatcaaaaagcagagagcaggccagcagcagcagactgttctcagcgctggagaaatgcattgctctgcccactacaccctcaaccatccatatgcctctgccacaaagggggatactgcaaatggatcaacataggaaagatgaggtttgatggagattctcagtgtacacacacaatgcttgtaagattcttttctgttttgcaatcaaagtaactctcacattagtgtttagtggtaagatgatttttttactaaaacaaagagaaaacatcccagaagctcttccattaaccactgttaatgtgtaatgtacaaattgaagggattggactaatcactaaagcctctgtcaggactaacagcttatgatgcattgagacgctgaaaggaagttgaagaaccactggcaaatggacacagatgaatcgttttctagttactcatattgtgagggcggggaaaatctctgaactccagagaggcttaggatggagactaaggccaagacatttgctttagagaccatttcagatatgttgggcccaggagactttcacttggttctgcagaattctgagatttgtgatgctgatttttttttctcctaatcttgcctttttcctgcctggaattgttagtctcagaccctcccaggagcttcagagtctaagagcctggcaccagagaaagagagagagagagatgccactagaacttggactgctccacaggacagttgagcacttccccagaatctgtggggaggttttcacttttggaagcagtagttgtttacagatttctgtaacatttaaaatgttaaatacaagctgggtttatatctcacctccaactttttccagctgcttgacttttgatgagttccttaacctcttagggccttaatttcctcagctgtaaaacaggatg

SEQ ID NO: 76791 - DNA, 1675 bp, Homo sapiens
cagatctcatgtgaagtcagtgagaactcactcatcaccaaggggacggtgctaagccgttcatgagggatcttcctccatgatccaatacttcccaccaggcccacctccaacattggaggtcacatgtcaacatgaaatttcaaagggacaaataaccaaaccgtatcacttcatttatatgccattgatctaagagagaagagaatgctttagaaattacatttgataaattaaccaagttagtatgtggtgctgctagcatcaaatcacaagtataactttgttcactctcttaaggctgtaagctgtgcccacatgctaagcagccctcatgatttaagaaaaaaagtatgaggagttaggaagtttgctactgtacatctaggattcatagttaaaccaattatggatagaagtcaggtcctattttcatttttctcaattatttttctctttctccagataaaactggtggtggagtggcaacttcaggatgacaaaaaccaaagtctcttctgctgggaaatcccagtacagatcgtaagtctatctgggggtgagagggcatgggtggagggaagaaagtggaggagaaatcagactgaaactaaatcagtgccataagataaaaggaatttcaagactgctgttttatgcctctcaacctctaaaagcatctgagaccctatttcctgagagctcagaactgttgcctttgtaatatcctttgttaaaaaaaaaaaaggttgaaggaaagaagagagagtgagactgtagagattgatttaactgtcttcattggtttttttctgtcggagtaaggaaggtccagccagacaggacctgaaggaggttgcttaggaatgtctgataacttgccctagggttattgccctgacagtggaggaaaggttccaaaccacttccactgagctgggacattacatccacaggtttctcatctctaagtgcctcattgagttcggtgcatctggccaatgagtctgctgagactcttgacagcacctccagctctgctgcttcaacaacagtgacttgctctccaatggtatccagtgattcgttgaagaggaggtgctctgtagcagaaactgagctccgggtggctggttctcagtggttgtctcatgtctctttttctgtcttaggtggtttcattaaatgcagcacttggttagcagatgtttaattttttttttaacaacattaacttgtggcctctttctacacctggaaatttactcttgaataaataaaaactcgtttgtcttgtcttctgcatgtgggctgtggtcttctcctgctcctttcagggtacattctgctagaaccatggaaggcaggcccccagttccgtggtcccagagtgcactgaagacatgactttttcagaaactctttttcctcctttttgtccagtaagaccatatctattttatataaaatggccttgttttgctttatttgacacaatcttataccaccaagcatgctcgaaagaagcagtgaaagtaaaaatcacctagttgaataataacgcctgaaaggttgaaggaactgaatttggtggggagggcaggtaggggttagggattacaggttaggatgaggcatggtgatcttttgggaacactgctgtgaagaaagccta

SEQ ID NO: 76792 - DNA, 1050 bp, Homo sapiens
atataagatctaaattcttcacataatgtataaaacaggagaagcctcttcaaatttattttttgaagtctggaatgctggcactttccaattaggcaatagttcttcattcctgtaacctagctcagagctgctgctgactatgggcctagagcagcagacatgatttctttttaggctgtttcttttccactggtgtttttctatttatctgtctgaccaggtcataaaatatttcattaacattgacctttgactttgcagattattctaaaatggcacagttccatcactgtcatgctaaattctggccctgttctttgccaactactcactcatcttccaggtcacatttattgccaaccaaaatcattggaacatcttctgtgtccttaaccagtaaaatctgttccctcaggtcctgtaagtcaaacgtggactgaatatactagtgcaaaaccttggccattcttcatatacaaatccctcattgctgtaaattgccctgtgcctgcagtatctaggattttaagcatacactgttggcagttgacttcaacttgctttctgtaggaatcttctatcgttgggtcatatttttcaacaaaaattccctgaacaaactgaaccatcagagcagactgcccaacacctcctgaaccaaggaccactagctcacccgtgatgtggtctgtttaaatactgatgattcccccagtctggcacctcctccacctcctcctccctcctccctcctccctcctccctcctcccagctgcggctcctgcttcggctctgcacagcaacggctgatgccatttttatatacaatatttcacttggatctcatgaccatcctatgtagaggtgatattatctctattttacagctgaagaaatttgagcctctgaagttatgcaatatgaacagagtccactccactaagaagcagtggagcccaggttttgagctgggtcttataactccaaagcctgtgcaatgttaaaagattttagccaggtaccaaataattaaagatccaagttgt

SEQ ID NO: 76793 - DNA, 1044 bp, Homo sapiens
atgagttgaccctaaatgggagagcagagcaccttcccattaggtggtgggcagcctagctggcttatttctcctcctattctcctattccaattcatttttcttttgcaggttctgtggatggagttataaaggaagtgaatgtgagcccatgccccacccaaccctgccagctgagcaaaggacagtcttacagcgtcaatgtcaccttcaccagcagtgcgtaaaagtggctcttaactcaaattcatgttacagcataacctaaatatcaagtgttggaataagcatgggaatggaggggaggggaattggcagtcatgaattttatgatttcttttgcacctcatgcaaagctagggttcactgtgcccttggacacccttctcatgcagggtccatggctcccagactccctttaagcaaacagggagatgtccatgtgttcacaggttagagaagacagcttggcttttctgtcttgacccatattgcatagtaggctatgatgggaatgtcagctctgtttagctacagactgcagagtattagtatggaccccaattctttaagctttggaactcctccaaaatgttgttttaagcagtaatgcctttcagctattaagtctacatcccacctgaaaataaaggtgcaactaatacttaacagcctccttaagatttagggaacccactggggacccaagaaatagccaagaaatctgagctttcttctccaatattcaagaaatatcattggaactttttgctttcttgtaccacatcactttgagatttttaagaatctagacaaatgtaaaatcttttattactaagcagggcatgttccttgaatcttttcctcattttctgtcctgtgaaactagactagacagtctaataagaaacctcaaagttcctgtcatcttttgttcataagcctaaagacagctctaagtactagctccctgtttcctctctggactataccctggcctctctattgttccaaaccaaaaaaaaaagccttctgaacaagtca

SEQ ID NO: 76794 - DNA, 1435 bp, Homo sapiens
gccgttagggacgacccccaggcggcagccatcttcctccacaagctccgcccctcgcgtctcccccgtttctcacccggggcctcgggaggcggagagaacgaacaggaggccgggacttcacggaggccccgcccccccaacatgcctattgggtagtgcgggaggagaaggtgtctgattggctaggaatgctccagacggcagcggcggggacgcacccaggaagccggagaggtgctctaaagggaaggaacggggcggggaggagtgaggcggggcggggcggaggtgggtccgggcgggtcaggcctctgaggggatggcatgggcggagactgcaggcttctgggcctgagagggctggagctggctttccggagccgggggcggggcgcgggcgggcctcagctgtggttactggtgacaggtcgcctgactgggctcctccccgggcccgccccgacaggtttgtcttgtgaccgcgggcggccgctgcttctttcccgagcttggaacttcgttatccgcgatgcgtttcctggcagctacattcctgctcctggcgctcagcaccgctgcccaggccgaaccggtgcagttcaaggactgcggtgagccccaggcccgcccaaggttcccgcgccctctgtggaaggccccgccggacccccgcgctgagacccctggggctgggctgggcggatccctcgggcggccaggctgagccttggaccctacctaactggaatgggctgggtcgggggagaaggcgccggcctccatgaaacccgaccgcgcacaactttgtttctttccttagaacgcgtgttttggggttcctgggaactccaggaggtgggccttttgctgaagtttcctaaagtttgtagggcggacaacagaagggctgtatccagctctggtggaggggtggagcacagaacttctttttatttatgctttgtatcttggaatcccgcctcccccttccaactccttttgcttttcttttaatttcgtttttgctgacaagtcaaaagtcaattcccctttttcatcatttattgttacaaataggacttcctttgggctttggaatcttgtgattcttaatcagtttttccttgtataaatctcattgtgtctctaatcacagcttgtgatacataactccctctcgccgctgtggttggaatctttgttggaaaatacaacaggtggtagaaattctgagtgccttcattgagtcgagtctatagaattgtcggaacagaaactcgagcaatgttgttcagaggtggagatagagagatagaactgtcaatgaaagaggcatgaaactgactttgtaagatctatgagtggaaaggaagcacggagatcgtataatcaatcattgaattccagggatgttgggtagcctacctaaagt

SEQ ID NO: 76795 - DNA, 1263 bp, Homo sapiens
ctgaatcaaagtaactaagttataggagcaaaattgatctgcccaggtccattgggtagtcggtagaaagtcaggccggactagattccaggcttaagtccctacacgtttcccagtatttattccattgaatcattttgcctcaaagaaaatcagcacctgttaaaggtaatggggaagctccctctgtactttagaaaacagaggatgtgcacctctgggctcagggggtgtcttttttgtgtttgcgatactccttaatgccttcctcctgtcttttcagggtatttgaacagggtggggcaagagtggtggttgactctgatagcttggccttcgtgaaaggggcccaggtggacttcagccaagaactgatccgaagctcatttcaagtgttgaacaatcctcaagcacagcaaggctgctcctgtgggtcatctttctctatcaaactttgatgtgatgactggtgactctgggattgtcaccagttgtaccaatttgaagaacctggaattagtagaattctagaagtttacttctaatcatgtccctctcaattttatttcccgcagtccaggagtgttatgttttgccactattattttcagaatgtgaagattttactcttggcttaatttttccctccactcagtgctaaggctgagcctccagatgctgttacctcagatttaatcactggttgaaactccgtataatctgtagagcctccatggctctaaaatttggaattaacttctcttgccttaagagctgcttgtacatatgtggatagctatgtataaaagcttcattttaaagaaggttcttattgtgttgtggatcagggtcacagattgggtagcttggacaccagttattagaggatgagaaaagtaaatgaaatgttctctttttcacttcaccctgccagaatgtgccacttgacttatctttattgtctatgcaacccatttgccacttcctgtttgataggacagatacattttactctcatgctcgtggatctgctatgagtcataaaaccaagagcccgttacccagaaaacttggaccaaaccctcactgatagtgaattatttcaaaaatagcctccctactcatacagacattttaagattctgtgacaatttaatgactgaatctttttaggatatgttgctttacctgccttctgttgtaaaatggctctggtctcatgcacagcaggaagtgatccctttattgttataggtaatagat

SEQ ID NO: 76796 - DNA, 1065 bp, Homo sapiens
ggtttgtttcctgtaagaagcagtgtttatgtaatagaggtctttgtagatgggtgctgtatcccatggcagcccttgctgctggtgcccacaggctatcactgggcggattcagctactgaatattttctttagacgtataaagccttggctcccctttctcatcaactccacgtatttttcatcatgtcctcttgctgctttctcaggctctttgttcttcttcatttgtgtctcttacattcaacaagctaatatcagccttgcttctctgagtgaagggatcttctgccactccttggggtcagagaatgggctacaggatggaggtgtggcaaaatcagggcccagaacagattggctgagtggtggtgatggttcttaggagggggctctggagtcagtccccaagcttccccaaatcctttcttgctccacagattctgaaggacctccctagggcagatgtagcctctgtcccagttgtgggatcgtcaggatgatggtggattgtggctggaaaggggtgtctgcagtgtgaggccatggggccttgcatgctcgcacagcttgggagggtggatgagggccatcctttggtaagcatcccatagcaaggccaggaaaggtggtggacagggcctcatgcggtggctgaagcattaaagcgattggtggtgcttgagccaagcaagggcatggaggcaatgaccgaagcttacagccagaggctaagctgggagagatgaaagcaggcaaggctgattggaaacctctggcctgatgtcacggtgtcttcccagctaggaaatcatcctcaaggcccctgcctgtgactggaggccatttccaggtagttgccacactgacccctgactgctactccttggcagtgcagtgggggggccctgcctcagccacatatcccggggagcagtggcagcggtaggagccctctgtgttctcgcagtaaccatggacacagagcacagcaggcccgttcaagtcatcacactcattcacatctaagaggaaacaaaggagagtgctgtagggagcccaggt

SEQ ID NO: 76797 - DNA, 1024 bp, Homo sapiens
gtatttgaaccttccaacagaaagaaggctttgctttggtcctgacccttgcccatgacgagagttataggtgtagctctgtgatgccagcccctggggaggatgggtatgggagggtgctgggggcatgaggggcagagagccttagggcaggtcacagcagcaacaccattattatcacccttatcatcattcacaaccatttattcagagtacttataagtgccaggcacggtgctaagtgctttttcattttcttgcatcctaacaatatttctagatgttgggtgctattatccccattttacagaagagaaaattgggcctgaaactcccggcctatctgactccagttgcctgcttccagccactctgcaagtggcctctctctgctgcttcttgcacccggcacaagcatttgctgaactggaggaccccagcttggggaacagctgtgctggggtggggctcctgttctctgggattctggatgagatgcccagtcccctactctaaagaaatgggattttcagaattccagttgtcagctgaaaaggcagtgtctctttggctcagagatgttctgagagcttcttccaagggacttgaagcctgctgggaatgaattgtgcctcaggcttaagtgagcaccctcccaacccagcaggggtgggtgtcactgacatgtggcacctctagcccggagagcggaggaagggctggggcaggggtggctaggtggcacctgcctgagccaggggtctgaccagactctttttcgacctcactgtttgtggtgactttggttctatcttgctctgaggaggcagtcagaggccatctttgggcagaatgtccataatcactggggggccccactggtccttcaccaaggagggaaatctgaataatggacattatgagaattcctaaaatgggacaagtgttgtgctcagagttgtacatgcttatttcatgttcataataaccccatgaagagggacttatcatctccagtttactg

SEQ ID NO: 76798 - DNA, 1009 bp, Homo sapiens
cttgcacatttcagtaagtggcatcattatgggtacagactgcccaggcagctttcttgtgggcctgaagaccccggccactgggatgagaatttttcctcatcttggttgaaaagcccagagtccacagttgagaacagactgtggtggatctggtggctgtctcttggctctgtgctggcctgtgatggggatttcatgatccataaagaaatgaagaaaataaagtcatttggtgagatttccatgaagttaggcttattcaaacgtttcttttttggctctgaaatgtcttttctttcgtgaaattatggtggtagtgattggcagttttgtgtgtgtttgtcttaaagtcttagcaacctaaataaaaagcgactttatgttgttcccccaattttgttccaaaatcttacggattcatgaaatcctgaagtctagagatgactttttggtccattgtggaggcttggccaggacttccctggaacagtcccagaaagatagcaagttccattcttgtgctgggtgagtttgggaacctctgtcctttgatgaaattgcagcggttcttccaaggctgatagtagatggagcatctcctgggggctgtggtcaccttctcattgagacttgccttcttctgttaccagacctctactgtccttaatcggggggatactgcttctttggaccagcctggggcaaacatggcaccagacccttctcttgatgtcccacaacctgagactaggaaagaacatgcaaacaggatttggctaaaggcttgcgatttgcttaaaggaaatgagtgcaaagataacacaaggctagacagtggggtttgcaaactccacagctcacagtctccactccatcctagctgcctgtgcccttctatggggtgatggcagtggtaaccaattggagaccaccagggatccagagttgagccaagaacctgcagccctccacacagcgagagcctctctcgctgctcacctctgag

SEQ ID NO: 76799 - DNA, 1048 bp, Homo sapiens
gtcccagctctgtgtcctggggcaagtgactgggccttttctagccacagggcctcgtccataaaatgggcataacaatctatatagagttggttttggggatgaatgatatgaacgtgatagctcttactgtgcgccaggtaccattctaagcgcttcatattgttcatttttaatcctcacaacagccctataagctagattggatttttatcctgagggcctgagttgacattgccctttcctggggaaagggtcatagccaagaagctcagaggccatctggcctctgggggagtggttagttttgttgttgttttaggctttgctgtgctggccagtggaacttcctgtgatgatggaaatgttctatatcttgctgtccagtgtggtagccctgagccacatgtgggtatcgagcacttgaaatatggcttgtgagactgaaggaactgaattttaaattttatttaatctgaatccatttaaatttaaataaccacatacagttcgtggctacagtgtgagactctcttgaacagcacagctttagagagtacaaagtacacccacgtccaggtgctcagctgacactcacaacagctctttgaagcaagaattatcagccccatatcgtggacgaggccactggcacactggtggagacatctcagcgagatgacatgtgtccaaggtcatgcagctgagatgtagcagagctggggtcaaaccaaaccaatcctcctgcccccgaccccgtgttcttgctactacccagtagccaatgagcaggggctctgagcagatggtaggagcagcctgcatggggtggtcgggaggggctgtttctagaatctctcccaggcctgcccattctgagtttggtcccttcccaaaagtaggggttttgtgtggaaaatctgagcaaacctctgttgactgttctggggtggagtgaagggagaaggggctcagctaggaacatggggagattaggggaacaatgccttttatttcttgcttttaaagcaatttcaggagttttctt

SEQ ID NO: 76800 - DNA, 4721 bp, Homo sapiens
cataaatgggcctggggattttggggaaacagcttgccttttctccttgatattcccaggctaagtttagagcagactgtcaggaaacagtttgtgtgtgtgtgttttgtcctttgtttcatttaaaaataatccatagtagcagttcttagggtgttcatcagaaatacctcgcctgtaatcccagctactcaggaggccgaggcaggagaatcacttgagcatgcaaggtggagaggtggaggttgcagtgagccgagacagtgagactccgtctcaaaaaaaaaaaaaaaaagaaaagaaagaaatacctgagcaattttttttcttcctgtataagctcataacctgttccgagagattcagatttagaggtcccaggtagggccaccaacacttgtataaatatatattttaaaagccatgtgaatcttttttttacccactggttagcaactattgccctgttgtatgtaattgattttcctaaagcagtattctggcattatgacctcaccttctgtctttttcctggtaatgttttcttctacattttgcctgttaacttaggtaattttgaccttatattgggtctttgtctctctgactgtcatagtaacaccttaccatctttttccagctgctgatgtgtgggactggagacatcagtgtgtctgacttcaaagcccatgcagtagttgttggtggctcatggcatttcagagaaaaggtaaatggaccaaacttctttcagttggatttgtgccatgttataaggaaaaagtttcagaagaaaaaagtagaggaggccgggcgcagtggctcatgcctgtaatcccagcactttgggaggctgaggcaggcggatcacaaagtcaggagttttgagaccagcctggccacatggtgaaagcccgactctactaacaatacaaaaaaaaaaaaaaaaaaattagctgggtgtggtggcacatgcctgtagtcccagctactcgagaggctgaggcaggagaatcgcttgaacccaggaggtggagtgagctgagatcacgccactgcactgcagcctgggtgacagagcgagactctttctcaaaaaaaaaaaaaaaaaaaaaaagaaaggaaaagaagaaaaaagtaggggagtcaaagcagttgatatgttttctgggaaaaaaaaatgatgcatggggaaagataggtggttgtccaggcagaagggagccctgatccctaagggctgtcatgctgactgccacaggagtagtaaattggagatggcgaagaaagagaaccaacagtcagtgactaccctcctaatcatgtgacagtgtaaattcttgaagtgcttgtcaaactgttcctaccctgtgtcctcatagaacggtaactggggcacagccccactttagtgtatcttgttccttccccagggatctaatcctagcttgtttactgtgtgtgatcccagccttgtgctctccctgccaggtcatgaggtggttttggactgtggtttccagtctgacccaggaggagttggctcggctacttcagttcacaacaggctcctctcagctaccacctggaggctttgccgccctctgtccctcatttcagattattgccgctccgacccatagcacgctgcctactgcacacacatggtaggtatctgcccgcctgatgcatgcccagtgtttttggtggtatgagttaatcacttctcccttgcccttccagttttaaccagctgtgcctccctacatatgactcctatgaagaggtgcacaggatgctgcagctggccatcagcgagggttgcgagggctttggcatgctctgaccactctcctgtcatccagttggctcccatgctctctggagcttctgggcgcaagttacagacatcataaccactgatcctaacacacataaccatcagccagaagatgccgcatgctcccctgtgtctggaggattttgtcacctacaagccttgtctttacctcacctgctccctgcccatatctaccacaggccactttggcatggtatgtaagctgagctcttcattctgtcatgagaagaggaccatgctgctatcatttatttggtcctttgaagatctcagtagctgagggagatggcacacggggctcagccctgttgggaaactggtgtggagacccttaaatccacactgtgctccaaaactccctctgctgatactccttggagacaccctctttggccctcactacttgaccagactggtacttgagtccttctcatgggtggggtgattgcctcttctcatcaggagccaggagagagggggacagataggaggtggcccataggagcagtcccgctgcacaatggtaggcataggccatggcactggactgcctctaaggactgctaaaaagaatatttttttgtggtgtcagaactggaaaaagcactttcccttcgggcatttctggaaatgattattaatccacaaagaagaactctgtaagctttttcttgaattgtagccagtgagaaaagcagatagactgaagaatatgaaggatagctgagctgtagcctccagagtggggcatgcctaggcatatggctggcttggagactactgatgcttttccctgagtttgttattggcactgaagtatggccggcttgggccactgacttccccattatgtagtctgctaaaagctggggatcctttagcattctactgaagaaaattttgtagcaaaagattagaacagtaagaatagtatgccagcaatccctgattctctctctgcttggtgttctctggcagcactaagacaaaggaacagggactaggagtttacgtgcttatcacaggtccttggcgtcaggacactagggatgaacatggaggtgatatgttacacagtaaacacctgccaacccctgtactcccctttgctccatcagttatcaggaaggagaactaaggagggaggaagcttattaggttcactgttgaatgatgattgaagagtacctgctgctgtatcttggaagatgacaacatcctttttcattactgtttgattgaaaataatttcaagattcaaaatctcattgacttcccaaatttgtgtttttaagaaggctttgctgcaagctaccattcccaatggggcagtcaactctgagaatattacaagccatctttattgccaaaaccagcaagtacacagagtcctgaaacaaggcaggactttggcaatgccttggcctcctggaagcatgtctgagccctcctgttcgcagggatcatgaggaacaagccctcctgagctgctacagttcctgcctgacctcagtctttcgcagtcatcatttgtcctttcttggcacatgggtgctgacctcactcatccttggggtccgggatccagcatcagggtctctataccccaggatcctccatgccacatggtcactgctctcctcagggaccaggacaaggtgctgctgcttgcccaaatgttttcccatgggatatgtaccggaaggtttatcaccaccctgggaaacataatgctgccccttgggcccagaaaggggtttccagctgggggcacgtggactggttctgctgtttttggcagtcgcttttctgaattctcccctccggcagccttccagagactgatcctggagattgagttgattgtcttggctagacctgtcattttaagctctagtcatagcactttttcagagcatcttaggcaccattgcaacccaaccagggaagctgcatccctgtggtggtccttaggcaccagtctttgttaaacaaaaccctttggcactattgtggttttctattctctgtctgaactctattcaaaagtatctttgctctcttgggccttttcttttactgttttgttttttttttttctaatcctgctttcatactagccagtgtggggaaaaggtacaatatgtcaaagagatgagagagtgttatttcttgggcaattttctattagtgtttcttattttggccagttcttttatttatgtccttgtgacccaggtacttggggggccagctacccttctggccttttagcgtctttgaaggagaccagacatgagtgaatacctaggagagtgtcagcatgtttctggaaaattggcagagaccaagccctgctgcagattcgtcaggccaggtgaaagggccaggcagttgcagctgatgatgtaaatattttgtacagtagataaataaatgtttaaaagaactaaggagtgagtggctgctttaaatggagattcatggcttgactggaaggtggggaaggaaaagatttggaaatgattttgcatttccccaggaattcctcctgaagtggtcggctcggggtagagtgtacacctggagtcctggcctgtcccactcttgccctttcacccttccctgattgctgtccatggtgccaggcagggccactgtctcagccatggggagacgaggacaagtgtttatgctcagtttctgaagaaggaaccggttaatcagtctttaaacaataattcattgttgttttactacctagaaattcaatatagaaaatttggaaataagaaaaagaacaagggaaataggtaagttgctatccagaggtaatcaccgttaacactttgataaatag

SEQ ID NO: 76801 - DNA, 1021 bp, Homo sapiens
aatccaggatcttcaagtatcaaactgtggcttgttctgttgactcacattagagataaaagaatgtgtgggaacaattgttcccatcttggaatttctgagacataaaaagacttccttactgcttatctgattttactcttagttgcttagagaagaggtcaatagtggtttcattttggatcatagattaaaacattgctagcgaggagccatagtatcttcctattgcatcactactacttgactgagtcagagaagaccttacccaggcacccatttcagaaataatagctagtatacagcaatagtggtaggaaccctgaagcttaggaactaaattaaaccaagtgtgttgaaaagctgaatgcacagcagaaacttgtgactgacagtgatggaggtcagtaatctgtgtctataaaacatccaggcagatgtcatctcataaatttccatccacagcctctcccttgtctgtcttttgctgcctgttacaggttgtagaactcatgacaggtggagctcaaactccagtcaccaatgcgaataaaatcttctatttaaatttgctggcccaatatcggctggccagtcaagtgaaagaggaggtggaacatttcctaaaaggtgggatcctgtctgttcttggccttgaagttaaaatacctgtatccatggtgtgggtatgactttaacttgcctactttgtttcaggcctgaatgaattggtccctgagaaccttttggctatttttgatgagaatgagcttgaggtaagtgattgcaattcagactcccattcttaacttggcatttttgtagcttacaggaaccagcttggtgtaccttctcttatgagatgcagctggaaagccatttatgcaagaggtggtttcacttttgtcgctcctccattcattgacccttcagcctttaaaaaattagaatgtgaaaattagtagcaaagagtgcagagatattagcttaagggataaataaatgaaagtagcaagtagct

SEQ ID NO: 76802 - DNA, 1014 bp, Homo sapiens
aatggcccagggcctttcagtctctttcttggacaggtgcatcccaaccctaatcgccccgctcatctgcgcctgaaaatgtatgagtttgcgggacggctcgtgggcaagtgtctctatgagtcctctctaggaggagcctacaagcagttggtccgagctcgcttcacccgctctttcctggcccaaatcataggactgcgtatgcattacaaggtaacatcttgggtgtgcatttcctactaaggcccctggccattaaccctgaaatctctcctcctgggcttgtaaataatttttaaggttgaagggataagtggttctaagcagttacacctttcagggcaagagtattcatgttctgttctgtgtctttctgcctcctcagtactttgaaacagatgacccagaattctacaaatctaaagtttgttttatcctcaacaatgacatgagtgagatggagctggtctttgcagaagagaaatataataaatcaggtcaattggataaggtgagaaagaggacaaagcctctgggtcctatgttctccagtttcctgtagagcaggactgtctaagagaactttctgcagtggtggaaatgttccatatttgtgttgtctattaaacacccaaaatgtgggtgacataataagtgaacttctcattttagttaatgtatacttacataactacacttggctagcagctgctgtattggacagcacagctttaggacattgcatcctatgctttatgatctcagcccatttgagtgaagcaaaagacacatatctccatctatcccaccgagtcctgcttccagttgaaaaataactgaatgatggtgaagtgtcactgtacaagcagatttggaagagatggcagtgtctgtgtcaacatttgcagtagtgatgtaggtgattcctattttaacacaatgcctgggtatttttaaactttttggctgggcgcagtggctcatggcctgtaattgcaacactttgggagg

SEQ ID NO: 76803 - DNA, 1047 bp, Homo sapiens
tattcccttaacagagttattcacagagcacatgttttcaattttgatgaaatccactttctgaggtgggagaatcacttgagcccaggagttcaagaccggcctgggcaacatagtgagacctcatctctacaaaaaatttataaattagctgggtgtggtggcgtgcacctttagtcccagctactggggagtagggtggagaagtgaggtggtaggataacaagcccaggaggttgaggctgcagtgagctgtgatcttgccactacactccagcctgggtgacaaagtgagaccctgtctcaaaaaagaaagaaagaaatccagtgcatccatttttttcttttatggtcaaactgttggtgtctaagaaatctttggtctcagatcctgaagatgttctctttttttcccaaaagtttttacagtttgaaaatgtgtatttagggtcatgatccatttttagttaattttaatagatttgggtcaaggtcctcttttttttttttttttttttgcttatacatgtctttactccagcatcatttgttggaaaggtgatctttcattttctattacattgcttttgtacctttatcaaaaagcagttggacatatttgtgggggcttatttcattaatctgtgtacctatccctcctccagtaccacagaatcttgatttctgtagctccctcttcttttcttttttttttttgaggcagggtctcactctgtcacccaggctgagtgcagtggtgcgatcatgattcactgcagccttggcctcctgggttcaagtgatcctcctgcctcaacctcccgagtagctgggactacaggcgtgcaccaccgtgcttagctaattttttatcttttttgtaggaatagggtctcactatgttgcccagggtggtctcgaactcctggactcaagtaatcttcctgctttggccttccaaagtgttgggattacaggcgtgagccaagtcacacagcctgattactgtagctcttataataagtcttgaaattggtaagctgactc

SEQ ID NO: 76804 - DNA, 1703 bp, Homo sapiens
gaaagaggataggaatagtaaggctctggactagagagagttgtttggctcacgccatacactcttctttgtcttactctgagatagctatgaggcagagttggagacaaaaactaaacaagttttcttttaacagctgcagctgtgatcctcggctgtctgttggcattgacgggacctgatgttttacgttattggtacgttatggaaagagctctctctattatatttttgtaaaggttgcttgggtcctttttgcctttctgcctattcttttccctttgaaaatggagctgaaaatatttctagtcgtgccagaatgtaccttcacagagttggcattggaattcattcatttgggtttattgagcaattatagtcaatgccagacactgtttactgtggagtctaaagttgaataagacaaaaatctgccttcaaggagtaggcattcataacataaaggggaacggtcaaggaggagaaaagttataccagatgaatgtgtaggagtttgaaggagcccagaaaagggaactgctaactctggtggggattggagaagacttttgccaagtacacaagggaggggagggctcccaaataatgcattctttaagaaggaaatggtgggaaccaaaggcacatccttttgactgcttctgtggggtgcccagcaagtgcaggaaggtagggagcagggcggacattatatgcagctcatatagagcaagagtttgcaaactttttctataaaaggccagagagtaaatatttttggttccgaaggctcatttcaatgactcaactctgccagtgtagtgcaaaagtagccatagacaatttataaatgatgggtgtggctgtatcccaatggaactttatttaccaaaataggcagtgggtgggctttggcctgaggactgtagttactgacccctggtgtagaagttcctttcttatctacagaggtagtgcccagtgcagtgtttctttggcagtcttacagtctcatcctgacctcctttaatttttgagaaatggctggcctgttgcataatgaaaagctgtaatgtgtaactggcaggcggtttgtgtgttctctcttttgcataggtggaatcacagtgtctgtggttgcattcttcttcacaattaagttcctctttgagcttgccgcacgtgtagtcagcttcctccagaatgaggaccgcgagcgccgaggggaccggactatttatgactacgtgcggggaaattacctggatccccggtcttgcaaagtctcctgggattggaaggacccctatgaggtgggccacagcatggccttccgagtgcatgtaagggaatgtttctgtctccatacccattggggtttctgagtaacttgctttccagagcccaggtgctggcctggaatgttaacattttctcttgtttttcaactccctccaggaactagtgaattgctactatctgaagagtcacaaatttctctgtcattttgatttaataggtccttagctttgaagaagtataaagcttaatgttaccttttcaaaataagaaaaatattacagaaaagagtaagtattatagataggggttagcaaatcaggcccaccttctgtttctttaaatacatttgtcttggaacacagccacacccattcatcatgtattgactatggctgttttca

SEQ ID NO: 76805 - DNA, 1037 bp, Homo sapiens
tctatgaatatattcaacatatccatgttttatctttagaaattcatgcaaatattacattctgttttattatctatgagtttgatttaacatgaaatttttttttctccccagtcactcatcctctagtgaaacagatgctgtaggaacatgggtcatttatcctctggcttctagcacattctagcatgccccagtgtccaaatctgggagttatagaatgaggtacagtctaatacggcagcacagtagatttctgtgatttgggggattgcctgctcaagagtagtatgtcatggaactgaggagagtgagttcatcctgctgactaatgaggctgtccctggaaggctgcagtcatttggaggcacctcattaccagatcgttggggatcagctggagagagttcacagaagacccacaggaatgattaagagactggagaggctgactgatgaagaaagtataaatgaaaaccatgtaacttggctaaaccacaatagcagaaatagacaactgtataaatatctcaagagtataaacttgatggaggagggcaatcttttatggtgggattttgggttggggagtataaactaagagtggaattaagccatagtaaatgtaaactgataatccaaagtgtctgatatattcttggaacctccttagttagaccaccctaacctgtgcactttttgaaaattgaatagtttgtttttttaagttcatgtccctggactcatggctggtgcttctctgtggagaatgctggagattgcatcttacaaaacaaacgtctttcttttgtcttgtcatttggtggacatcagtaggtgatatcagaacttctgtttgctgccactagctctgtatgcaccaaaattttgaaatggacttttacatcatgtttttcatggctgtgtgtgtgtgtgtgtgtgtatgtgtgacaggatctctctctctgttacccaggctagagtacagtggtgtggtgtgatcacagctcactgtagcctcaaacttctgggcttag

SEQ ID NO: 76806 - DNA, 2293 bp, Homo sapiens
agctgaatctaagctatgcctttgtgtatactatacaaaaagaaatacgggtctgaagaactctggcttgttttagagagaatggtgcaatagagagaatccaaactgaattaagaaatgcagaattacttttgtcttggttagcttaacctttataagcctaaattttaatttaaccagtgagtgattataggacaacattttccagtctcatcacaggttagagtgactcagtaaggtgggcatgatcttataaaagactctcgttaaagccagaagggtaactagtttattgtccctggcttaacttcaaggtgcatgttctgggttgtggaatttagttgttgttttaagaaccagtatcaggggtgcagaggtcttatgtggatttggagagaagtgagggactaaaaccttggctaaacttaagcattccatttactagattgaagagaggaaaaatctgttaaaatattaaaatctttccaaattcagaaatagactataactggggccaggcatggtggctcacgcctgtaatcccagcacttagggaggctgaggtgggcgaatcacctgaggtcgggagttcgagaccagcctgaccaacatggagaaaccccgtctctactaaaaatacaaaattagctgggcgtggtgacgcatgcctataatcccagctacttgggaggccgaggcaggagaatcgcttgaacctggaaggtggaggttgcggtgagccgagatggtgccattgcactccagcctgggcaacaagagcgaaactccgtctcaaaaaaaaaaaaacaacagaagactgtaacttaaatagtgcatggtaatgtgcagcattgaatttgaaagaaacaaggggaataaaacttaatgactatgagataaatggaatgcaggagttttaaaaaattcttgttaaaaaatttgacgagaggattttctcttgtgaaacgtttagataaccctctagaaaaaaaccaggagaaaatctttgtgaccttgagctaggcagagttttaaaaaatagaacacaaaaaccacaaactatgaagaaaaaatttatgttggctttcatcaaagttagaaacttgtactctttaaaaagtgtattttctgttaagaaaatgaagaggcaagccacagaaaatatttgcaaaatgtttatctaataaaggacttatatttatgtgaaaggaaaataagtcttggggcccccaaatcactaagctaaagggaaaagtaaagctgggaactgcttagggcaaatctgtgtctcattctgttcagagtcatcccctgcctaccgagatagatgcatatctgattgccttctttggaagggctaatcagaaactcaaaataatgcaaccatttttctcacctggaagcccccctccctactccaagttgtcccgcctttctggactgagccagtatacatcttgattgatgtctcaagtctccctaaaatgtataaaagcaagctgtgccccaaccaccttgggcacatgtcgtcaggacctcatgaggccgtgtcctgggcgtatgtcttcaaccttggcaaaataaactttctaaattaactgagacctgtctcagatattcggggttcacatttagaatgtataaagaactcttacaactcaatagtaagaagacaaacagctcgatttttaaaaaagaaaagatttgaatagatacttcaaagaaactaatacaaataaccaataaacacatgaaaaaaatactcaatattgttagtccttagggaaatgcaaattaaaatcacagtgagataccacttcacacctattagaatgggtaacattaagacagtaccaagtgttggtggatatagagcaacctgcctcttgtgcattgctggtggaaatgcaaagtggtccagccgctttggtaaacggtttggcagtttcttgtaagttaagtagatacttaccatatgacccagcaatcccattcttagatatttacccaagagaaatgaaatcatgtgcctacacagacttgtagcttaatgttcatagcagctttatctatgataccaccaaactggatgtaacccaaatgtccttcatctggtgaatggataaacagattgcagtatgtccatttaatggagtactactctgcaggaaaaaggagtgaactaccgaaatgtgtaacaacatgtatgaatctaagaaccattatgctaagtgaaaaaatgctacacacgaaggactacattttgcgtgtgatacaaatgtatttctatgta

SEQ ID NO: 76807 - DNA, 1040 bp, Homo sapiens
tttctgcttctcctttctctttcaggcacacattcatttagatggcttaatagtttacatatctgtgggcactgaatttttgatgtagaaatggtagctacagatactgtatgtgccttctgctttaccccatttgtggtcactagaagttcctaatctttctggagcagcttgtctctgtcaagctgccattcatgtgtagagctaatagcaaccagttttttgatgtatctcttggtgattagacaataagctttttattgtctaaaagctaaaataacatggtcagttattcttcttaaacatttgactcattagtattatatataggttcagagggaaaattgcatatcattaaatagtaatttgcatttaaatttaggcactgacagaaaaacgctcttctggtaatgtgtactttgaattttggaatccatgaacaacaacaacttaaaaaaaggccatttgtaatttctattgtaacctctattgagagtgttctgatttccttgattgttaatacctaatagggagctaaattagtgtaggaacaccatgggggataagaacatacttagaaaaatttgtttttgttgcattgtaattttattgcaatctgaggttcttatagcgtgaaatgaaagtggtcagatactctacagcattctttgatggggatggaaagtgggggatgcgaagctgggaggtagtgttgatttgtgatggatgggagcagaaagtaattgcttttgggcacatacttgtgaggaaaagaaatgattttagtccttctcagcagtcaagagggttgttttgcatttttctgcagtcttgaagagaaaaaatcacccaaggcattggacacacagtttgaacacataattgggcttggacttcattccattcactaattggtctaacttactaatttaagttggtatcaaatttctttgtaaaattattctggataatgaaagactccttaaagaacatcttgtatttcaatgttagaaagttataagtagattcacttttttgtc

SEQ ID NO: 76808 - DNA, 1869 bp, Homo sapiens
ctaagcattcgcttcatggtcgcatacttccttgttttcttttgcttccccttgaaacagaaattttagaattaaaaaagttggaaacacacggcatcttttaaagtctcttcttttctcttgtctattgccttcccttcttgcctcaaataacccagaccctcttccccactctgtaaagcataacagtcaccgcttggagaagtttaagagctaagaccagaatgaaaatatgctaggataatgtgaaggaaatttggccacggtctgactacctccttctccacccaaaaagtggcctgataacgtcccttcttggaccgtcttctctcaccatggtcacgccaaactcctggttcttccgtaatcaccaacggcgcaatacttctacgtcattcacatactgcttccggcaaaggatagcccggaagcggaaactccttggggaaagggcaatcccccgagccggttcccaggccgggtggagaccaactctggggtctgttggtgggagagtggggagcccgtcttctgctgagtgctgccgccccttcccaggacagcggaggtggaacttcgtcgcgctgcaacccccggctcgggtaacgtttctctccagccttaggcagagcccagaagacctgcctttaccagagttccagagagagagggaggaaaagggtaggggggttcagactcctggtttgcccagtagtttgggggaacacattctcctcaccctgtagcgttggggtatccggtgtctatggtccagccctgaggctgtggttcctatttggttttcctagccgatatggtgctttgtgcagctaggtggatgattgttctcgagtatataccgtgtactcctctcggtgaagagagaaatgaagcagtgtttgagggcctagactatcgctagagaattggggcataagcttgcatatgttactacttacccaagccaagaaaatggtgagatacaatgcacatttattgtgaagccttggtgtgtcatctttaagtaaaaagggagaatttgtgagaacaaggagcgaaaggtagcttttttctttgagtacctgctatgtattccagtggttcttaactttttggagataacttatttcttgaaagtttgtggaaagccaggaacaattctttaaaaaatgggcacacatacagtttgtaatacacttaatgagattggtggactctgaagcccatccgtggaccctctgggtgtctgtaaactttaaatgaaaacccccatcctgtatactgtacttgtcactttattcatattaccttctttgaccttctcaataacataaattcttttattttacatatggggaaattgagccccagactttgttcaggggtctgtttgagtctcgtgattccaaagtctgtacttgtatttctttttttctttttctttctttctttctttctttttttttctttttttttttttttttttttttttttttgcactttgtcttccattctccagctactgatcaagctgggaacggaatgggtacctctgtcatacttttcttattgcatgatgctatcctagagttggaagtaaaatatgttatcaggtttaaaaaagaaggtgaccattgtataacccttatgatgaaaacacgtttattgtttaacacgaactttggagtctgactgatggggttaaaatccttgctctgccttataactcgccatgacattgggtgagttaatctatctgcatctcagtttctttatctgtaaaatggagataatcatagtagcactcttttattgggatgttatcaggacttatgtttattcatagttaacatgcgaggtccctagaag

SEQ ID NO: 76809 - DNA, 1435 bp, Homo sapiens
agatattatctaggattattaactttttctttgccagggatcttttaagagacataagtgccattgtttaacacaccagcagttcataaaagagagactgtatcaccaaaaaatatttaaaatatattttcagaataaagatatttatataaagatatgacctttatataaagatataaaggtatttcattccttttaagtaagtacatttaactttatgaaaactttaccacattttccttatttttctaatttttccctggattggtaatggacatattatcacaggtagatactgatccatggcctagcatttggaatcactgtcatattcaacccagacaacttgggctagatgtgatacaggtcctgctgtagtatataatcctaacactagacaaactgttctctatcacattccataacagcagttttagaatcctttaagaatgacaaacgtgttgttgtatcattctaatcacgataactgtattctacctccctgtgcccatggtgattctacttttgctagaggaagagctagattggataattgctttttttgtttgtttgtttttgataattgcttttttaaagttggtgacaaaggttgccaggggagctgagattaagataatgatattactttcttccttgccttcctttttaggatttatttccaatgaacatggacaaaagagtttacagcaaacagtcccaagcagacttcttttttgtttttgttaatactagggtatcaatgtaaatttttctttgttcttgttttctttttccttcagtccccaacacccttcctgcttatttttccaatataatacacagctgggcccaccttaccacatcctcgttgataccaactttatcaacttttccataaaagccaaactggacttagtgcagtcaatgatggactgtctgtatgccaagtgtgagtatcatacttttatgtttccgtgacatttgttcagaataattatatttatacaaatacatgaaaggagggagatggggttcttgttaactgaattgctggccatttaatttacagtggtcaccatagcagtgaccatgtttaatgaattgaagtataatgcaaacttgactggaaaaaattaaactttcacaattcagaaaacacttagaatgcttcgagtatcattatggacatcaattttgaacataggggaattttctgttttagaattctagattttaaaattctagataaatgaaaaatctatttttcagtatctatattcttttatgttaacaaggatatgttctcccttttgccccagtgttgaaacactaaataagacattctgccatttatgatcacagccctagaagttagatagatgatggtcaattcctaagtttattcagtttggtatttattcgtagtacagaggat

SEQ ID NO: 76810 - DNA, 1065 bp, Homo sapiens
ctgggcatagtggtgcgtacctgtggtcctcgctactcgggaggctgaggtgggagaatcattagaacccaggaggataactagaacccaggagtttgaggctgcagtgagttgagatcgtgccactgcgctccagcctgggcaacagagcaagactctgtctcaaaaaaataataaaaataaataatttttttcccatcaggaacttacattaatataaaaataatgacagagttcagcttagttttttttccccagatatgtttataacagggaatctgcagtttggggttgggacaatcttagtttcttagggttttcttctactctagttcttcttgtatatttcagtgtgctaattctgctgtcattgcaaaagtgtcctgggtctttttaaaactctgagcagggatataattcagagataatttcgttacaagttctgttcttaatgtgaatttttttccctggcaggtatcccatgtataaccgattgtgtaatggctgaaattgagaaattggggcagaagtatcgagtggctctaaggtaggaaggaggtaaactagatctgttctagattggtatactgaagattcatctgtttgttgtttaaagatttcttggccagttagttgtgaaaatcatacaaaactatttatcatttttgggggggttgttttggtctttctctcacacaaaaatcagttccagttagagtgtctaaacttttaatagaaaatacagagaatatcttgtccgggctcggtggcctgtaatcccagcactttgggaggccgaggcaggcagatcacctgaggtcaggagtccgagaccagcctgaccaacatggagaaaccctatctcttctaaaaatacaaaattagccggctgtggtggcaggtgcctgtaatcccagctacttgggaggcttaagcaggagaatcgcttgaacctaggaggcggaggttgcagtgagcctacatcacgccattgcactccagcctgggcaacaagagcaaaactctgtctcaaaaaaaaaaaaaaagagaaaatacagagaatat

SEQ ID NO: 76811 - DNA, 1764 bp, Homo sapiens
ggatccaagatttgaacgattaccatgtacacacaaaggaacctatgcagatgactgcttagtacagagagtaactcaggtattatcagttcataactgtttactttgtgcttaaaaaaaaaaaatgtaaactattatctcctgaatgttcatggtcagtaaaacatctaggaatatacattatggttaaattaaaaaaaaattgcatagcattccttcataagaagcataggtgtcttcatttacttgagaaagtggattgaaaatgtacactctaaccataatggaaagagcacaggcttggggaggagacatgggtttcacgtctcagcacctgcatttactggctgtgtgatttgggacatttaactgattctttatctcacaaatctctgtaaaatgattttaagtgagttaatgtagaacccatttatttttgatgtaggaattttgttcctcttcacgatgcctaatccaaaagtgcttcttagttaaatctgagagtctcccaagatgctgtttcacacataccctagaataagtaggtttttaattccttcattaagcaccacaaggacttctgctactgagtgcttttataagggcctctctgctgatgataatcttcatctgctctgctgaccacagagccatccttttagccacttcaccccatggggcgggtgggtggggccagtatttcccacagcacagctgacaccactctgccactttttataaaactcagtaggagagtcagacgtgacagatgtgaagcttcctataaaatagctttcacctgacagctaaatattactgcttttataactgctaggctctagtttcaggccctgaatatcctacttaggcttcctgtttcggggatagcttacctctaacatcagtaggcccagagcacacccaagccccaagatctagggaaaggagggagctatggcctccaaattaaggcactttttatctccatggagttcctcggagcattttcccaaaactaaagaattgtctgccccaagtgtgaaagtccctttcatttatgagcagaaaacagtttgcagcttgtgaaaagttttctaccttctcctcctcaagattctaaatgctgcattcagcccaggcaacttgtttattttatataacaagattaggagctcctagatcatagtaggtactcaacaaattgttatagcctgcccttcgctacttactgtgaaaatgaacgattctcagactggtcagtcgttgtgccattatccagtattcactaagcgtgctcagtgacctcagtgtgaacatcactccatgtctcttacagcataagtgttacattgtggccacagttgaccgggacctgaaaagaagaatccgtaagattcctggagttcctatcatgtacatttctaaccataggtgagaaatttcccttggagaagggaatagaaatatataattgatatcaattgaaaatgaggataagtgataaggttataaaggatttgaaagaaattattgtatcaaatgtttacatagttatatttgaagaaatgagacaaagcaagagcaagagcaaaagagagagataggatttaaggaatgaggcaaacatttaaattgttagagtaagattactggaagaaatagacgtattgttttaaataaaagcagtaatttaaatcaagctaatctttttggccagaaatacctgttttgaaagatttttttttattaacacttcatctgaga

SEQ ID NO: 76812 - DNA, 1072 bp, Homo sapiens
ccccctctgccgcccccgccagtgatgccggggggcggctacggagactggcagccgccaccgccaccgatgcccccgccacccgggccggccctcagctatcagaagcagcagcagtacaaacaccagatgctccaccaccaacgagacgggcctcctggtttggttccaatggagctggaatccccccctgaatctccccctgtgccgcctgggtcctatatgcccccatctcagtcttacatgcccccacctcagccgccaccctcttactaccccccgacctcatctcagccctacctgcctcctgctcagccgtccccttcgcagtccccaccttcccaatcctacctggcgcccaccccttcttactcatcctcctcctcttcctcgcaatcctatttgagccattcccagtcctacttgccctcttctcaggcatctccttcccgcccctcccagggccattctaaatcccaactactagctccaccaccaccgtccgccccccctggaaataagacaactgtccagcaagagcctttggagagtggggccaaaaacaagagtactgaacagcagcaagccgcccctgagccagatccctctacgatgactccacaggtaagaaagcatctgcctgaacctcatctttcacctagagggccctgaatgagcaggcctcagggctttaaccagtggttagtctaattccaacacacaatgactagctaacactccaaaggattccgtaagagtcagagggctgacagctcagctttttaattagctagatgtgaattaccaaaaaaacagcgtttgtagatgtgtatggattacatacagtggtggggtggctcaaaagttacctctcagatacattccttggtttctttgaccatcctcttagattttgttgctgttgcaaatagattttgttgcagagggtcttgttttaaaattgtattttaaacgaaagtttccatttgagagaaagcatgaaaaagaggcctcgccaagggctgacacttgaatgtttgtaaactttatgattagttagcttcttttaaaa

SEQ ID NO: 76813 - DNA, 1011 bp, Homo sapiens
ccaggttcaagcgattctcctgcctcagcctcccgagtagctgggattacaggcatgtgccaccacacccagctaagttttgtatttttagtagagacagggtttcaccatgttggtcaggctggtctcgaactcctcaccttgtgatccgcccgccttggcctcccaaagtgctgggattacagatgtgagccaccgcacccagccaatagttctacattctttatgtttgaaatcccttcattcaatctcgttttaaatgtgacctatattatgatttccctctacctataaaacaacatcccatatgaaatggagttatctgatatgatgggacattcagaagagctggcatcattagcaagttcaggcattttttttctttctaaaatagggatgatcacacttctcttagggtcagtaaggacatttgtgagtgatatcattattatttatttgcagagcttcaaaaatgtgctgaagcctaccataggattgaattagatctggttactacttatagggttcatattaaatagaaattgacctacaaggcggccgggcacggtggctcacgcctgtaatcccagcactttgggaggctgaggtgggcggatcacaaggtcaggagatcgagaccatcctggctaacatggtgaaaccccgtctctactaaaaaatataaaaaattagccgggcgtggtggcgggcgcctgtagtcccaactactcaggaggctgaggcaggagaatggcgtgaactcgggaggcggagcttgcagtgagccgagatcgcgccactgcgctccagcctgggcgacagagcgagactccatctcaagaaaaaaaaaagagaaattgacctacaaggcatactgtcagtgaatcaacaagtacttcagcccttaacaagttcttaaccctggtctggatctaagacaaagcatgagaataggtgatgaagaagctgataaagaatctggacctgtacagttttcattctgtacagtct

SEQ ID NO: 76814 - DNA, 2053 bp, Homo sapiens
ttcaagttcttgaaattatccatattaaaaacttgaaaaatacttattgctaagataggtatttgctttattgtttggttggtttttccaactctgtagtaagttgtctaagccaaaggaaggaagaagaatgatcatcactcaaagaacttaacgaacttattcttagcctcccaaagtctttagtgttctaatttcctaaagcgtcaaatgcccttgattcattaatattttaacctatgattaattatcttatatgaatggttttaaatagtttttatccctttatttgtagaccatgtctgtagatatgcagctgcggcattatgagatgcagcagcaacagtttcaacatctttaccaagaatgggagcgagagtttcagctatgggaggaacaactccattcctatcctcataaagatcagcttcaggagtatgagaagcagtggaaaacatggcagggacatatgaaagccactcagagctatctccaggagaaagtcaattcatttcagaacatgaagaaccagtatatggggaacatgtcaatgccacctccttttgttccatattctcagatgcctccacctctacctacaatgccccctccagtgttgcctccttcattgccaccaccagtgatgccccctgccctccctgctacagtgccaccacctggcatgcccccacctgttatgccaccttctctaccaacctctgttcccccaccagggatgcctccttctctctcttctgcagggccaccaccagttctccccccaccttccctgtcttctgcagggccaccaccagttcttcccccaccatctctctcttcaacagcacctccacctgtcatgcccctcccaccattgtcttcagctacacctcctccaggaatacctccccctggagttccacaagggatacctcctcagttaacagcagccccagttccaccagcctccagttcacagagctcgcaagttccagagaaacctagaccagcactgcttcctactcctgtgtcttttggttctgccccaccgacaacttaccatcctccgttgcaatcagctggtccatcagaacaagtgaattcaaaagctcctttgagcaagtctgctctgccatacagttcattctcatctgatcaaggacttggggagtcttcagctgctccatctcagccaatcactgcagtgaaggacatgccagtgagatcaggtggcctgcttccagatcctcctagaagtagttacttggaaagtccaagaggcccaaggtaggtctgcttttttttctctttttttttggtttggctattttattgacttaggctatttggttctcgatggtataaaaagcttcatttatacaatgtttatactctctttgtacttatattgtctgcttgttaagacatcacgtatgtaatctagaaaaggtaacatgcccccatttctttgatgtctctgcttttgtcctatatgtagagattataatccagaatgaatgtagtattgtagagtaatgctaatcattttgtattgacttattagctttaaaaataatattaaactttatcttttgtttgctttttcattcatttgacaaataattgaattggcaattactatttgttagataatttgttagttgttagagataaagatgaataagccaatattctactggcttgaggcagtgaaatttagcataaggtaagtaggacttttattttatccattcagcaaatatttaagttcctgctcttgtacttagagcagtgaatatagcagaacacataaaattcctgcccccatggagcttacatcctttatattttccccagttaaggagatacttctgtttatcctgaacaacatatttagaaagaaaaaaaattgctggtgtgtaagttttttctctttaccttctaaaaactgttaaattcattttttccaagtttgtaaaaatagatttttctccccaagttgacctaaatgataacttttctatggaaattattattattttttgagacaggg

SEQ ID NO: 76815 - DNA, 1010 bp, Homo sapiens
ttccgtcatgttaatattttctctctttgcctactaaatcttggctgtgtgaatttaggacctattttaagttttgtcttcagaagaaaataacttctcaagttaataatctctgtgctgggaggatattagcaattatctaatatatctgtctacggcaacgcacgtttgtattccatttcagtttgtcacaatgagtcttgcacatatcatcttatttattcctcttagtgatatcaggaggtaaataaatacataagaaaagctgagattcagagaggttgtaaataccttgcctcatataacacagctagtaaatggtcaagatgagattagaatccaaggacttctgacccactttaagtccattgtactttctgtgatgagcagttgtatgcttaacattggcattgtgattaggaacactgccatataaggcattgattctagaaagtttgttttttacattgaacctaaatgtgattctttaacttttatctgttgattctagatttgcctctggagcaacacagaatgaattatcctatgcctcttctacagcatgtcactacagttatttaaaaactattaccctcatgtctccctcaccctacctcacccagtttgctctgccaatcacaactcagattcttttcatcttaacattgtttctaacctcatcctgctgtactgctcactgtcctttgaagggcctttagtttgttagtctccttcagaatgaacacttacttcagatgcagaggagcatgggcctagtaccaacttcattataaataatgtgcttatattgtatagcttaacaaattgcttttttgtttgtttttttcagcactctcacagtgttgactcttgttgaacttaacatcaatctagcttcccaggtctttttcacattagcttttattaagccaagtctctcttatcctgaacttgtgtggttggttttttgtttttgtttttcttgttcctttttctaagactttacattt

SEQ ID NO: 76816 - DNA, 2735 bp, Homo sapiens
aaaaaatactaaaattagctggcatggtaacatgcgcctgtagtcccagctacttgggaggctgaggcaggagaattgcttgaacccgggaggcggaggttgcagtgagccaagatcgtgccactctactccatcctgggtgacagagtgagactccgtctcaaaaaaaaaaaaaaaaaaaaaggcacacatggtatcactactagatcaagaaataggaattactggtgcccaagaaatctccctcatccccctcagttattttctaataccccaaagataactgctatactgagccatagattagttttgcctatttttgaacttcatgtgagtgaaataatactgtatgtactcatgagtctggcatctttcacttgacattgtattattgtgagagtcatccatgttgtgtgtagtagtagtttattcccgttcctgtacaatagttcattgtatgaatataacacaatctgtttatccattttaatattaatggtcattgaagttttttggttattatgaaaagtgctgctgtgtgtcttttgatgctgtatgtgtccctttagatgtatgtgtttgtttgtgtgtgtttaattttgtttggatatctattaaggattggaattgcctgattatagagtatatacatgttctgcgttaatgggtattgttaaacatttttccaaagtggttgtttcagtttatattctcaccagcagtgtttcagtgtttcagtttttttgcatccttatcaacacttggtattgttaaacttttaaggtttagcaatcctagtggatgtttagtggtatcatgataatggatttaatttacatttccctgatgactaatgaggtttcactttttttatttgattattgttaatttgtatttcctcttttatgaaatgctgattcaagtctttttcccattttttgactaggttttatgtcttactgattttgtaggagttctttgtgaattctacacatcagttttttatccattatatgtattacaaatttctcactgcaggactttttattttcttaatgagcacttgaatgtaaacgctgcatgctgggtacagtggctcatgcctgtaatcccagcactttgggaggctgacgcgggcagatcacttgaggtcaggagtttgagaccagcgtggccaacatggtgaagccccagctctaccaaaaatacaaaaattagctaggcatggtggtgcacgcttgtaattccagctactcgggaggccgaggcacaagaatcacttgaatgcagaggtggaggatgcagtgagccgagatcgagtcactacactccagcctgggcgacagagtgacagagcgagaacgagattccgtctcaaaaaaaaaaaagaaactaaacgctgcagtaagacagtttgatctcagtatagtagaaaagtagtctttaccgtttaccttttaggtccaatggaccctttgtattttaaagtttaaagtaattttacaaataatttacagaatttaagaataaaggggccgggcatggtggctcacatctgtaatctcagtactttgggaggcctaggcgagcggatcacttgaggtcaggagtttgagaccagccaggccaacatgggaaaaccctgtctttactaaaaatacaaaaattagctgagcatggttgtgcacacctgcaatctcagctactcaggaggctgaggcatgagaattgcttgaagctgggtggcagaggttgcagaactgcaccactgtactccagcctgggtgacggagtgagagtctgtctcaaaaataaaaataaagggatagtgaaaaaaatgttaaagacaaactcttttcatccattaaatttgggcacacaaacatcttaaaagatgaaataattctgtcacataccctttttttttttctttttttttgagatggagtctcgctctgtcgcccaggctggagtgcagtggcgcaatctcagctcactacaagctccacctcccaggttcacgccattctcctgcttcagcctcccaagtagctggaactacaggtgcccaccgccacgcctggctaattttttgcatttttagtagagacggggtttcaccgtgttagccaggatggtctcgatctcctggcctcgtgatccacccgcctcggcctctcaaagtgctgggattacaggcgtgagccaccgcgcctggccttctgtcacatatccttttagcaaattgagatggtccaggttcttgccacaaaatatgtgataagataaggtccttcctgtttaataactaagtgaattaccacaccacatttcctttctgttcttagaaatatattgtcagctgggcatggtggctcacacacctataattccagccctttgcggggctgaggcaggaggattgcttgaggttaggaatttgagaccagcttgggcaacatagtgagaccctgtctctacaaaaagtaaaaaattagccaggcttggtggcatgtgcctgtggtcccagttatgtgggaggctgaggtgggaggatcgcttgagcctgggaggccaaggcagcagtgagctgtgcactgcactccaacgtaggcaacatagtgagatcctgactcaaaaaaaaagaaagaaaagaaaccgtaaggctacaagtattattatttactttttcttcttttatttctttaaccttttatttttaaatcaatactcca

SEQ ID NO: 76817 - DNA, 1579 bp, Homo sapiens
gataatattagttcatccttctccacctgattcacactccctctttcatgttctgtaacttaaatactgaaatataaggttaactcttattaacacatgttagataataaggaagaaaactaatgaaccaaaaaatatttggttaatacacacacacacacacacacacatatttaaacacaaatatatcaaattaaggaagaaatatttgtaactattgtagtccatatttctgcaatggtcatgtggtcatagctggtatatatgttcttccactactcattccatattccctttgctctaagtaagtacttcagccagttcggattccttgcctcatggggtgacccaggctttcattcttgaaagatatgggctattagcagttctttctgaattacttctgctgtttgcagttctacaaaaccctttgcaattttccgtggacttgaatctcaggacatgggaaatactaagagatgtcctagaggatctcttgcatttcagacacacttcacttcacctgtattgtgcaatagtcactcaaattcctcttgaaagttagggtcagttatccccagtgaatacagtaaccctctccattgcctcttgatttggaacttcagagtaaagttggggtctcaacttcaggttagtggaatcatttgttgtgtcccctagtggatgtgttcgtctctttgaaactagacttttagaacaacaaagcctaaagtcacagggataggaaataaatattttgccaacactgaatttattagtcttcattgatttcccaaagaaatgaaagaaaaagcctcctagcactcattaaaagtcatgaaaggcatcactgtctactactcagtcacctaagccagaaaccttggaatcatcttaaattcttcccttacaactatcattttatttctactggtgacaaaatcctatcaattctaccttattttacatctctcacttttatcccctcctctacattctcatatcagtcactgccttagactaggcatcaccttcacttacccaaattgtaaagatgatctttaaactttttgtctctgtccactatttttctgctaaagcaatcttttaaaaatcagactatatttagtggctctaagtgcttataaggtaacaccaaactccttaaccagctgaattaatttatctgttataatcgagatccaagtcagatggctttaacaagttagaagtttattctctcttaggacttaggtgatggttcaggaatccagttccttctgatttacctggtcttggatatttcaccaccatgtcagaaccagcatgaaaaaggaaatggagaagaggaggatgtgccctttcctttaaggggacaacccagaagatgtgcaaatcattttcactctcagctccttggccagaacttggctgccagttctagctgcaagagatattgagaaagagagtcttgtctggggggccttgtgtctagctacaggaggcctgttattgtagataagtggggaatgggtattggaagaccaccagtagtctctgccacatgaggcatacacaa

SEQ ID NO: 76818 - DNA, 4001 bp, Homo sapiens
tttctgctttactgtcttgagtaatatcttttgttttacttgtagatttgatggtcctcgaagatttgaggatttagggtcaaggtgtgaaggaccgagacccaaagggcctcgttttgaaggaaatcgccccgatgggccaagacccagatatgaaggtcacccagcagagggcactaaaagcaagtggggaatgattccccgggggccagcatctcaattttatattacccccagtacatccctaagtcctcgacagagtggaccacagtggaaaggccccaaaccagcttttggacagcagcatcagcagcaacctaagtcacaagcagaacctctttcaggaaacaaagaaccattagcagacaccagtagtaaccagcagaagaattttaaaatgcaatcagctgcattttccattgctgcagatgtaaaggatgtcaaggcggctcagtcaaatgagaatctaagcgactctcaacaagagccacctaaaagtgaagtctcggaagggcccgtagagccctctaattgggaccagaatgttcaaagtatggagactcaaatcgacaaagcccaagctgttactcagcctgtaccccttgcgaataagcctgtacctgctcaatctacttttccttcaaaaacaggggggatggagggaggaacagcagtagcaacatcatcattaacagcagataatgattttaaacctgtgggtattggtctaccccattcagaaaacaaccaagataaaggcctgcctcggccagataatagagataatagattagaaggcaatagaggcaacagctcatcttacagaggtcctgggcaaagcagaatggaagacacacgggataaaggtctagtaaacagaggtcgcggccaggcaatcagtcgaggcccaggattggtcaagcaagaagactttcgggataagatgatgggtagaagagaagatagtcgagagaagatgaacagaggagaaggtagccgggacagagggttggtgaggcctggaagcagtcgggagaaagtgccaggtggtcttcaagggagccaggacaggggtgcagctggcagccgagaaaggggaccacctcggagggctggcagtcaggagaggggacctcttcgaagggctgggagtagagagagaataccaccccgaagagctgggagcagggagagaggaccacctcgagggcctggcagtcgagaaaggggactgggaagatcagattttggtcgtgatagaggtccattcagaccagaaccaggagatggtggggaaaaaatgtatccatatcaccgggatgagcctcctagggctccatggaaccatggagaagagcgagggcatgaagagtttccattagatggtagaaatgctccaatggaacgagaaagactcgatgactgggatagagagagatactggagagaatgtgaacgtgactatcaagatgatacactagagctctataacagagaggacaggttctcagcaccaccatctcggtctcatgatggagataggcgaggcccttggtgggatgattgggagagagaccaggatatggatgaggactacaatagggaaatggaaagggacatggacagggatgtggatcggatttcaagacctatggatatgtatgatagaagtttggataatgagtgggacagagattatgggagaccactggatgaacaagaatcacagtttcgtgaacgggatattccatctcttccacctttaccgcccctcccacctcttccacctttggatagatatcgggatgatagatggagagaagaaagaaatcgagagcatgggtatgatcgagatttccgtgataggggtgagttgaggattcgagagtatccagaaagaggagatacatggcgggaaaagcgagattatgttcctgacagaatggactgggaaagagaacggttgtcagacagatggtacccatctgatgtggatagacattcccccatggcggaacatatgccctcctcacatcattcctcagaaatgatggggtccgatgcaagcttagactctgaccaaggccttggaggggtaatggttctcagtcagaggcagcatgaaatcattttgaaagctgcacaagaactgaaaatgcttcggtaagttgactccttcagatcctttcttttaataaaaaccacattcagactgctctttttaaagtgatatgatatatttgaatggaatcattttacttcaagttcttatcacatacttttaatttatatttctggtcattcagtgctgttttagggttagaatgggtatttaggaactgtgttaatgataaacttatgccctaagatgtgaaaattgattgctgtcttggcctttgtagaagtgttgctggcatgccatgcctgtgcatgtttcaagtgtcaaacttcaacttttcagtgctctggatttcacagggttcatgtgtaaccttcattttttccagtaatcagtttgttctttggtattagatctgatagactttatattcactaatcattgataaaactttggaaagtgctgtatttttctttgttgaagctaagaatggtttgcttaggagcatcctcagatttgtcttaactattgatactttcttttggggatgttttatctttcattataactaaaagcagatatttctccttgaggatgttatttgtttctacataaccaaatgttttctttgtgaaatggaaaataggatttcttgacttacaatcaactgtgtataggtatctacataattttcctcttttcttgtggtaacaacaataacaaaagctaacatttattgcatgcttactccgggccaggaactgtactaagtgtgttgtgtataataaactcatttaatccttaaaccagctgtatcttgggataggaatttagaagtcagtgacagattgaaaacttttttaaagcaatttttttgagaaagtcaattaatgattaggttttgataaattccaatgtatttcttccatttttcaattctggtttacatttgtggatcttaacaataaattataacttaaactttagaactaggaaagaaaaatacggtgaagaaaaggtaatgatgaaagaccagatacggcaggtttgtatggtctatagctaagaggtttattttttccagattactcatgaagaaaatgtggaaagcatgctatagaatatttagctactacactattcacttttaagttatagacacctttaattttaacacctaccgtgtaactgggcacttgctaataattgagtgtatattatgtcagtctgtctatctcaaaggcctgcaaagataaggtagtattatccccacttcacaaatgacactaaagttcaaagaggttaagttcccttggctagtaagtggcaaacccggcctttgaactcaatctgtctaaaactctaaaatctgtgttatttatggagaataccaagctgattggtgttgttaagctgccaaggtttctttttttttcctttttaaatttctttttaattcgttattgctttgcatggtaatgctggataaaaggtgctgctgctgcttcatccttttttaaagctttctaggcaacatgaacataattaaacaatatatagggagtgatggataatgtcatagccgaatacaagtcgtttatgttgtgtcagtgtaaagtcgtaaggagtatcataagggatgtgatgatgggatttacctgagcagtaaataatcttacacacttgacccttactttgtggtccctcatttgtggaccctcatttgggtcactttaatgtaaggagaaaattgtaaaaggtcttaagaaattgtagtggattttacctatgtttaaggtaggcattgtgaaaaaaagtaaaaggaatttcgtcagtttaaagaaaaaaccgaaggattacataattatcttcaggaatatga

SEQ ID NO: 76819 - DNA, 1019 bp, Homo sapiens
ctaccatctccatcatagacatttctgatggtaactggtgatgctttgggaaaacaaatggaaggagggcacacaacagtggcactccttagattactagatgttcatttagtttattttgttgtttcatagtactcatgttctctgttggtctcagcttcaccacagatgactattgtcaaccagataactgaaaggaacagaagtgtggaggctatctaggatttctctcactgaaaatttactgtttttgtggaggagataggtctctagagtaggaagatagttcttatttatttattcatttctctccttcctgcacactgagcataggaagatagttcttaaccgagggttataaatcagaattattcatggagggtttttttaaaattttgaattactggtgggaccccacctacagaagttcagtagatttggtattggcctgggacatttgaatcttacgtggctaccaccctaatttggagtatggaaattttaaaacgttttcattacccctgtaagatcactgcaccagtttacagttagttaatcctcattcctaccccagtcccagcactttctgtctatatagatttgcctttctgggcattttgtataaatgaattatataatatgtagtcttttgtgtctatcttcttttcaaagtttacccatgttgtagcatgactcagtacttcatttctttttactgctttttaaatttctttttatttataacctgttacatgaatataccacattttgtttaaccattcaccagttgttggacattagggttgttgaatagtacggctatgaatgtttgtgtgcaagtctttggatggacatatgtttttatttttcttggatagataccgagaaatgaaattgctgagccatatgataaatttatgtttggccgggtgcggtggctcatgcctgtaatcccagcattttgggaggctgaggtgggtggatcgcctgaggtcaggagttcgagaccagcctgacca

SEQ ID NO: 76820 - DNA, 1017 bp, Homo sapiens
tcttagttgaatttatggcaaaaatttataccagctctgaagttagatttatagttttctgcttttatttctataaaagggatatagttattttgtactaattgtttttgtagagcatgcaggccaacgtgatcgttatgatagagaaagagatcgtgagccttattttgatcgtcaaagtaatgtcatagcagatcatcgagattttaaaagggatcgtgagacacatagagatcgagaccgggatcgtggtgttattgactatgaccgggatcgatttgacagagaacgccgaccccgagatgataggtatgctataaaacaatctttgctaggtgtacaaattactgtatacttaacagtaaaagtttaagagaaatttaataagtaacatattcttctcatgcatgtgtatatgtaatttggagggggaagaacaattctggaccagttttcaggaaagtaggtccttgacttggtagcttgaattccagagaattaaatgggagatggagatagccagaagggaatggaaatggtattgtcaataaaggtgcagtcatactcagtaggcaagcaatttatttttgcaattcatgagctttttatttattattattattattattattatacctaagggcattctggcagccagccaaggaaaagggaaaggggggcaagcccatgaactatttatttatttattcattactattttgtatggagacggggtctctctcagtctgtcacccaggctggaatgcagtggcgcagtctcagctcactgcagcctccacctcctgggctcaagtgatcctcccacctcagtctcctgagtagctggggccacaggcatgtgccaccatgcctggctaattttttttttgtttttgatgacgatgtggtttcaccatgttgcccaggctgatctcaaacttctgagctcaagtgatccacctgcctcggccttccgaagtgctgggattataggcgtgagccatcatgcccagcttt

SEQ ID NO: 76821 - DNA, 1466 bp, Homo sapiens
atccatgtttggaggtagagtgatgccttattaactacaaggatgttgagaatgtaaagcatgggagatgctttccattgtagctatgaatttaaacttttagagtaaaacgtattcacagatttcttagagctggtggcattgtcctaaaaaatagcagtgtaattaatgaaataaagcatgtttatttttaaaacaaagtagaatcaaaattactgatagtctcactacctaccatactacagctattataattttgtagctttcctctcattcgctctttacagacatatttatgaagttgtaatcaaagtataataatacaatttctttatcgtgattgttctgattgatattgcaccatacacatttttcatatgtaaacctattttattaatggctctgtgacattccattgagtggataaaatataagaccaagacccttattcttagttatttaggttgcttttagtttttcactgctatgatttacacttaaactagaaactcatacctatttttaggaacaggctctcctaagatggtataactcttactcttaaaaccataaagcagaagttacagaacttaggactatccagcaaagcatttattattcttccatgtcctgttgcttaactttcctacatttaatacaaacaaggatgaattcagtgttttgcagaacattctatttgcctgaaatcatacttaaatcttctcattttcttgacttcagtagattttacattaccttaaattttctctaattaaagttaaaagtggccccaaaatcactggacttggtttgaattatattaccttaggatgtgtggggagagttgaatttcaaaataattactctacaaatagtaattttgttcaactgctggaatcctaggagaacgaaggacttatcctgaggagcgaatgcctctgccagctccttcactgagccaccagcctcctccagctccacgagtcgagaagaagcctgaatcaaagaatgtggacgatattttgaaaccaccgggccgggagagcagacctgagagagtgagtcctatgaagttgattcgtcttcgtgcaaaccagaagataagagatcttgttaatatcctgaaaagaatttctttatttttctgcaacatagtaataatatcagattcaagacgttttactatctctaaatcaccatataatctcataaatggcctacactatagaatctttaagaatttagcactaaagtacttggcaaaaaagatgttgaattttaaaacatattaatgagacctcaattaattgcgcgttgaagagaggaaaagtggatttggttttatggtgtgtggaatagaaagggagaattaggagacttgattagcttaggcttaatttcctagtgacctccaaatgtgcgcattctattaaatttgtcttattacagaataattagactgactc

SEQ ID NO: 76822 - DNA, 1021 bp, Homo sapiens
tactttatattatttctgtcctttcaaatttatgaaggtttgtttcatggcctgttgtatagtctatcctggaaaatggtaggtcattgttaactgttatctcattgcagaaaattttctctcagtgatttttttttttttttggtctattctgtttcagattgttgttataatgagaggattacctggcagtggaaagacacatgttgcaaaacttattcgagtgagtatggggaagctgaaaaatcagctgcttgtgctgcttgtgttagtagtcacttgccttcttattaatagcaagcaacataatgccaatagaattgtcttccatttgatccattacagttggcccatgtggtagatgttgtcccatatatatttttatctactcagagaaacatttttgcctctgcttgatttgaaaccaccagaagattgtatattatttagccacaagagggaactttggtgtgaacattaatttattccataaattcgttttaaccttcttgactgtatgattcttaggataaggaggtagaatttggaggacctgcacccagagttctaagcctggatgattacttcatcactgaagtggaaaaagaagaaaaagatccagattctggaaagaaagtgaaaaagaaggtatggtattcatctcagatctcgttctgattcattaatagtatttaaaggaaaatgtgtttggagagaaatgtggcttttttgagggcagggacctctctcttttccgaacacagtactttagtacttgggtgtgaaggaaagactacaaagtcatctctatccaaatactaaccaaggaaaaggttttggatgattctttgcttttgctaattccatatctcttttgggggaccttaggtaatggaatatgaatatgaagctgagatggaggagacttaccgcaccagcatgttcaaaactttcaaaaagactctggatgatggcttttttcccttcatcatcctggatgccatcaatgacagagttaggc

SEQ ID NO: 76823 - DNA, 1136 bp, Homo sapiens
ttatggcctggcatggtggcttaggcctgtaatcccagcactttgggaggctgaggtgggcggatcgcttgagcctgggagtttgagaccaacctgggcaacatggcgaaaccctgtctctacaaaaaaatacaaaaattagctgggcatggtgtcatgtgcctgtggtcccagctactggggaggctgaagtgggaagatcacttgagcccaccatgtcaaggctgcagtgagccatgttggcgccactacactccagcctgggtgacagaccgagattctgtctcaaaaaaaaaaagaaattagcccattagactttacaatattaaattaatatttaacaaatatttaattaatatttaacaatattttaaaatattgttaaatgttgtttatcttggatgcttacttggtctttgagtagtttctagagataactcaaccatctgaatttttcaatagatggctgatcactgggaaactgcacctcgtcacatgatgcgtctagatattcgttctttgctgcaagatgctgctattgaagaggtgagtatcctttggttcaaatgcaatgcaaagtgatgttactttttcacctttttactttgaaaaacttaaaacctacagaaaagttatatgaatagtattcatacaagaacacctactgatatgcctttcattgagatcacggttagtattttgccacatttttctctgaatgcatgtattcttattaacattcttgttaatgatgtcactgtttttgtggaaccatttgagagttaagttgcagatcttataaaccttcacccttaaatacatcagtaggtatcttgtaagaacaagtacattctcttttgatttgatgacagttatcaaatgcaggaaatttagtattgataaaatactatattaagtaatataaatttcctgaattaaatttcttgaattatctcacatatagtttatattcacattttaccagttgtccctataacgtggtatatagaaattttcaaaaatctaagattcaatcctttaatataaaatatagtttctcagccttgtcattgtcatgaaagataaagaatttatgaagagtataggcctgttttgtagaatgcccctcaatttga

SEQ ID NO: 76824 - DNA, 4382 bp, Homo sapiens
attgtcattgtgctttttttttttttttttttgaggtggagtctcactctgtcacctagattgtagtgcagtggtgtaatctcggctcactgcaacctccgcctccagggttcaggcgattctcctgcctcagcctccttattagctggaactacaggcatgcgccaccatgcctggctaatttttgtatttttagtagagatggagtttcaccatgttggccaggctggtcttgaactcctggcctcaagtaatctgcccacctcagcctccgaaagtgctgggattacagacgtgagccaccatgcccaaccgtcattgttcttttatgtgtttttaattcccatgccatttctcaacccatttttttctggcttctgccactaccattgtctggcaactctttcactaatgatttccgtggcagtggacagttctcatttcctctattgattaattttgtagccacatgtaatatagttgaccatgcccaccttcttaaaaaacatatttttctcttggcttttgtgaattcacatttttctggttttccttttacttttttggctatctcttttcagtctccttcactggcttctcctgcttctcactctttaaaagggcccccttagggctccatcctaggctctgtttttattttgtaccctctgtatagatcatctgaatctttccggtagcttagattgtcacttacgtgccattaatgttataaagtctagattgaattatattactatctaaatagtagtgtttctgaatggagggagtataggtgatttttataatcttctttttactattattttccaaattctctacaaaaaatatatattatcttagtatacctcaaactcaacctatccaaaatattgttcgtccaaacctgtttttcatttagtagtctctgttttagtaattagaaccctaaccacttgattgctgaaaccggtgctctgggagttatccctgactcttttgtcattgttgagacagagtctgactctattgccctggctggagtgcggtggcatgatcatagctcattgctgcctcacctcctgggttcaaatgatcctctcacctcagcctcctgagtagctgagactacaggcgcatgccctgtgcccagctaattttttatttttttttagagatggggtctcactatgttgcccaggctggtcttgaactcctagactcaagcgatcctcctgccccaacctcacaaagtgctgggattataggcgtgagccactgtgcccaggcctgactctttactctgcccttgtgacctgtcatgtagtcaagaaagtttagtcagttgtaccttttaatgacctctgtaactcatctgcttatttgcgttgctaccactctgggccaagccaatatcatcccacttttcactatactttttcttatattttgaaatttgaatcattgacatgtttttacctgattggaaaaatactcgttaaagatttttaaaagtctagtaatccataggcattcaaaataggtaaccatctacttagcacttatacttaactttacagggaattgtacagatggatattcaaggaaaattaaaggcagtagtatcctgtcttttatcagttctgtttcaaaatttagggtgttaaaaattacttggtatgtaacagtgagcctgtcttgctctgggcaactgtattcattccagatctcaatgagggagtcaatattttgctaaatgttaactcagtctttttttttttttttaatggttggtataggtagagatggaagattttgatgcaaatatcgaagaacagaaagaagaaaagaaagatgcagaggaagaggaaagcgaactggtaggagacagaccaaccactttgaacagtgtctctttattaaaattcttaaagaaggtttaaattcagatctgtggttagacaactactgttgatatacactttagtggtaaaagtttccataatcatcttcaaggagacttttggatactctttatttttccccagaccaaaagaaccctctaatgtggtgttaagagaaagttttaacagagtgctaagaaacttacccttgtactcatctatttgtgggtggttttaggggagtataccttttaagaaaatcaattacatatgaaagggcattcttacattccagcagatatgtggcacagcctacccaacatatgcataattgtctcttctttgctacaagatctccaaatttgagtttctgtcaacagaggcagaagaacttattgaatggggaggcagagggttgccactggctgctagatttgttcttctgcattttatcctaagtgacggggaaaaattaaatgactgtgtaggcaatggattttgctcaggctgattagaggcttacatagtgtgagtttaaagtttctgtgtacctaatgtaaaatgctttcgatcacacctctgtagagatgtttgcctttccctgtcattcaagaatatgcgacctatagagttacgttgacttttcagtgtttactgaagtacagagattagcaatgccttggaatagtgttgctttttaaatccagaatattactcggtttatttaatacttgagcccttgctaaagttgctcctcatattcttttgaaaatgtacaaaatgagaactctgattcctaccccctagagtatacagaatctccagggagtggtcccatcgaacccgtgtgtgatatagaggactcttgataaaaactgtgtttatataaagatggtgtcaacctctacattccaagatttcaaatgtggattaaaaaataagttttaaagttaatggcatttgagtctcagtatgtgttttttttaaatctagttttcttaagttgtattttggcatatataatttaaaatgtaggcaggatattcactacaaggtccacgctcttctggaatatggctaatgacttctttagccatttgcagcgtgtgtactagaaactgattacgtgagaagtctataatgttttagctttctgaagctccgtctttcttttgtggagatttcagtggttcataacatctgacttgcttaggtgtaggtcaaaacttgggaacttttaattgaatgtactattactttttaaagtgaaacacactgtaatactatatttttacatcagagtcatggcaaggaggccttaaaattctaccctgctggattatctgttttatttccaagtggcctacaatttcaagcaatgggagagtaatatagtttaaaggaagcacaggatgattccagcagggggaaatgaatacacttgtctgcctgacttgattataaaacttctcttaacccattcaaagatgcagaattgaaatcttttactattggagtccattccaagagtaaaagattcttggagaatatgttaaccaagggttaagagcaagtttcataccaaccactcagatcatttaaatggaattctcagtaaaccttgcattttccactctgcactaattaatatagctggatgaaatccaaagttttgttggtaaagataatcgtttgtaggggatcattggtatgatagtttgcctcctttagtgcttcagtgaacctagtagataaaatttataaatatattattccagtgatgcttaaagttttcagatgatttttaagatgtaacttgtcttcagtacttttagcactatcacttcagtatagctttgtcttggtttgttctaaaaaatgtatttgggaaatatataatttgtaatccaaaatactacctagtaagttgaaattgaattattagttctggctggtagactagaaatgtatgaaacccataggattatgctctagtaaactcttacacagaagctatcatcatgaaatcttcaaaatgctttgtgacttactttacctgtgtgtcagtttgtttcatgaacttgaacattcccaacagtagagagatagattgattcataaaagaggatactgacacctttgatgaatctgtcctatttactaggttccaatattaacatttctgtatgttaggtctaatggaaaacagtctaaatgaaggtaaaggggaataatgataaatcacatggtaaaagcatatacttgctaggtgaataaacagaaatgattactgcatagttcaataggcacactgggaaatttgaaaatcttttgggagtgactttgaaataagccacccagttattttatgaaatataagatgtaagttgccagtggagatttctggtttttcatgtaagaggaaaacataattttaaaaaacatcagaaataataatctagttttcaactgataaaaatg

SEQ ID NO: 76825 - DNA, 3974 bp, Homo sapiens
atattaacttgtaatctctagaggcctcatgtaatacatgatctggggtaatgctgttttaaactcaagccagtccatcttttacttttctttctgtttttaaaaggaaaagggaatttagttgtgatgattattcaagaatatatattaatattggtatttcttggaatttctggaaaacattctggcccgtctaccatttgcttctcagaaaaaaacattttatacaaattttcagttttaaagacagaatagtagacaatgaattccagaaatggatttttaaaacaaaccatttcagtgaaaggcactgaagatctggtaataaatctaggaaataaattttaacatatttacagtcgggtttttattttttaacaagagtgatagtgatgttgtatataaggacttgtatcttgcaccactgtattgagagctaatcccaccacagaggaaggcaaatttagtgtgcattcttgaaagtgcttagtactttgaggttggtccattgagccaactgagaagattcttctctaaaacatgaggatcttgtgtcggatcttgtagcctatttatgttgccttccttatcataacaaatttaatataatttgattaccaagtacaatttatttttctgagtactttaccaacattctccaattactcttggaaaatgattatactgggtggaaatgtattaagttttagcagtgtcacatgttgagcaaaaacagttgaatctgaaacagaggaattttgattcacaaatgagtctgccagtgagaacatacttacctatagtctttgaagcagctggttagagcttattgcagattcttggtctatgctcattaagtttagtacacagttcagcctgtgcctgaatgttaaattggaagtgatgtgatttttagaacagttcagaacaggcctgagctacctctggcatggagttgttgaaggctgcctgtggcccaccttcagtcccaccagactggttcttccctgctgggacacaggcatcataatgcaagggcaggttgttacttgccacatcaggtggtgggattcagcattgaagctacttaaactccagtgacatgattttagtttctcatactgtgaagctagaatatttgagactgttaccatcctaatttaggtttcttcatataaagtacttttgcttttctcatctcagtgtcatttgtctctactcttgagttgtatattggttttctacatgtcagacagattcatctcttcagagttggaatataattattatttgtataggtgcataatcttgtatgtttacgttgaacagattttcagaaataccatttacatttagaaaatacatagatgtatctaaggaatttttctgttgtgctataatacatactgtttcaaatatgtggtaaaattctgtgacctgccatattggatttaaaacttcatcttcatcttaaaacttcatcttttgaaatctctgaaaatcattagtgtgcatgtattgaacaccagtctttattctgtaattaacaccccagatttctttcccctcaccttatgccatccatctgtgtgtttggtttccagtatgccatgtggaagaggtgtgagcctttcttcagcccaagaaggaaactttaaacatatttgcacaataaaatttcaaattaaacatttcaaaaagggtgctcagactagaaatacatgctcttctgaaattccatgttgcaactgtaactcctgtcatatatacccagtgtatgaggaaaagttcttgcagttttcacactgcccttctgtattgctgcctggctgtgctctgttgttggaactgaaatatgaaatttttactttgaagtatgttaatgtcaaagttgatcgtattaagtttggaaatcctttgaggtttatctaataagtgtgttggagcttctgtctcttctggtaatactgtaccctgttgaaccaagaacagttttattgtttgtgggacttcgttggttttctaataccataacctgtgtccctgtgcagtcagggggtcacttctttaagatcatgtataatacggcccgtcatatacacgtagatagagccatgtgattccagaaattagaagactggatctgtggaatccatacatgttaaaattttgccaaaatgagatgattaaaatttttgtgagttttataaactgttgcagttcgccttactgatttttcaatgataatcacttttatgggaagggggcttaggaacaaaaaactttgccaagaatgcaaaatcttactggtttttaaagcttgtaacagttgtgtgtaaaacttttatatttgaaacgtaaactcaccctttctgccactgctttcattgcacttttcataccaagttctctccaacgtggtgtctgaaagatttttattatatacactctttatggaattcaatgaagtgtggttatgctgtgtttctgaagtttttaggcttttcttcattggcctgcctaatactagtgtgtttctataacttcagatgattcaaaagtttagtgcttcattgtagcaaaaaatgtatataactcataatatcctacatgtagtattcaaaatcaattattaataaccaataaaagactcaacacattttcattgcgtgttcttctttaagacacctaaactcatatctcataatttctgaatccgcaatccctattcattaattgattacagtttttgagttgttggaaagcctagccctctcagattcagggttcagaaagaattaccaggtctggtaaaattgtctgactagcccttagcctcagaatggtcaacttcatagtataagcaaagaaagtggtgatctcatatagtcagctttttcatgaacattaattcatggtgaatgcactcacagcaaccaaaatccaaaaaaaaaaaatgttcatctaaaaccttaaacattagcttggctcattgagttcttggtacaacctgcttttcatatgacacagtatcaaacatgatttcagatgaaatgggtggtgttaatattgtgttaaagaaaaaaagaatggaagacactgtctagaaaagcccaactttgcatttgccatcagaaaatgagaactgtggtgggtgggaggacaaggaggccaggagccaagtgccttttcttgccttgcccatatttgctcttaaaccaacatcgtaaacataatggctaccagtgtgaataccaaacaatggaaattgcacagaacttgatattatctcagccaagaagatagtttggatctgcaagtgatgctgcactcaaaaatgtggatatgccctctgaaagcgttccagccttcttttcccctgtgtgtgtgtcgtgtgcaaactcacactcttccttaatgctacggctctgtgtttgtccctcagacaagttggatggcttgaggactggtactaaaaggaaacgtgactgggaggccattgccagcagaatggaggattatcttcagctccccgatgattatgatactcgtgcttctgagcctgggaagaagagggtaagagactttgtcaataactgccaacaaatgaagggcccatttaggcatctggttttaggaagttacaggcagatgatcacatggatgctatttttagaatgatttagtttacgctatgtcatgtatcccaagaaggagtcataccttataaattatctcatcaaaatgtacaagtagcttaaaaaattggagaacagaacctcacatggctagcacgttgtcaaccttaaaggcattgggagtggccagtcacttgtgctattttgtcatggggcaaaaaaagccaggtacagagtagggtattgaagagaacctgtggaacttcttaatggatgggatgtggagggtccaaaggtagatcaagggtgaccccttggtactctggccatgagcac

SEQ ID NO: 76826 - DNA, 3969 bp, Homo sapiens
tgcctcagcctcctgagtagctgggattacaggcacccaccaccacgtccggctaattttgtttgtatttttagtagagacggggtttcgccatgttggccaggctggtctcaaactcctgacctcaggtgatctgtctgctgcagcctcccaaagtgctgggattacaggcgtgagccactgtgcctggcctaattccaatgttaaaatcttgaacatttattcgcaaacatactactcatttcaaaaacacctacacattttttcttctaatcctatattctttattttatctgagtttaaaacttagaatttaaactgtagatttaaaagtagcaaggtgagattgatcagtatatttaactatgtgctgaggttgataagtatatttaactatgtgctgaggatgccgtgggaatggatttaaatttgctgtgggctgtttactttttctttattcaatgagccttaccatataaggggcaaactgtggccactgaacaaagaaaaagtaaccagcccacagcaaatttaaatccattcccacggcatcctgagcacagtattgtgttttcacataaatgcccaagacttagttcgtaatgatctttcgctaaaatgtgtatccttgatccaggtggagctgagagaatatacatgaattaaatttaattaattaattattattgaggtagggtctctctgtcacccaggctggagtacagtggtgtgatcttggctcactgccacttctgcctcccaggctcaaacaattctcccacctcatcctccctagtagctaggatttcaggcacccaccacacaccatgcccagctaatttttgtatttttagtagagacacggtttcgccttgttgcccaggctggtcttgaacacctaggctgacgtgatctgccggcctcggcctcccaaagtgctggagttataggtgtaagccactgtgcctggctgtatatatgaattaatcaaaataggtacttcagcattgatgagcagaatgcccaaagatttttctatattgaagcccacattatttattaggcttcttactaaagcccatgaaagacattgagccataggttttctatacactaaaaacctactttctggaaagtcagatgttaccagtttcttcccactgctattactttggctcctccctttgaccaggtgatactgttaaaagcctagttatttcattgctagtcatgcaaatggtaattagtgtacattagagcaataatgcattcccaggttcagtgtaaagagcatggtgtttccatgctctggttctctctccttgtcacagataataaatcacaagccatgtttaaaatacattctctgcagtctttgatactgtgtagtgcaagcaacagattcatagtttctttttaagaatctgaacttttacagaatatgtatatctccatatacttttaaaaacatattaacataatatgtggctgggcatggtggctcatgcttgtaatcctagcactttgggcggccaaggcaggaggattgcttgagtccagcagtttgagaccagcctgggcaacatagtgagactctgactctaaaaaaaaaaaaaaaaattacaaaaatttttaaaaagcataatatgtaagaatatatatatattaaaaatcagaataccaataggaaatatccctgatccatatatttgtagttgtaatcttgccatgaattatatcagttgagtctgtttcttggtctctttatctcatgaatgaaagtaataataccagcttactgttttctctaagattaaatttcaagaaatatttttgtgtagagataaataaaattcagttattgatctagggtgttgatagtctgttagggaagacagatctgtaagtggataattatactacggtgtggaagttcaaaagcagacatatcaaaatccggaagttaactgtggaaagcagtgattatttgattggcaaaggaaaaaggggtaagtcagggaaggatgactagactcatgccaagtggataaggttagggaaaagacatttcaggaagaatgactagtacatatatgcagagttatagagacatgaaatggtgcgatgcgctctgagtgctagaaggaagtctgtattgtttgtataaaatgccataggcactggccagagatgttgcaggaaagtgtagttggggccagatcaagagggacctgagttcttggactttgcctggtaggtaggggaaggagttaaagcaaatgaatcacaactgtgtgttttaggaagatcactctggcagcatgaatctggagcgggtgagtacagacaggaagactaggtagagattagtgctttgctttcaggtgaaaaaaaaatgaggtcagtgaattattaaataaaaaggaatggcagaggagaaagagaggacaggattgagctgaactgttcaggagctggaatggttaggacttggattgtccagagagttttctctttgtgacttaaaatatatggcttttcccagttttcctgggttagtttttaattttttaaacttgcggtttcaaatgagtcattctaccccttagactgtccagagagggagggggctctttgcatatttatttttcctaaagctcagcctaatgctatgttctttttaggtcagatgggcagacctggaagagaagaaggatgcagataggaaaagggccataggttttgtggtcggacagactgattgggagaagatcacagatgaaagtggtcacctggctgaaaaagccctcaatcgaaccaaatatatatgagacttagtttttgaacggagtcattattcctctaaggtaagagtacacagtcatataaatagcctactgtgtggttgcttcaaagggtttgagataaagaagacagcatattttgctaaaaatgctctcttcttgtgttattttatagttctgaaagagtaagtatgtactagttgttaacatttacaatactattagaaaaggaagccattttctgcaagctggctcacttataaaaataaaaaccttgagaaaaacttgaattctatagatttgggaaggactgaaatgatgttatactaagggctactgaactttttgcctgttctttccaggtgtgacagccttttcttttctttccaggtggttcgctttgaggtggtctgaagccaaggcctcgcggagcttctttgtgtgtcaccttgcttccacgtttcagttcttgttttgtttctactgctttagttttttttaaagttctccagtgtccccaagaggtattagaatcttgctgtacccaagcaagacgttaatttttcttttaactgttttggggagggagggagtgatagcttaactgctgaagccaggcgggggtctgctggaggattccaacagagagtatttcctccactgtacaatgtcacagactatctctatcatcattgctttgtggctgtttctgttttttactgtatgtaactggtagctgattgtactaggattaaaaacaataaactttcatgataaagccgatgagattcatgggctatacagcatgggcccttttctcttgttttcttaattttatttttaattgctttttaaatatggtatgtcctaattaaatgctagctgaacatcccaaaacctttttttcattgaatattatatggctcaatgattccgtagcacatgttgtaaaacacagggttcaaatgatgttcaaaacactcatctttgttttatagctgatttctctatctttgtgtcttgaagactgaccaagttcaaatattcatcagttccctggagcatatccattctgtaacatgatgctttatttaaaaattttttttgatcctctctctgttcttccctctcttctttccttccttcttcttttcactttctgcct

SEQ ID NO: 76827 - DNA, 1774 bp, Homo sapiens
atgaagattgcagggaaagagtataaagatgcagagcactctggcatgtaacctttaagcctgtcaggttttcaagttcttgccagattgttcattactggaaagcatggccttctgcacagaatttcctctcttgtggttaataccaggtggaacccagaaacatacagagataaaacccaaatattatttctatgtaaacacagaaaagggactcttccctttttcatcctgcaaagaaaaaagtcatcttttagcatgaaagaagatgagagagccttcttcctcaagcataatttgcattttgtaatccaactcagtaatttgtaaatgtgttcactgaagacttcaatattttgaaatattctctttcaggccacagatgaaaatcctttacttttatgacctacattaaagactgtatgaatagagctaatagttactagcatttgaatagtatcactttgggttcaacaaattgatattatagtactgaatacccctaatttaatggaaattctaacaactttctgtacttttatcttccctgaaaatctgaatttttaagcaagtgactttaagttcattaagtcaatattgaatgtataaattgctacattaaataacttctgctgtttgtagtatttaataagctattttcattgcttattggcctacaatacatttctgtgtactgacctttctcagcagcctttattatgtagagtgaagatatgtcgcaaaaatagccaaatagaattattgtttgtacaaagactcatttactactttctaaagccacccaatgcctattatcaaaaacaaaacttccataatgtgttctctagttcagatgaaatggaggccgatatgttcttctgcaggatgctttatttcagttgtccttaaccttgtgatgttctgacagtagttagaatgccaatgaaatgagtggtgattatccgtgagtcacttggaatcatgggtaattttgcatatgtgtgttttcaccttacagccatggctttatgtctgtgctcttataccagggcagggtgggaagctggggaagagttaacatagtcagaaacggcctctgccaattttcagaagatatagattacgtgaccttagagaatgaacatagagtgctcctactttagaaaatgggtataacaaccttcatgcaaggagattaatgaaaaaagatttggcaccaaaaagagtaatagagacagccagctgataattgattttgctagtccaatgtgggacttaacaaaattcttgcacttacattactattagaagcagtatcgtataggaagcccaaggtatcttgaagaagaaatttggtgtgggtagaaaatgccttgataatacaaatattttaagtttgttaagaggtgtcctggaaatgcagaggactaattttggattccattatttgctagcattttattttaattttattaacattgtcttctcttagaaagttgctggtttaaatcatatgagttttattttaaatcttttgtggtgtcatgttacttaaaataatcttatgttgggaaaggtttctgataccttggtgggtatttcagctttttttttttttttgtcagctctgtaaaggatgatttcagacattttaaactgaaagtgaaatctctcacttaagtgatctaactttacttgtaaacttcctgtgtgaggaattcagtagacgagacccagaaatgtttctgtttgagaatatttagagttaagtgcc

SEQ ID NO: 76828 - DNA, 2543 bp, Homo sapiens
acacacactaccttatttttcctttaccagtatgttttagaggtcattcagatcatatataaaatattcacattttctctcccccccacctccttctttggttttccaaaggtaccttcataatataaagaggtttactgaaaaatttcagaaattgtttcagctgcatctctgttcttttcgtggcatggaatacatggtatgggtatatttgtatacaattctttcatatatgtaggttggtgtaaccaccctccacctttctcctagtcccccaaccccaccatctctaacccttggcagccactaatctggtctccatttttataatcttgtcatttaaagaatgttataaatatgaagtcatacagtatgtaaccttttgggattggcattttggcttttttcactcagcgtaattttcttgagattcatttaagttgttatgtgtgtcaatagcttattcctttttattgctgagtagctttccaactcattctcttttgcagctgcagaatgttttatgtctttactatcattttaacttacagagtctctattaatgggtattcatgctctcgtttactgttataaattatgaatttcacatatactcagtcattctgcagcttcctgtacttgcctgatttctagcaatgaaggaaaataccgatggcaccatttcatagacatactcaaaggatgacaagcacttaaggaccagcacagcacagcggtgaactctcaagacagtatgacagtaatgagatgacgaaggcacatcttgtttcctggaaaattctgcatgataggagactgacaaagcaaagaaccatgatgtgtcttagagaaccagaatggtcagagactctgatgatcccctggtccacacgtgactgagagttaataccttaggtcactgttctcagaacctggatatttatatgcacgtgcacctcagtgactgatccattctcagttttcaggtccattgctttcacatttgaaatagtcaaggagcatctttatgactggggctgagcttctgcattcatgtacagccctctgcctgccagcagtgccttgcatttgtgatcctacaaagagcctgtggacttaatggtttactgtatagggaaaggcttgactttgtgtcttctacttaagaagcttgaactttttaccaaatattcgtactccttttcctgaaaatactgatctaggctacagatccatctcttaaccatatttgaaaaattgaaataatatcttctgccataacttgaaattccactctcagatctgttatttctgacagtgagtttgtatttctcaagtagatatgtctgatgcttatttcttttacagcatctggctcagtgcatggctcatatatctgtagagtgagtaaatacagggaatgtttcctatgtgtatggcaagggtcacagactcaggcaggtaacagatgagcaaggcagagggtggagactggtaaactagacaactagataggtcaggtcaatcgggggcagcacctgctcagccatagcagattgtggccatgtggggatataggtctcatattgccagatttcctgggttttcaagaaaaagtgaaaaatctggatttttatgtgagatcttccagtatttcagcatcaggttctttttgtttgtgagtgctttggccctcacagcctgcctgccacatctgacttgtggactgccggcttgaaacctttgatatttagagaagtggttagaccttagagttggttctggtgagatccttcttgttttacagatgaggtttctgagaccgaaagaagggaagtgacttgctcaaagtctcactgttactcagtggcaaaacaagactagaatttgggtttcctggtccataacctgtcactttcttttttcttaactacaatacctcctttatgaagaccttcataaattctaggatggtgaattctcctttattttgtgtgtcgtgtgcaagtggacatgtgtgtatttactaaactctgtggacctggaaatacattctgatatgactatcaggaacaatgtgattacttctgaaaccaacttccttaaactctcatgtataaggtagctatacacctaggatccctcttaaacacttactacttggttgggtaattctcatgaataacagaagcttgaaaattaacagagtattggattcagtgattgtacaagagcagtggagttttctccacaaagtagagaaaatcatttgtgtattgttatgcaaatagcttacagaactattaataattttgttttctttaatttgtaatttcttatgtaactagtccatttgctttcacccagtgatgagcatcttacctgcttcactcggtagcgctccattcctaatctttttaaggacaaattcatcaacttggcgttaaagtctatcagtaacatgatcccagctacttctccagattcctcttgagctgtccttactacatgtgcactacactgcagccacactgtgtgactta

SEQ ID NO: 76829 - DNA, 1082 bp, Homo sapiens
acaggaagataagtgtaaatgagagaattggccagtaatttcataatatatttagttttattctttcaacagaaacttactttgtttgcagattagacatgtgggaatattcttcactcttatagaaaaataccctgtttctcattctcaaaacttttggcactctcttagttttcccacctttggtagagacataagtacagtattattttttctttactgtgagaaaaacaacagcagaagcagaataaaacagggtacttggccctctcagcctcagggttcaggaagcagtagggtatggtggaggctgggatggtgcagagtgcttgtcctgtctcaggggacaattctccagccagtggttggaatgaagaaagacagacccaatgttactagatgaagataaagtggaagtctgcatttttatgtgaaatagtcacagtagaaacaaatcacatctggaagccacatgttaccaataggctgtcattttgggacttttctgacatgctctaaaggatgatgacaagtctgaaagacagttatggcaaagaagatatttgtaagaaaggaaacatcaggttttattacatataaatattttgagcagcacctttttactagtattttggaaaagcatttctgtcttcattgagcgaagtggcaatacatatgtaatatactgatgctgaatttgcggtgggttgatttttgtccattgttggctttcacatggaagcatgaatattgtctccccgctaccccttttgagtgacatccttccagtacctccatttctcaagttgcaggtaagcaccttgtgtatatacagttaaatagtgggcacacatctatcccaggaaaagaagacagtgagaattccctttggttaagtggagcagttgaatggccactatacctggatgcaaatttgatccgaattttctgctctaaaccctccactgctttctgctgtttccactgaggaaagaggatgtgtgtcattaaagctttgttgggacctgtcacagtcaaggtgggtataattatgtttaatttattgaagtgtttctgggcat

SEQ ID NO: 76830 - DNA, 1124 bp, Homo sapiens
ggactacaggcacacgccattacgctggctaatttttgtattttcttttttggtagagacggggcctcaccacattgcccaggctggtctcaaacccctgggctcaagcgatcctcccacctcagccttccgaggtgctgggattacaggcatgagctatcgtgcccagccaaagatatattttcaaaagacacttgtaaaattagggaagtgcaattttaaattttttttttctgaggattctctctattttgtcattgaaagcaaagacaacattttaaaagtggacctacgtaagagggctgggtgtagagctttattaaagagtgctgtgctgtttgctgtttatactttgctcattctctgatggaaaataaattgtttaggtaccccttacatgtccttcagcctctcaccgtttgagtctggtttgggttttgtatactatatgaaacagtgtttgaaataaaggttcctaatgaacattttcctccatgggataccaatcaactgcctgcttttaattgataattgggcattaactcctcagtagtgccatcatcataaaccacagtgcagaccctatagtccaccattgaaaaattaagacaattatgcagtatttgaacatgtctaatctaggagagagtagcacccaaggccgggcacagtggctcatgcctataattctagcactttgggaggctgaggtgggagaattgcttgagcccagcagttcgagaccagcctgggcaacatagtgagaaccccattgctacagaaaaattttaaaaacttagctgggcatggtgacatgtgcctgtagtcctagctactcgagaggcagaggtgggagtatcacttgaacctgggagatcaaggctactgtgatcgtggcactgtgctccagcctgagtgagagagtgagaccctgtctcaaaaaaataaaagaatagtgccctcatataccttagtggaaaaaatgaccagatctttggcaaagtatgattgctaaaataataacccactcagcttacactccatgtgtttccaacagagagggatacgcacttgatagaaacagaaaattataatcaaatagaattcttctgttggcagagcat

SEQ ID NO: 76831 - DNA, 1049 bp, Homo sapiens
ttcatttttgtgaaaatagggcaaagatcttctgagtgcaattggatgtactggagggcacttaacctttagcctgtaaagatgggtttgggctaagtctgttttgtttttcctttcagctgtttgaagagaaaattcaaaggaaaattcatctttcatactttttatgctgatagttctagtaatagtttagggattttatctcatctgctccagcaacaccccaccagaaaaattatggaagttgagtagccgaatatgaaacttgttttatatagacaggaaagaagctaatgaactcacagacaccccttatcaggactacaaagcccgagctgtgtattacccccaccccaccccacccggcgtacctttggcagtgcttacaaagacttgatcctgactagcttagaagacagatgcagttactcagctttgtacatgccttgcctatatactcaagagtgggtcacaattgtgctgggccagcagcagggggaaatgttgatttcatgaattccttcatcagtggaaggtcagccatggactgtaattttgttatggagtgggagaatttccatttctgtgtgatgctgcatttgtcccagttatgccatttatcatctgcaaggctgtgcacagcctgtgcaagcctcctgtctggactgcggttcttccttcccaatttaagcagcatgggccagatgatctcctaaggccctttctacctttcacagtctgaagttcagcttcttctgcatatatgaggttggggcaccaattgcaatggtcagctggagactatttgcattatccagctgataaactcttccagcagacaaatgtgaataaacagcaacactcaagtcctgcataaagtttgtcttgagtttgctgaaatgatcagcagaaatcttgggcggtgaagtgctcctaagtgctgggcaggagttgtcaggtgacggtgccctgtcagcgctggatgcttactaggggtggggtcctgcttgagatcctgagttagctgcaggagatgggtccagcatgca

SEQ ID NO: 76832 - DNA, 1069 bp, Homo sapiens
tggatgtaataaaactcacgaaagttgctgaaccacttgatcatctgggaggtaatgcagcggttgaactgtacaaacaagaggtccatccagtcagacatttgccacgaggtgctcagaattagaactgtctgcttccagctcagtataggggttcatatacggctttaaccagcattaacaggggcttcctttaaaaaaagaagcgaagccaccgctattttccaagcctatttagttatactcagaaaaatctaaattagctacagtgcccattagaacataacttttttttgatatgctagatttatgggggttgttttacccatgaaaagctttttgtggtgtttgagtgggacttaggggtcacgaccagtgtggtgccagattttgctgcacccaggtggactgcatggcaggcctggggccttccacttggataaagggccaagggaagggcaagatgtaggtcagggagcagtttattagcaactttgaattgtggaatgaattgaaatcaaaatcagaggttgcttcagggatcaaccaaccaactgaatatgagggaaagaaaagcttgaatgatgtagaccaaaagtattaacagcccctaacccaacacccaaagtaaaagaggccctcagaaaccttttatgggaacaggggaggtctggtcccaacaattagtttgattttccttattgtcacacttcatctgtatgtactttcactcagttttgaactatagcaatttgaacataaatttgacagtgtctgacactctgtctctctctccctctctatatatattttttgttgtttgtttgtttgtttttgtgtgtttttttttttttgagatgtagtctcgctttgtcgcccaggctggagtgcagtggcgtgatctctgttcactgcaacatccacctcctgggttcaagtgattctcctgcctcagcctccgagtagctgggattacaggcgcacgccaccacgccagctagtttttgtatttttagtagacatggggttttaccatgttggtcaggctggtctcgaactcctgacctca

SEQ ID NO: 76833 - DNA, 1048 bp, Homo sapiens
cccagccaaggcagaaaactagccaaaaaggccactaactagtgtttctgtttccctctacttttcctgcccatgtgtttctgttttggggattatctacagctcagtagcttaagaatttagacagccagcctttctagcctaaagttattcacggttatttgggtagagtctcagcccagaactggacattgcttccatcagcaacactaaggggagcttgaagtgcacatatgatgacctaggacttgcctcacaccaggcaaaacacactgcctcttgggagttctgcagaagctgccatttagttgagtgactttacctgaacatcaggaaaataaaccttcaggaggttggagctgggatatcgtgtgaagaaaaacattagtttggccttcttcaagtgaccagggtttagaccctcctggatttatctcagtgtcaaggaaaatgaacactttaaaatgccagtttatcaattaactagtgaattccttgttcctgtggtttctatttgatttcattttgtttttctgattggaattgtgtatttgctccatttttctgtctctggaaactctggtcaaataagctggatgacatatgtgcacagttaagtcacagaatgtaaaaatcatctcgatgtggaaaagttatgtagcatagatgatgtcaaatacaggttggtgtattttgtgtgtgtgtgtgtgtgtgtgtgtgtgtgtggtgtcttagatgtcaaatacaggttggtgtattgtgtgtgtgtgtgtgtgtgtgtgtgtgtgtgtgtgtgtgtgtggtgtccaagtgggatgggaagagatggcaattctatcccagataaaccatttcaaaaccccaagcagagatttacttcccctctctgcctcagtttcctcagctgtaaaacgagaagagtaaactaggtggtccccattctggctgtcactcttatcattgccttcacagtgttgcctttataaccagcaaacatctaagcaggctgaataccagctcatattttgctcttgctcaagaagcttga

SEQ ID NO: 76834 - DNA, 1083 bp, Homo sapiens
aaaaagatttacacaaatacgctttgcatttttagggacagtccttaggctgggtgagaagcattacacagagtaacctgggatctcagatccgagagctgtagcttaagacagtgaagacttccacataggatgaatctgtttaaccaaaagaaaccagaccaactgactatggttataggtggcccaggcacctagttgctgcacaggagatccctccctgctgccccatcagcccctacttacccttcctacagatccacaaatgctgtggagagaatcctggattgggattccaaagacccagtttcagacactgattttgccatctattagctgtgtgaccttgggcaagccacttaactgctctgagcctcattgctaagatgtggagtatagtggttaaagcttgtacttggccatcagatcccgggtttaaatcctggttgctcattagtgtgtcttgggactttggacgagttagctcccttctctgtctctgcttctcggatacccgatcttagagtggatgcttgagaacggtgagataatacaggtctaaacccgttatctgaaatgctgagccaaatggagtttggatttcagaatttgttagcttataaagataatacgatgtgtgtaccacacattaattaacatccacagctgagacagtgtataatccaatacattaacatttctgcagcagaacgtatgactatactaagtgggataaaatctattaatagcctccaatcagtgcaagccaggttttgctaccaaaaaaaaaagattgcatcattcttagggggggaaaatcatagggcctgtcaaagctttatgggtttcagaattgtagctaagtggtggtgggcacatatgtgtgaagtgctggtagcaatgcctgccaccgagaaggtgttctgtcaatgctcccctcgtgatcttcacatctgccctacctatgtcacaggatgtcatgtgaatgtgaacgttctttttatgctgtaaagcagcttgctctcaggtggctttcatggcccacaggaataaatctcttggaatataggcagcaggaatgag

SEQ ID NO: 76835 - DNA, 1035 bp, Homo sapiens
cagctagcttaaaaagcaacatccaaaatatattctcaagaacttaagttctgcaagatgcttgttagaagtggtcatatgggtttggggctgtgtacattctcctcttagagcttccatttactcatgttaaaggctctgagaattcctgcagaaaagaaactatctcagtatttccccaaggtactttttcttctaactcaacaattattaatatcccgagggttactctgggaaatacattaagagagtagtgtctacttaagggttgcaaagatgatgcaataagatccagagccctgcagatcagcctgggccactcaggcctcctcatggggagcctcctctcccttcatatgcccagcccctagtctccaggcactccattgcaccttggaagttgttccttaaactggagacctctggccgtttccagccacctctctgggtttaatccccgaggaaaactccttttccatttggcccagaagtttcttgttcctcatctgctccccaggaattatctacacaatataggatttttgcttgtagagctatggggttggggaggccataccttagatgacgtcattcctttgaccctctcctcctaagtttatgggtggctgacaaccaaattatggattctttcttccttagggtattcattgtatttcagaagcctatttgagtctcaaaacaaaacccttttagacccaaaggaataagtcaagtggcagaacccgatgggtcatagaagaagctaagtgaaccttcccaggtccttaaattccagaatgtggtcaccactataagctgaaggcccagagcaacattaagaagaccctgagtgatctgtccccagctcctcttcaacttttagttttcttgtttctctgcacagtgtcaatggtattttaaattatttattgaaacattgtctctctctgttgcccagctggagtgcagtggtgcaatcatagctcactgtaacctcgaactcccgggctcaagcaatcctcctgcctcagcctc

SEQ ID NO: 76836 - DNA, 1335 bp, Homo sapiens
gaggttgcagtgagccgagatcaagccactgcagtccagcctgggcaacagagcgagactccatctcaaaaaaataaataaatagatagataaataaataaagtctagacagatgtggtggtgcttacctgtagtctcagctactcaggaagctgaggtgggaagactgcttgagcccaggagttcaaagctgtagtgtgctacgatcatgccaatgaatagccactgcattccagcctgggcaacaaagtaagaccctgtctctaaaaacataaagtaaaataaataaagtctattttttttaaaaaaactgcacttttttctcattaactctttcccagatacatattcctcggtaccagaaataaaaaaccccactggagaagcaaatttagctacaaacacaagcatagaacacagggcttataagataactgcgaaggcacataggattttatagctggaaaatgtaaaatgagggtgagtttgaatttcaagtatataatggacgacataaggctagatgtggtagctcacgcctgtaatcccagtgctttgggaggccaaggctcaaggatcacctgagcccaggagttcgagaccagcctgggcaacatatcagatccaatctctgcaaaaaatagaaaaaattaaccagatgtggtggcacctgtctgtggttccagctacttgggaggctgaggtgggaggacctcgaacccaggaggtcgaggctatagtgagccatgatagcaccgctgcactcagcctgggcaacagagcaagaccctgtctcaaacaaacaaacaaacaaacaagaacatacgagagaagttgtgtgttgtctcctttcagctttgtgttagagcaccggggcatgagctgaaaaggaacagccagtgtctgtggcatcatcacctgcacagatcacctcctacatggcagcctttctccctgtgggtctatgtccttccatggaatatccctggagagctcccgaagctctgcccaagtgggacaaaggggaagggctgcctatgaggccagctgaggtgagactggcagctcacaggccatgtctccccttctgtgatgtgtacacatttagggaacagcaaacacctttgatgcgcttcagctgggtcacaagagaaccaatcaataaagcaaggtgggctatggagagtccttaggtaaaaggtacctcgtgaagcccaagagatgctaactcattctcatcactgtcattgaagctcaaatcagatttatacaagcagttttattgttatttccttgataaaattcctgcctggtttttgttgggaaaacatgttt

SEQ ID NO: 76837 - DNA, 1717 bp, Homo sapiens
tgtcatccatagctttttttctgttatatgcctagcctaagtatttgttgaatgagttgaccttgttgtgggctttctttgtgccaagcatttatatgagtgctttctgtgaattttttagttaatcatctcaaaacagtaaaaagtattttctctattttacaaatgcataacccaagacaagagagcttaaaagccttggccatggtcacccacccagctgttgataagccaggtctacctgacccatcctgaactcttaacccaccatgttctcatttactcatggactcaacagatcatttattgagtgcttactatatgccagccactgttctaggtaacaggggtatagatagactctagcctcgagattttatgggctagctggagagagagagcaaatatacatttatgctccgacaagggcataaattttggttactacgagagaggaattaaagggtgtgatgagagggtgggatgatgtagaccagcttgggaaggttgggaatgtcagtaaaggcttccctgaagaagtgacatttaactgagacctgaatataaaagagccaagaaaatgtattccaggcaaagggaattgcttgtgcaaaggttttcagacaggaaaggacttgaccagtgatagacatgggaagaagcctgtctggcaggaaagatagagtgggctggacggtacaggatcgcgtaaagtgtggactttatcctgagagttatgagaacataaagcccctagcacaatgtcggcttgtagtggactctcaataacaaacatgtttttcaagtgggaaccctgaacaatgtcagtaaacattttctccacttcataggtgggcaggacaatggaaagagccttgcacttggggatttgcatttgggctcagggattcaccttgggctagtcgcttaacctccaaaagtcctacttatatgaaatgggaataatggcagatggtcgttccacttcagagagttgtgagactgtaaaatcaaaatgaggtcattatgggaaagctttttataaaccctaaagcactgtacaaatgaaatttgctgtaggatgaactctgaattggactccaggttcccaaaatcagtgtgagccgccatctattctagttcaaaaacatactatgcttagaatttgcactgcatagtcattggctgctggacataaaggtgactggcttacctatcttgggatgcttgtgaggaggtgggcataagagagggctagctctcatttggtgtgtcctgagcccatggttcagaaagagttgttaatctgaaagaaaaaagacataagaaagaattcagaagaggcagctgtagttactagtcatcagttggggaaatgcagttaactatgataaggacagctggtgggcagaaagggtctctcaccttgttgagagtgaccagggtggaagacttcagaaaggcatgggaagtcaataaactgaaagatggggacatgattttctcagctctaggacaaactggagaccccgagcctaaagtagccaagtctttgctactaggattcaggtgataagatttccaacccaatcttttcaaacccagaccaaacatcctccttgcttctcaaattgggttatgtatagtcacaggataagccatcccatgtctttctcaagcttcagttgtatttgaagacttggcgagtagagacatt

SEQ ID NO: 76838 - DNA, 1005 bp, Homo sapiens
gggtgacagagcaagactcttatctcttaaaaaacaaaaaaccaaatcaagaagctaagtcatttcggtctgcaaaggaccaaggtgcttatttttttattgaaagagccaaatgtaagtctgttttgtgagagttggcattgcattgcagcacaggggcctgagcatacttggggagctcaccatttaaggtacctgggtcgttaggctctactccagacctgctgagtcagaatccctgggggagaggcctagacaagtgaactttgaaaaagttcctccccaagtgacactgatggacacccctggtcaagagtcactgtttaaggggaaggtgacccatggggccttaactagactaaaatgtgagtggttcgcctgttaaaaggagttaacgtgtgtttcttttgtagcattaacaacagtgtcttcagtgttcgctttttcagaactacagctgtatgcagtaagtacctgctttcttgggaatggaattttatgggaagagcaacaattgattgagtttaattaaagaaaaatattaaaaaggaaaaatgaactacttatgattttcttttttgcatttttcctagaggatgacttggttacagtcaaaaccccagcgtttgcagaatctgtcacagagggagatgtcaggtgggagaaaggtaagatttagtttcctattttttttttttttttttttgagacagagtcttgctctgttcccagcctggagtgcagtggtatgatctcggctcactgcagcctctgcctcccaggttcaagtgattctcctgcctcagcctcccgaatagctgggattacaggtgcccaccaccatgcctggctaagttttttgtatttttagtagagacagggtttcaccatgttggtcaggctggtctcaaactcctgacctcaggtgatctgcccacctcagcctgccacaaagtgttgggattacaggcctgagccactgcgtgagccactgcgcctggctcc

SEQ ID NO: 76839 - DNA, 1009 bp, Homo sapiens
tggagtttcactctgtcgccaggctggagtgcagtggcctgatcttgattcactacaacctccgcctccggagttcaagtgattctcctgcctcagcctgccgagtagctgggactatgggcacatgccaccacgcccagctaatttttgtatttttggtagggacgggctttcaccatgttggccaggatggttttgatctgttgaccttgtgatccgcctgccttggcctcccaaggggagtaatcccttggcctgtaatcctgggattacaggcgtgagcaactgcacccagcctattttttaatagtattcttgcatatataatgttaaaatagaggatgaagagtatcagtaattagaaatatgtttatgtatgcatttcaatattttaaattgcctaggtgtttttttttttccttggaagtttacattttcttgggcttgataggtgctttgaaagtacttgctgaatttattcagtggaaacctgtgaaattgggaagggagctaagttgagccagttatctgatggacatttagggaccctgaggactagagaatagtgccttatgtcattgtgtgtgtgtctcatagtgctttgcatattgctgatacccagtagacattcgttacttgattggagctagagtttttgccactaaattttgcttggttgcttctcatttcagacagtgccagtggcatatacttttcttgtttttcagctgctcctgctaaggccaagccggctgaagctcctgctgctgcagccccaaaagcagaacctacagcagcggcagttcctccccctgcagcacccatacccactcagatgccaccggtgccctcgccctcacagcctccttctggcaaacctggtaggcttccaactcccacatgtcatgtgggagaacatctcgtctaatatgttccttcaaagggtaaactctagactgatgatggttctgaacaggccaggttggctgctttgtagaaagaattctag

SEQ ID NO: 76840 - DNA, 1320 bp, Homo sapiens
tgatagtgcgctgtggcattgttcagagtagggctctgtgacctgttttactagatgtcatccattctgttgggaaactttccgaagagactggatgacattcaagccaaagatttctctcttgttcataggatgtaggggaaggaccttgactaatgaatcacaaaggctgcagcttatgtttcagtgcattagggccaaattgtacacaaattgaattggactttgaaattctacccagtttcttaagacaaaacatgtaaatatttgtggccctgaaagatgcagttggcccaacagctttgattggaaaggaagcgtaatagctggatctcctttcagcagctaatcaaggtgtcacttaacaatggcctgcggtcttgctgcagcctaatttggtttagatcgagtgccctttgggtcttgtgctgatcagctaacccataagggacctttctgagaccttctcccttcctctattgtcccagcctttgcctccaagggcagagctctgaaatagaagctacttaatgaccagacaataacatttgggcaggtttgagagcagagatgtttatcacatctctttccctcttctgcagctcttgtgtcttgggaaccagtaatgtctttagggtggtaatcctagcactaaataaggttagaatcaggaaaacaagcattttaaacccaatcagtcccccttggaaaaacttcctttttcaaaaacaaaagatctgaagggggctgttaaaattgtaccacatcttacctttcatgctaatgtcgaattaggccattagagggagaaagggagaactgagcatttggccctgagataaagttaaattcaattttcatcgtagaactgcattactgcattccgataaatactgaggtttatgcagcaaagtgatgggaaagccatttctcactaactctgcaatgtgtcattgaaaaaaaaccagtcccaaaagaataaaggctgctcatgttgtaaaggcttttcagaaggcttgctgcttaatctgaagggaaccagcctaaaccacaagtggccacttttctaaataccaaggaaatcacagccattaaactaatcttagggcaagaactatgtcttaattagctttgtatcttggtacctggccctgaccctcacatgtagtaaggtgttagtacctgtttggaagaataagtggatggaactgccaaccctggaaagatgaagaacggatatgactttccgtgggcctgaaagaacactgggttatacccttccctgcagagtcatgactgctttttcccgcatggagcctc

SEQ ID NO: 76841 - DNA, 1006 bp, Homo sapiens
taatggtccagagtgagggaaaagctctcacctaattgtgtatatggattgagaaacctgtgtgaaagtcaaaatgcaggctttgtggtcagtttgttttgtaatattttcacagtaacatccaggagatgagggctcggcacaaagaggcttttttgaagaaacataacctcaaactaggcttcatgtcggcatttgtgaaggcctcagcctttgccttgcaggaacagcctgttgtaaatgcaggtgagttgcttgtggctggaattggagaggtcctgggaggtaggtgtatgagcacagacctgctcccacatgcagaggatcaacagaccaaggctttttatttgctacctatagaaatatcagtatcttccccagggatttcttggttcaccttcctgaagcagcatcatgattactttctacccgccagctgggcagaacagtttctcttcccagtgtacagctcggcagctgctcaggcagcaggcagttctgggatagcccagctctccaggctgtctcctgtcaaggtggaagcacgtgttctggcttcctcccctcccccagctccacaggccctgttaccttggggcctgacttccacagttggtgtaggctcctggctgacctttgatcttaggtcgatgggcctcactgggagcttcggcttggcctctcatggacctggtgcttattttctttcctttttacttacctacgtcattgtagtgttgacctaacaagcactttgttttcctgttgacacacttctctgttccttgggagattggagaggggtcagtgctacttttgccatcctcagcagtgtcaggggccctaaaggtctagaagtagaagccctagtccctcctgttgagtggtgctctagggaggtagaaggccatctttgttttgcccaaatgtatacctcttctttttcccattcttctcatgcctccctgactggctctcatctttttcagtggcccccttctgcttg

SEQ ID NO: 76842 - DNA, 1556 bp, Homo sapiens
cgtggcctctttttcacattacatgcttcctctggatgtcttatctaacaatacaacatggactttctgcggaaatgattcccaagcctttattttcccattagttgctaggtgtacattttcagatgctggtttgccatctcttgaggtagcatatttcaaagccagatcaccccgcttactcttggatctcccctcttcctcttgttgagagttggaagcagagaatgggtagtatctctatatcccttttcctttgctaatttgcccttttttggaacatttgttaaccctagtcattctctgctaaaggagggcttgactagagctacttaacgagagtttagtgcatacctatcctatggaagccagtgtgttgagcccttcttagggctgccaaagaaatggatgctcctatgcccaggctcagtcagggacttgggagatactatacttgggatgggagtaagtggaatgccagctgccatgcataatgcagtggtgttcatggtggttggtcagcccacactgtatcaagctctgcagatttttactctgttaatgcacatattacctcattagtcttggccttcctggggagttgtatgtaacatgtattttctctctcatagtgattgacgacacaaccaaagaggtggtgtatagggattatattgacatcagtgttgcagtggccaccccacgggtatgttggggcaggaggtggggaatgttggtcttagaccctcaccttatctgtgtgaaggagatcacacaagagaaatcatttctttaattctgtatttttagaagggagttagtaaaagtaaccttttttttcttttaaaccatgccgcattcttttaacactttctgttaatcacactgagtaatgaaggtattctagggagggcataccatgggttgaatcaagggagttgttaactataaaaggtactattaatttgcaactgaaaacagcttttcacccccttcagggtctggtggttccagtcatcaggaatgtggaagctatgaattttgcagatattgaacggaccatcactgaactgggagagaaggtaaagtagaaagatgtatacaagctgctaagcaggcgagggaagagagccttcagaaggctgggctcactagcaagcagtgctcatggaaagtcaagtgcatagcccctgagaaaagcagttgcccatgagagctaagtattttatatatctggtggagtttaccatgctctggtaactgaaatctcatcagatgagacctgctagaaaagatcatctttgaagtcttcaactgtatgaaattgtgccttttctctggtggagcactggtcatagacaccttagccgaacaactgtcacacggaagctagcgcttgtgccatcgatctcgatacaagctttctggacttcctttgcttttttgtttttagaggcagggtctcgctgtgttgcccaggctggagtagagtggtagagtcatagcttactgcagccttgcactcctgggctcaagcgattctcctgcctcagcct

SEQ ID NO: 76843 - DNA, 3376 bp, Homo sapiens
ccaagtagctgggactacaggtgtgcaccaccatgcctggctaattcttaagttttttatacagatgggggtctcactatgttgcccaggttggccttgaactcctggcctcaagcagtcctcctgcctcggcctcccaaagcgctgggattatggactgactttaggtgaaggaaactgggttggcttgatatttcaattatgaaatctgtttttaggcccgaaagaatgaacttgccattgaagatatggatggcggtaccttcaccattagcaatggaggcgtttttggctcgctctttggaacacccattatcaacccccctcagtctgccatcctggggatgcatggcatctttgacaggccagtggctataggaggcaaggtaggaaccgtcacttctaaggtcctagtggctaggtctcgatgaaagggaaatccaactaaatgctaattgtaaaacattaactataatttcaggcctaagttccatttcttagtttctaatagctaaggcactgattatcaaattgtggtctggatcagcatcatctgggaccttattagaaatgcatattcttagaccccatcccagacttaaagaagaagtgcagatgatcctgatgcatattcaagtttgagaaccactgagctgaggaggcttgtttgcttctatggagtgggggatatagttggaaacgtggtcccttgcccctgggaaacagatgacaattatgcatgtcagtctgtgagctgccaagttgtatgataaagcttgtaaatttcccgggagttcagagaattaagtattaaaaggggcttgagctggcccttagaagatacgttggtatcaaaaaagctttctgggaactcctgtgtttagaatccttttgggttactgactcctgtgtgaaaccacagtctgtagatcttcctggaaaatgcccatacacccagctacacatacaattccagaatttgtagaccctggcttaatttttttttttttttttaaattctaaccccagagagaagcaagtacaggcagccagaactgaagggaaaactttccttgtaggcagcagatgcgttagagggcagagtatgtttttaaaaaataaaaggcagttgtgagaagacagttttcttggcaaactttgtttctgagtggggaagctttgcactgagggtaagtcctggtctttgaaatactgtaaatatgcagaggcaacatcaataggaaaggctctggaattaggaactttcttatgggctgtgctaaatctccttcagcgaggctggctgtggcttgctggagacaaacctatttacctttcctctctgtaggtagaggtgcggcccatgatgtacgtggcactgacctatgatcaccggctgattgatggcagagaggctgtgactttcctccgcaaaatcaaggcagcggtagaggatcccagagtcctcctcctggatctttaggaggaacccacacaccctacaagttgatcatgcaggaactgaaaaccagtcttctccctgtcccctcatgggtcccgggttagcctggtgacaggcagacacatgctgttggcctcaagcaaggaagcagagcactgtgtaaccagcagtcacaggtcttttcttggcgttcctgccaggctctccctctctgcacctgtctcatagcctcgaatatcttaattccttaggcttaagagagagagccttaatggatgctcattcatattcctgcctttcttccatcagctctctgcaaagatgattttgcttttccctagtgctggtatactatagagaaacccctggggaccatgtgattaagttcctatcttttgaaagtttgttctgcagagacttctaggaggatgctgtgcctcccaagctcagagcagcctctgtcctggctgtgcacattctcccttgattccacttgtgtggagggattgaacacaggcaaagaggtgctgctttgcttcttcaatggcaccttcattctccgttgtcattgacttcaagatgcctcttctacctcttccaggaagcacaggccaggggatctgggtgtgtgagtgggaggagagggcagaggtcccctgaggtcatgcattgtaatcatcatagaaggagagcccaggcctgccctcacgctctccatcataggctgacaccaagaagactcgtcttggcacaatctcacacagctggggctgtagcaaccctttccaacccctttgctggttgctgggcctcattctagcaccttgttcttagagcagattctagcacatcatggcagtgggaccaagcgtggtcccgaggaagggccagagcctggtagagactagggaagggaggtctcctctagactgactcacattgccttgagcttttcagttaagttgctgtaagcacctgggctgaggaggcagtttttgttccttcctgcgttatagcggggccttgtctcttcctctgcaggacacagatctggaggacgtggactggggtaggaaaccaccctgagggtgttagtacctagtggtgaaacggatgaggtcatttctaaggtgtgttgcccgtggatctgggcacaatcattggaattccttggagccactgggattcatggctttgtatccaactgcatccaggcctgaggctgctgacgtttgacaccagggccagtagagagtgcccttttgtatcttaagccaagaagtgaggcctgggggtgggggaggggggaaggggtgggagccaatactgagtgcctgcagcatctactactctgtcttcactattcagaacttgtaactaaagtatttaaagaaactgattttaaatgcaaattaaagggcagatattctcaaacagggttcctgtatctgttccttttggctactgaggtggtacaagtccccagcactgttgcactgaaattattgaaagccactcaaggtcctgttgcttattttgtgaaatcagaaatcccttatgtggaacttaacactcataatttgacagaaggtagaaccctgactgccagccgggaaagtgttgccaaaaagagtcaacctctgtaaaaatatttgaagagatttattctgagccaagtgtgagtgactgatggcctgtgatacaactcttaggagatcctgagaacatgtgtccagggtcgtctggctacaacttagttttatacatttaatacattttagggagacataagataccagtcagtacatgtaagatgtacagtggtttggtctggagaggcaggacagctcaagacctggggatgttgtcataggcagaatcaaagattttctgattggcaattggttgaaagag

SEQ ID NO: 76844 - DNA, 1041 bp, Homo sapiens
ggagaccaaggttttatgcagatgaagcctccagccagcaggcttcagagaaaatagattgtaaatgcttctcatcagacttaaggagcctgttttaacagtaattccaaaagggaggggagtataatgaggaatggctggctccctcttcccaccatggcccgaactagcgtttcaggttaactttggaatacccttgactgagacgaggggtccatacagatggttggggggcttaggatgttttttgttttgtttccataaagcatcatagtctcttagtgccccaccttccttgagcctgtcaagccatactctagaatagagaatttggggtcaccatctttgtgaagccctttcaaaacaccagtagacttgcattttttgtgtgggcttacattatttcagtgatggatttgggaggagtgggggcatctcatttcatttggatttgatagccttgtggaccaagatgctcaaggtcaatacacatgaacaggtgagggttgatgacctaggagcagtggtcagtgagcgtgagtgtacagggtgggtagctaacctagactgcaggtggcaggtgtgatggagtccaggcttaaacacagccttgtcttttccagagtccctgtctgctgagctcttgcagtgaggccatccctctgtgaaggtctgtcacaggagggaagtgggtcccagagagtagaactagagctctagtagatagaaaaacaaattaggttgaatgaaaggaagaacaggatttggtgttagaagctttaatttatctatctggtaaacctgcaaaataggcattatttaccccattttatcgaaaggaggtcgactgtaagagctgggacccacagtattctaaactcagggcccaacaaagtgtcagatgtgtagctttgggtggatgaagcacagaagttccagaagggacttgtgcttcatgaagcggtggttggaagtggtccagcctgacttagggagagtagcagaaggaacactaacttgcaactctggctaggttgtgtc

SEQ ID NO: 76845 - DNA, 1057 bp, Homo sapiens
tgttgtgccccactcaggacatctctggagactcatctcaggacactgatccactggctcagtggacccaaaccagactgtcctggctagtcctcttagtcacacagcgagtaggcctcttccaccagaagctgttcgtgcagctggggaggcccagaagcagggatgccatctgttgtgcagggagggatgaggtaggggacaggatgacccccacccccacccccccacccccgattcctgaccatgccccctatcttgtgatttcagacttgggagagcaaaagggaggggaagaaaataagagtaatggggggaggaaggaatgcatgggtctgccccttagagcaagtctgaaaccagaatcaagagtcctcctccccagtgggcctgtgtgggggaagaggggcagcctgccccaggggtgcaagaggacagcaattcagcttccaggccaaagcagtttagacaaggtgtgcccatcaggactccctctcaggccctggctgtttaccatgtcactgcctactgtgacttcatgcccttttgggataagaaaccacaaaacgcatggaacaactatccatggctcttagccagaaatgtcttgcctctggtctctgaaaagctggggtgagtggttacctcaaagacaattgcctccagtttgggggctcctctcagggttcaccctgtcaccggggcgtgggaccgacctgggaaatttccactagagttttgccctcagctcctccctgccagcatcccagtcaccaccaggtggcgcttctgacacggtccacgtgcctggctctgaaggcccaactgtcagaccagacccctcactcatggtggggagacttgacttcctcgggctcttcaggagactgagacagagaagacaagtgaaagcgcagcctgtacatgactctctgtggtccacgtcctgcctctccctggggtttacacggccccaataaagcctgctctggcctacggtgttctcgcttcttccatgcaatgaccacggctcattggggcaggttggaaggctccc

SEQ ID NO: 76846 - DNA, 1117 bp, Homo sapiens
agacagggtggtggtgactgaagttatgaggacaggaactgggccatgtagcagatactgatggttgtattgatgactttttaaagtgaggtgcacatctggggtcatgacatatagtcatcataagtgtgtgcctgacttttctttaaatttctttatatcggtctccctaaaaacagtgttcacactagtgaacccaccacccaaaccacagacactgatagtgctggacatctctcggtggtgtgccagtttgtaaggctgggcccactttagttgggtcaagaggagggcagagggcattctaagctgaggggtgggagggagcagaggtgaggggctgaactaggccaggacacccagaggcggaaagtctgcgcccaagacagaagggaggcaggagtgggagccggccctggcatccatactctttttctccctgtccccacgctcaccgctccctctgcatggcccaggaggcactctctggtcccacctgctctcccaggcgcactcccgacattctgggctcagctctggctctacccaggagaggatgaaggctcagctcaacccccacctcaacctcctgaccccagcgaggcttccctcaggccatgcccctggccaggacagaatcgccctggagcctcctaggacttctccgaaccttctcctagctggggaggccccatccaccagaccccagagggaggctgaaggtgaacccacagccaggaccagcacctctggctcctcggaccttccaaaggccccaggtggccacctgcaccttcaagctaggagggctggccagaactcagacgctgggccccctcgggggctcacttgggttcctgagggggccggcccggtgctagggggctgtggccgaggcatggatcagagctgcctgtcagcagatggggccggccggggctgtggcagggccacctggagtgtgagagaggagcaggtgaagcagtgggcggcagagatgctggtagcgctggaggcgctgcacgagcagggggtgctgtgccgggacctccaccccgggaacctgctcctggaccaggcaggtaggtgccctcctcacccctcagtggggtggccc

SEQ ID NO: 76847 - DNA, 1442 bp, Homo sapiens
tgaggtcaggagttcaagaccagcctgaccaacatggtgaaaccccgtctctactgaaaatacaaaattagctgggtgtggtggcacatgcctggaatcccaactacttgggaggctgaggcaggagaatcgcttgaacttgggaggcagagattgcagtgagctgagatcacaccattgcactccagcctgggcaacaacagtgaaactccgtctcaaaaaaataaataataaacaaagaagtcaaggcactagacagtcctccatcctccaaaccactgagtaaaaggagtttcttgtttggttggatgaatgggaaaatgcctgctgctttgctgcccttttgaaatataatgaaagaaaaaggagaagaaaaagaaaatcccctgaatcctgccgaactccaagataatcactgttaatgttttagtctaattatttctgaatactgaggttggttttaatatgtttttaacagaaatctttcagtgtatggatcaaggtttatttctggcctcctcagccttccctccttcgctagtttttttggactctgtcagttacaggcccttgcccaggaccaggtggtggggaatcccacttggcaagggacagtggggaattatctggggtgtcaggatttgtgggaaactctgttctcctaaatgactccagagttttcttccttgctttttctaacattgcacaagtttggtcagggagccaagcccaggctggactcggtctctggctgttggaggagagacctctggtggttggagaggacacctcgctcctgctgagaaaagggtcctgggcgctctcatctagtccactgccttcctttcactgatgatggagaaacaggctcaggagggaaggccattgccagggtcacctggttgtgcccccagttccagtaaagtctgcagggctccgggatcagcctgtctgggttcaggtcctgacttgaccactttttagcagtgggacagtaggcaacataacctctctgaggctcaggcctgaattttggcaggattgtggggataaaattaaacaacctatgtaaagtgcttagcacagagtaaccactttacagccagggtgggcttcccctcggatgacactggtaataatcacgacaggttatcaagggtgtgttctgcggcaggtgcaggctgctgctctgcctgaattgcctgctttaacagaatcctcttcaggaccccctgaaggaagtgctgctatgaccccgttttgtacttaaaaagagcaaggttcagagaggccatgtgacttggcagatgtgatcactgacattctcacagcctttccactcaccaagggctttcttggttttttgttttttgttgttttgttttgtttttgagatggagtctgtctctgttgcccagactagagtgcagtggcttgatcta

SEQ ID NO: 76848 - DNA, 1050 bp, Homo sapiens
actcccacttcccgcttcccacagcacccccaccacactcaccctgaaccccagggctgcagccaagacgctctaccgagcacagctggggacttcctgcggctgggacgtgctcaactccagaaacctgtccagagagggcccgttctggcccgtccttgcccagggccttggcaagtctgccctttttttcctctcctgacctaactgtaactttaccctgtcccaatgctatctcgcatgctttgccttattcagggcagacaagaagataggaggcgacgtcccaacccttactcggggcactcattgttagagtgcttctgattagaaggacagacaatgaggtcaaatcagagtccagccagtatgaggttcccctcttcccctgaaccctggaatagtcacccaagaagttctttaccaagctggctaaatggagagcttcctaaaaatacagatgcccaagaatctgttatttaacatactcactgggtgattttggtagatctgggggcccacagagaaaaggagacagtcctgtacttcccacaggcaagaggatgacatgctgcctgagggaaggccccgcgctgggcaccaccccgggtggccacgggcaagccccctgctctctgagctgtggtttcttcctctggaaagtgagatgagaattctcccccaatggggtgatctgggaggtaaaacaaaacaattttggggaaagacctggcacatgctgtgacactgagtacgtgcttgatggctctaaatacaagtgacaggagtgagctgggaggcacgcaggcttctgctcccgggccttactccagctgcttctcctgggtccctggggcaggtcccagactgtcagcgcaggccctgccagcttccatctgccacggtcccctccccactgcttgagtgtcagtggccacgacccaaccttggctgagcacagccgttcccagggactggccgggaggtgactgacaccgtgcctcccggtacgatcccgctgaaccataggtgttgtggtgagaggggttc

SEQ ID NO: 76849 - DNA, 1046 bp, Homo sapiens
aggctaggagaccactttattggagcagagggttctccggctcagcctaggggatgatgaagccaaagagtgcaaaagggctttttgcaatgggggccagggaacttttctaagcaggagactggaaggatcctaatggccctttgggaagcttcattcactcaatgcctcctacatgctttgtctaagggggcacagaggggagatggatgattctgcctggagcaggtgggaagggcagaaacagctccccatttgacatgggcctcaaaggatggattggagtcatccagacaaggaaggacaggaaggatgaccaaagctggcaatggaacctggcagctgtgtgtatgtgtggtgggaaggagggctgtgctcttcattcatgtgtgccccgtagagccaagcacaggttgtcctgaggagctgaacacagtgtctgtgccagaatcaaggagtccaggcagctatgacggtcccccaggacatgtaaaaagaagcaagtaaaaattgcctgatgctaccctgggccaggctgacctgacccagggaggagagcagctgagtgagtgcgagccattagggaggacacaagacaggtgccaaggccagctggctgacccaccagagagacccacttaggtctcaggggtaacagccatttgtttccccacccagatagagaacatgtggaggtatgggaagctacctggccgtactcctctgacacctcccctccctgggaaacctccaccaaagacattcccgccagcccacccaccctacccccaccatcctgctgtggtcaagtggccaagggcccagcactccaggctccagccccatcacggccccctccagcctctatctcttcagagcgggaaacaccacatcccagctgtctgtcccaaatccacctggaggccggccagcttggccgaagcccagcttagttaggccagacccaggagacactgccgggaagaggcaaggactggaaggaagcggctgggccagagacgggcccctctctggggcttacccag

SEQ ID NO: 76850 - DNA, 1086 bp, Homo sapiens
acagaacaaaagtgagacgtctgcccaaggggcagccgaccctggacatgcattcagagcgtcagtgtcagctgacactcgggagtgacagctcgggcagtcaccgagctgggaagacaggagggagtgccgcaacttcttcagtgtagccttaagtcgcggtgaggggcgcgtagagacttgctgctcccatagcaacgggaccagccaccctctacaggcctgacgggttacttccgttcaccgtcggctgagccaagaaaggccgcttccgatcctccagcccccgaggcgcgggggcgcgcggacgcccggttataactgaacaacccgagccccacgtctctgattggctcaggcagaggaagggggcgggagatcggcaacgaagggcgtagccggcttccactcaaacttgaggtttccccccatcccctcacagcggaagccgacctcgcccgccccggaagtgcaaactgtgtggtctggcaggtgtggattccgccggtgaaggctgaaggcagctaccttaaagatgccgggatccgcagcgaagggctcggagttgtcagagaggatcgagagcttcgtggagaccctgaagcggggtggtgggccgcgcagctccgaggaaatggctcgggagaccctagggttgctgcgccagatcatcacggaccaccgctggagcaacgcgggtgaggccggcctgcctccgccggcgaacctggcccctgtctgttcccgatcccagggctgaaaatttcccaggcctcacttcgcgttggctcctcttatcctctctcttttggactgtaggggagctgatggagctgatccgcagagagggcaggaggatgacggccgctcagccctccgagaccaccgtgggcaacatggtgcggagagtgctcaagattatccgggaggagtatggcaggtcaggctcacgtcctgggctcctggttggatccagtgacactttttgcacgggcccctctacctgctcggagactttattggagctgaacagcccttgttacctgcctgaccactcctccccacctctctctttgggtcttgttg

SEQ ID NO: 76851 - DNA, 2431 bp, Homo sapiens
ctttttctccactgtagaaaaacaccctgtacccattaagtaatctctccctatttgtccttctccccatctcctccaatctgctcctgtctctatggatttgcccattttgtataaaaggaatcatataatatgtgacatgttgtgcctgacttttttcacttagcatgatgttttcaaagttcatccatgttgtaatgtcagaatttcctttcgaggctgaataatattccattatatgaacataccacaatttattaatccattcatctgtttatgggcatttgggttggttccagcttttggcttttgtgaataatgctgctataagcatctgtgtataagttttctgtgtggacatatgttttcatctctagggtacatacctaggagtggaattgctgggtctctagtttttataaattttttcctttttagttccccaatgaagaagactcatttcataagtttgtggctcctgaagaagtcctgccattcacagaaggtacagaagctgtgtgtgcatgcgtgcatgtgttgtgtgtattcggggtttgtgtgtgcatgtgttttggtctttttgttgttttgttggtcagtagaactgaatgctgtcaagttgtgttttttatcatacttcttgtggggactgttttctttagaagctcaaagtgcttgaggacctgaccaagtccatgttaatttgttctgagacaaatatattttagatttgttggggctattgtgggttggatcatttagcattgtctgggtttggctttgcatgctgtttgagatatagacaacaaccagttgggaaaatgtacctgttttcctgctataaggagtcattttggtgaattgactcccaaaggaagcaggttgtgaaatgttcctccttagaaaactcacctgtagcctggatagtctcatgtcttggggttcttttctctggcttcttctgaaggcagcagctcagctcattacgcgtgcagcctcatcagcaagggtggccttacacaccatctgagagcaacgcatagtagttggttggggtcctagttcctcttggaagttgattgacttcatccctttatttaaataaacattcaatcttcaagaaatagttattgagcacctacaatgtatccagcactcttctaggcactgaagataaaacaatgaatgaaaaagataaggccctgttcccacacattctattgtggaagacagatgagaaagtatcaggtcatgggatgcctgaggacaagcaaggctgatgtggtagaaagtggctaggggcctgagattgaggaagggtcttaatgagatgacatttcagctgagtcctgaatgaacagagtccaccatatgaagatcatagttttctatgagctggtgcaggggcttagccagttagaaaaggatggccatacatggctagacagtaatgagcaagggggagagtggtccaaattgtaattcatgtggtgtgtcagggagggcccagatcttaaacttcaatcctgagtttgaattttattctgagggctgtgcagaggcatgggagagttgtaagcagggattgtcatgatctgaagtcatctcttctggtttgcatttttccatagcttcccgtccttggggagctaatatgcctgcattctcgagcctggaatctatatgctacttaattatgagagagggagcctcagttttacctttagcatgtgtgcttgcctttcaggggacattctggagaaggtcagcgtgcattgccctgtgtttgactacgttcccccagagctcattaccctctttatctccaacattggtgggaatgcaccttcctacatctaccgcctgatgagtgaactctaccatcctgatgatcatgttttatgaccgaccacacgtgtcctaagcagattgcttaggcagatacagaatgaagaggagacttgagtgttgctgctgaagcacatccttgcaatgtgggagtgcacaggagtccacctaaaaaaaaaatccttgatactgttgcctgcctttttagtcaccccgtaacaagggcacacatccaggactgtgtcttgcctttcagatcttaacagagcagcagggcttaacttgttgattttggagcctcttagtgacctggttgcgtctgtgtcaggaacttaaactttctggttcagtagtgtgttaaacataacactgaataccttactgggatacagatttttgctcagaaatggctatgacactttttctaggctctaccaataaaagccacttgaaggttccatagttggtttatttattgtcctactctgacagaactgcttgaaacagcagcagcagagccttttttgtgtttgcatagagggctgtagttagcgggaaaagtgtacaacatggtagtactggc

SEQ ID NO: 76852 - DNA, 1492 bp, Homo sapiens
gaaagtatgcagtcattatcacctcaaacgtttctttcccattctctctcttgtctcttggaaattttgtcagatatctactgggccttatctttctactctgcatgcctcttcaactctcttccatatttcccattgctttctctctgtgatacattctgtgaaatctcctcacttatcttccagtgaactaaagtatctcttcatcttctgtttaattatgtgtttagcttatccactgagttttttatttcagtgactaaattttttatttcaatggctatattttttatttccagaagttgtgtttttttccccaaatctcactcttccttttttatggtgtcctgcttttttcatgattgttccttctcctttatcagtagctttcttgatttggagcacaggcaaatccacacccacctcatctagaagtctgaagtgctttagtaatatctaaaatagtaaaatctaaaattagaggatagatgtagtagataaattgggggatggatttatgtgggaagatttgagtcagggagagcagctgacgggttattgcagtggttaaggtaagagaagatgaggattggactgagtcagtagcagagggagtagagaggagtgacatatctgagacagaatttgggaggcagaagcaagaggacttggtgagcaatcaaacgtgaaaggaataaaggagaaaacaaaagcaacagtgattctgagggttgtagcatggatggctggaaggatggtggtgccattgacagagaagggacacagatgaggaggaacaaacctgcctaggagttccatcgtgaaggtgggtttagacacagtgaatgtgcctgcaggtggaatgcccagtggataggcacacttaaaagatctggtacttggaaaataaatctgggctgtacatatctatctgagagttaacagtatatatatattgatagtatcagaagctggagaagggccttgaggaagtgaggttgtccagggagaatatggagagtgaaaaggaagagacaaaagagtggagcctgtggaacatcagcatccagggtgcgtatgctttggaaaaggtctggaaagctctgctgaaaagaggaaattctaaggatggctgaaaatacttggttagagagggaggaggaaaaccaggaaaaagcaatattgccaaaactaaggaaagttttaagcaaggagggaatggtcaataacggctatgaagtagagcctgaaacgctggacttgactgtcatgaggacattagttgtcttgtggaatcatttcctggggatgaggtggggcagaagataagagtgcagtgagtcaggagtgcgtgaagcaggaggaagtgaagctaagtagacaactctttcaggaactttggctacacacagaagaagagagatggggtgagagctaaaggttagaagtggttgggaagtgtggggtgggattcaaggctgaggaaaggtgt

SEQ ID NO: 76853 - DNA, 1050 bp, Homo sapiens
aagttttagagcatttattctctatgtatttcaaaatattccctttaccttgtttagtaaatgtcatagcagatcaaaggcaaattaacctaaagttctgtcagaattatcatgaatatagaatttgtgaagatcaaattcctatagttttactatttctagaaaagtaatagttttttgttgttgttgtttttgagacgaagtttcactcttgttgcccaggctggagtgcaatggtgcaatctcagctcactgcaacctccgcctcctgggttcaagcggttcaccagcctcagccttccaagtagctggaattacaggcacccgccacccacgcccagctaattttgtatttttagtagagacggggtttctccatgttggccaggctggtctcgaactcctgatctcaggtgatccgcccgccttggcctcccaaagtgctgggattacaggcatgagccaacccgcctggccaattttttttttaagttttcattatctggaattctttgttgtttttgagatcagaatctctactaatgatactcaagatgggtgtaactacaaaatctgcagatgttgaaagaagcaaaatggatctgttgaaatttctctttttttctttacttttttttttttttttttttttttgagatggagtcttgctctgtcgcccaggtgggattgcagtggtgcaatctcggctcactgcagtctccccttcccgagttcaaggaattcttctgcctcagcctcccaagtagctgggactacaggcacctgccaccacgcccggctaattcttgtatttttagtagagacagggtttcaccatgttggtcagctgatcttgaattcctgacctcaagtgatctgccctcctcagcctcccaaagtgttgggattacaggcatgagccacaggcccagccagaatctgtgttttaataagatccccagggggtatgtgatatgaacgtttgagaagcccaagtctaaggcaggataaacatggcccgaggggaatctgggcatcacctctttctgt

SEQ ID NO: 76854 - DNA, 1041 bp, Homo sapiens
tatttactttgggagtgaaaatgagggtgtgcaaaggagatatttcaacttttactctttttgtcttttttttttcctttttgtggagaacggggtctcgctatattgcccaggtaggtctcgaactcctgggcttaagctatccttccacctctgcctccctaacagctgggattacaggtgtaagccaccacgcccagcccatcttttattcttttaaatattttctattgtttgactttttaataatattttcatgttttccctttataataatagaaagtgtatataatgaactctgctaggtttgtcaatatttacacagaatctcttggtgacctgctctaatgaaacaataatagtttgtaaatatattaactcattcaacaagtattaattgagtgcccattgtatgccagggactgtaccaggccctagggatacaataatgagaaaagatatatatgcaagagaaaaaaataattacacaaacataaaattttagttctagcccctgtaatggagaaagagatacaagatgctctaagaacctgtattgggagatttgatttcatcagggagttcagggaagtgcttcttggtaaaatgaggtctgaatatgaatatgagttaactaagtaaagaaaggagggaacaaccatgcaatttgtgatttattctcctcagtgagtggaaacagggcaaggggaactggagatgaggctagagaagtaggtaggagtcagatcttaaatgccagctacaagctttgctttgtcccaatactgttggaaaccattgaaagcttttttttttcattttttatcatttgtattttgatgttgtttttggggtggtacatgtcacatcacatttgcattttaaaaagattgctctggttgtagtgtggagaatggagtaggagtaggggtggagtcccagttaactgtagattgactgttaaaagaatattgcaatatctgagacatggttagatgggaccagggtggactagagagcagtgaatgtattggaaagata

SEQ ID NO: 76855 - DNA, 2044 bp, Homo sapiens
cttgtgattaggggacatgtttcttatttttaaaaaggctggacttgcactccaagttgctgtagttttatgtaagcaaaactcttcaaaaaaagctacagacatcaattttgtgtgtatgtttaaaaatagataaggtatattttgcttaaaggcagtaaggctataaatttgagccatagcttctctgtcagtattccacaatatctcttttaacagtttggagaaaagctgtaatgccagaagatacagtcaccaactctagtttaaaaagtaacagatcaaaataatttagagatacagcaaacactgaacatttgtagaacatagaaacaatgtacgtgacctttggtcttgaggctatggctcaccaaacaggaaatgccattccctcctttccctgtggttctggatgccaactttacctgttcccttttgccctagatactgtggatgatactgttagtagcgaatcgcttcagtctttgttctcagaatgggacaatccagtatttgcccgttatccagaggtgggtctgtagcagtttttctttgccttttttttttcttcttcttcttcttattttttaaattttgagatggagttttgctcctgttgcccagactgaaatgcaatggcatgatctcggctcacgtaaccttcgcttcccaggttcaagcaattctcctgcctcagtctctcgagcagctgggattacaggcacctgccaccacgcccagcgaattttgtatttttagtagagatggggtttctccatattggtcaggctggtctctaactcccaacctcaggtgatctgcccgcctcagcctcccaaagtcctgggattacaggtgtgagccatcacgcccagcctttctttgcctgttattttaaactttgagtttcaagatgggtacagtggcatgcacttatagtctcagctactcaggaggctgaggtgggaggatcacttgaggccagaagttcaaggctatatagtgtgctgattgcacctgtgactagccactgcacactatagcctgggcaacacagtgagactccatctcttaaaaaataagtaaattagttaaaaataaaatttgaattttatttaagctgggtatgggcatgcaagactatattaatttgtaattatgattggaaactgggcatatttccaaattatgtatttggaaattactgtttaatgtagaggggagaaataaaatttatagcatttgggaactcaggcattttggattaaacatgtataatcaatgtgagaacagtgaatgtgtttaccactctcagaaaccctgacttgtagctttggcacagtattcagggtggtgataatgaaattgttatcattagataaagccacacatcttctactggaggaacagttcctcattggccccgcatggatgttctctcctcagtgtattttcacagaatgtactgtgcatgttataaacagggtgtataatagatgagcatttgtttaccagttctttcctcaagatatcatttgaggacttgatcatggaacatagacaaattgttgttgtgaaacaattttttttgttttgtcagtaattttgtttataagcaaaaatttttatgtaagactcattattcataaattcttttgaatttttttttttttttttttttttttttttttttttgtgacagagtcttgctgtgtcgcccaggctgaagtgcagtggcgtgatctcagctcactgcaagctccgcctcccgggttcacaccattctcctgcctcagtctcccaagtagctgggactaaaggcgcctgccgccacgcccagctaattttttgtattttttagtagagatggggtttcaccatgttagccaggatggtctcgatctcctgacctcgtgatctgcccgcctcagcctcccaaagtgctgagattacaggtgtgagccaccacgcccggccgattcttttgaatttctataaattccctgaattaaacccacctctagtaggctaaataaaaatgaat

SEQ ID NO: 76856 - DNA, 2468 bp, Homo sapiens
agactagttttaaggacaaagctacataaactcattgactttttattaaggaaagaaagtattatatgcaagccaaagaatggtcccaccagtaggcaaatgaattcaagtcttcggcaccggtctaccccagaactctatggcatatatgtaattaatgtgcagtgccaattctgtgagtatgatgtgtgcatggagccagccaaaactctgattgaatttcagaactgggacactctcttgttttgcattcaggaaggagtgaaaatgtttttaaagcaagaaaaattatttgtggaattatcaggtgaggatattaaggaatttagtgaagataatggttttagtttatttgatgctactcttcagaagcgtgtgacttccgatgagaggagcaatttccaggaagcatgtaataatattttagattcctatgagatgtttaatttgcagtcaaaagctgtgaaaagaaaaactactgcagaaaacgtaaacacacagagttctagggattcagaagctaccagaaaaaatacaaatgatgcatttttgtacatttatgaatcaggtggtccaggccatagcaaaatgacagagccatctttacaaaacaaagacagctcttgctcagaatcaaagatgttagaacaagagacaattgtagcatcagaagctggagaaaatgagaaacataaaaaatctttcctggaacatagctctttagaaaatccgtgtggaaccagtttagaaatgtttttaagcccttttcagacaccatgtcactttgaggagagtgggcaggatctagaaatatggaaagaaagtactactgttaatggcatggctgccaacatcttgaaaaataatagaattcagaatcaaccaaagagatttaaagatgctactgaagtgggatgccagcctctgccttttgcaacaacattatggggagtacatagtgctcagacagagaaagagaaaaaaaaagaatctagcaattgtggaagaagaaatgtttttagttatgggcgagttaaattatgttccactggctttataactcatgtagtacaaaatgaaaaaactaaatcaactgaaacagaacattcatttaaaaattatgttagacctggtcccacacgtgcccaagaaacatttggaaatagaacacgtcattcagttgaaactccagacatcaaagatttagccagcactttaagtaaagaatctggtcaattgcccaacaaaaaaaattgcagaacgaatataagttatgggctagagaatgaacctacagcaacttatacaatgttttctgcttttcaggaaggtagcaaaaaatcacaaacagattgcatattatctgatacatccccctctttcccctggtatagacacgtttccaatgatagtaggaaaacagataaattaattggtttctccaaaccaatcgtccgtaagaagctaagcttgagttcacagctaggatctttagagaagtttaagaggcaatatgggaaggttgaaaatcctctggatacagaagtagaggaaagtaatggagtcactaccaatctcagtcttcaagttgaacctgacattctgctgaaggacaagaaccgcttagagaactctgatgtttgtaaaatcactactatggagcatagtgattcagatagtagttgtcaaccagcaagccacatccttaactcagagaagtttccattctccaaggatgaagattgtttagaacaacagatgcctagtttgagagaaagtcctatgaccctgaaggagttatctctctttaatagaaaacctttggaccttgagaagtcatctgaatcactagcctctaaattatccagactgaagggttccgaaagagaaactcaaacaatggggatgatgagtcgttttaatgaacttccaaattcagattccagtaggaaagacagcaagttgtgcagtgtgttaacacaagatttttgtatgttatttaacaacaagcatgaaaaaacagagaatggtgtcatcccaacatcagattctgccacacaggataattcctttaataaaaatagtaaaacacattctaacagcaatacaacagagaactgtgtgatatcagaaactcctttggtattgccctataataattctaaagttaccggtaaagattcagatgttcttatcagagcctcagaacaacagataggaagtcttgactctcccagtggaatgttaatgaatccggtagaagatgccacaggtgaccaaaatggaatttgttttcagagtgaggaatctaaagcaagagcttgttctgaaactgaagagtcaaacacgtgttgttcagattggcagcggcatttcgatgtagccctgggaagaatggtttatgtcaacaaaatgactggactcagcacattcattgccccaactgaggacattcaggctgcttgtac

SEQ ID NO: 76857 - DNA, 1085 bp, Homo sapiens
tcacatttatatgatggttgttagaagaaattgtttacaattagagttctttcttttagtagtttggagaaatcacaaggaagtcccatccatgttcagagatcatctccctgaaatctagtttccaaagaagaaatcagcattttgctcttgcagataataatatgatcaccacttactgttttttcctgttttctttcagttcaacccagtaatccactgggaattcactctatgtcccactgtagcgatttatttttggccagagcctaaaagaatcttgtgtttcttaaattcgtaaatacagttacggtgaagcaaaataattaggttcctgagatcagatgctccagctttatggcaactagtttgtgggaatgtgtgacattgaggacaccaagacagaagggacctagactaagatgcacctgcaccaccctggtaatgtctcaaatcttattccacagtgctgtgcctttggaagctgagtggttgtaccttcctgtcattcctctagagtactcaagaacaggtgattttcctggtatcctttaatcttcacgtaactcccagcagacgtacaccctgtctctctcctggactgtaagcatttttgaggacagggaacatattttgtgctttgtgcttaataagtgttaactgaatagaatttcagtacaatgaggaataaaattataggaattagagtataagaagtaaattactaaaggatctcatatacttgaggaactttcccctgatcaaattctttgagaggaactttcccctgatcaaattctttttttgagaccgagtctcgccctgttgcccaggctggagtgcagtgacgcgatctcggctcactgcagcgatcttggctcactgcagcctccacctaccgggttcaagcaattctctgcctcagtctcctgagtagctgggattacaggtgcccgccaccacacccagctaatttttgtatgtttagtagagacggggtttcaccatcttgcccaggctggtcttgaactcctgaccttgtgatccacacgcctcagcctcccaaaatgttgggattacatgca

SEQ ID NO: 76858 - DNA, 1024 bp, Homo sapiens
taatctgcaaggtcaaagagaacaggaaaggagcaacagcggtaactgacttgccagcgttgaggcaaaccaagggcctgcaaaggaggtactgctgagaggcaagccactttcccaacagaacctgagaggttcagtgcttggaagtacccgatagtggaaagtaaggaggtacaggactgaaaacaagtaggaccccacggctcctcccaccttatgcatccaagtgttcaacacccaagcacactcacagaagagcaaggatttattctctggagaaattgaaccacacagatttctgactcaggaaatctagacacgtggaactgggttaatcttggggctgaaaatggggattaagtacaagtgtacataccaaattatcgaactgtcagcctccttcccccactcagcccccagagtaccaagcatattggcatcctcataggaaaaagaggggtactctggatacacagaacagtccagagaaaagccttcagatactgaccttgggaaacgctaattaaaagactcactatctgggaaccttaatatgaagatccttagtcaatgagccccacttaagcttaaatatgaaaggacagccaggaatcatcagatatttgctaaaagctctaacaagaaaaagagccaaaaagtccacaaacaaaaacttaggaggcagcaacaaggcaggtggcagaagaaaacttttttttaacatgagaccatatcaacaaaatgagtattagaagagattgtgtccataaaacaagaagagtatactgtgaaaaaaagacaaccagagaaccagaaagaactattgtaaattaaaactttgatagctaaaaataaaaattatttaaatagaggccaggtgtgatggctcacgcctgtaatcccagcactttgggaggccaacgtggggagatcacaaggtcaggaaatcaagaccatcctggctaagacggtgaaatcccatctctactaaaaatacacaaaattagctgggcgtggtggcaca

SEQ ID NO: 76859 - DNA, 1013 bp, Homo sapiens
ccaaccactttctttctgaatgtctagtcagtatttttccccttttggtgttttatgaagccatgtggtaacgaatgaatctgtatcatttttcctacctgagtggcccaaagccagcaccaaaccctgggagtccctgaagcctaacagaacaggtagaacttgcaaaaggaatttggctgagagctcacttctaatcctgtactcactgtgtctttgtagatagaaacaagctagctttaccaaagagaaatagtgtcatagaagaacaaaacttcatatagaaagttctaggcaagtatttgatggtttccttaaggatgtgagctttgtatttccacctagccttgtaaaatgttcctgtggtattttgtgtcacacatcctacctttgatgagtctcacatcccaccttcctataaacagctaaattaattttgtttcatcttccccagaccaaaatgtttgataatcttatcaacattgtgggaggtcttgtgcaatggaaattttgccatttctccaaaactggtggcataaaggctgatgcttggggagaaccccattgctcgggacaggcaactctgttcaatgggatcttctttggtttgatgttcccattgttttctcagttctgggaagcctagtacattagtactaatgtaatcactgaaaccttttcttgaaataagggaagcagccaaactttgattaaagttgcaagttctggggacttgcgggggttgtcataaactgtaacagtgggttttggttcagcatgtaaatgcaactttgattttcttgaggaccgattgacctgtcatgtccctgtatcctcatgctcatcatctcagcaggcctgagaggctgggtcagtttgggtgttcatcatgaggattgcttctgccatggagctgatggacatgggcaggttgctgagaaggtggggtgaaagtgagtgccgggggtgggtgagtgccctggtcttgttcataggggagcctttccctagca

SEQ ID NO: 76860 - DNA, 1362 bp, Homo sapiens
agaaaataatagacaccttgtatggttctttggaggattaaatgaactaatgtttatgaaattactttagaaaataatatacaggctgagcacggtggctcacacctgtaatcccagcactttgggagattgcttgagcccaggagttcaagaccagcctgggcaacctggtgaaaccccatctctaccaaaaataaaaactaactgggcatgatggcacacgcctatagtcccagttattcaggaggctgaggtgggaagatcacctgaatctggggaggtcaaggctgcagtgatccgtgatcacaccactgcacttcggcgtaagcaacagagcaagaccctgtctcaaaaacacacacacacacaaggtaagattggcagctatagcagggagaagattgttttgcccaggactttttccattttaaaactaagagttctgcatcccaggaaaccccgcagtcctggacaaacctggatagttggtcaccctacctgcagtaaatataaaggtatggactgtatctaaaatagtgccatgagcgtctcacaagatcgtggctacaaatccttagccacgccttagccaatgccttagaagttggcattgaaaatatagtactgaactacttctgtgactaggtggcactgttgctaatgtggaaccgtgttttatccggacaggtggggatgcattccaaaggaactcagacagcaaaggaagagatggaaatggatccaaagcctgacttagattcagattcctggtgcctcctgggaacagactcctgtagacccagcctctagtctcctgagcctgtagagcccccaggagactgggacccaaagaacttcacagcacacttaccgaatgcagagagcagctttcctggctttgttcacttgcagaaaaggagcgcaaggcagaggctctgaagcactttccttgtacatttggagagtggcattgccttttagataggatctaggagtgattttattgttttggagaatggaagggcccccatggccctggctttgtcatcagtgactgccatagcaacagcagctctgtacctcatctgttgatcccacctttgaagaggagacacagtgctcaccttaattgcgctggtagcagcttatatcccatgtatcattttcaccattgattggaagctgccttgggaattcagtaccaggcattacccctctgggtgggagagggagaagtgtaaagttggagtgggctggaatcaggtgtggcccgcccagtgtcctctgcagagtggtgaagtagtctggccctcttgggagccctgagtccaggaaaatatgtctgatggagtcaatctaggg

SEQ ID NO: 76861 - DNA, 2679 bp, Homo sapiens
aaaatacaaaaaattagccagttgtggtggtacacgcttgtaatcccagctacttgggaggctgaagtaggaggaccacttgaacctgggaggtgaaggttgcagtgagccgagattgtgccactgcacttcagcctggtgacagagtgagattctgtctcaaaaaaataataattagccgggcatggtggcacatgcctgtggtcctagctactcaggaggctgatgtggaaggattatttgagtcccaaaggtcaggactacagtgagtcatggttgtgccactgcactccagcctgggcaacagagcaagaccctgtttcaaaaaaaaaaatctgtaggtttaaagctccctgtctaataagactaaacttgctagtgatttgaggagcgtgaacagaggaagcagcatgctgttctgtctgcacctttagcctcagctttcagcagtgttgcagccagcctcactgacacttccttggagcgccccagctcactgaatagcctgtgtagaataagcgtgttggagtgacacaccagaaactccagcctgtgttctttgagtttgcctttgcatcactgtttctctgatgaaggggtggcagttttttcacaggtaggctgtgatatgttgttaaccacaactgtcttgcccactagagggtgctgaagtcatgagagagggaaaactatagcaaaaagaagggaatttgggaggaagcaaatactgcaaacagactaatgagattctttctcatatacataggagctggaaaatgcagaatttatccccatgcctgacagcccatctcctctcagtgcagcgttttcagaatctgagaaagataccctgccctatgaagagctgcaaggactcaaagtggcctctgaagctcctttggaacacaaaccccaagtagaagcctcggtaactgagctttttgcctttgaatcacaactaggtaaacagtcactgcaagctctgcctggttcttctggcctcgctctagcttttgggtttcagctgccctgcatcaactcattatactgtctattcagcagtacttaaagcctcaacccaagactaaactgagttgcctcagaaaggtatttacccttccacatttctgacaggctaacacctttctaaagggattgtcttttccctctgcctcagaaataccaaaattcaaattcagtttttcatgacactggcagggtaggttagaggctctaaatataagaaagaagtaatactggtagtctagtgaggaagcaacacatgtacacctaaccttggtaaaaatgacattgtggtaaatacctcagtaaaactataatccaaggtcatgaaactttttctataaaaggctacataattattttagacttttcctattaaaggccacatagtaattattttagaccattttagacagaaatgtgtacagcctcttttgcaactactcaactctgacattgtagcacaaaaagcagcttcaagtaatacataatgaatgggcatccttgtgttccaataaaattgtatttacaaaaacaggcagtgggccagaattggcctatgggctatttgttgaaccctcctataaaaaaagtacagtagaaaagagaaaaatccagactaggatcatcagaaagcttcccagaagaggtaataatacctttgaaacttcaaggtgaatgttttaatttctctgtcagttcaccttcttaaattgtgttggtggtcctgtttactgaccacctctcagatcttttctaaagtgtgattcactgcatatcatgaatattgaccctttgggtctgtgatctgaaagacttgttccaaaccaaatcatgcttttccctacttcagcattttaaatgagaagataccaaggtgctttaaaatttttcacaaagtcctccaaaatagatgattggtctcccaccttggcctaatggggactgaggcagagagttcactttccatgttatgtcagtgcccatcgctgttataatcctagcatttctgtttctcgtacatatattcatgtgtatatatgatttatcttgttaatttaaaagtaaaatccgattgcacttagaggaagtttggattgaggagctatgacacctgggcagaacctcctgcaatctccttcttgtctctctagtcacctcggctgaatcctgcagtaacctgtgctgggaagggaacaccactgactcctcctgcgtgtgcgtgcagctctctgcaggtggaggttgagagattgcagggtctggtgttaaagtgtctggctgaacaacagaagctacagcaagaaaacctccagatttttacccaactgcagaagttgaacaagaaattagaaggagggcagcaggtgagagcattaaaagaataatccaatttctaagcctgttttgaagaatcacagaaacaaaacacaaagtactgaaatagacttgttcctttgcaggtccttactttttttttgagacggagtctcgctctgttgccaggccagagtgcagtggtgctatcttggcttactgcaacctccgcctcccggattcaagcaattctcctgcctcagcctcccgagtagctgggactacaggtgtgcaccaccatgcccggctaattttggtatttttagtagagacagggtt

SEQ ID NO: 76862 - DNA, 1045 bp, Homo sapiens
tatgcaatgttacttcctttttttaaattttgagacagagtctcactctgttacccagagtagagtgcagtggcacagacacagctcactgtagtttcgctctcccaggctcaattgatcctctcacctgagcctcccaagtagctgggactacaggccagtgccaccacacctggctagctttgcatttttttttagagattgggttttgccatgttgcctaggctggtctcaaacacatggttactttttaaaacttcccaggtgattccagtgaccagccaaggcagacagttgctaatgtagatagtgaatatacttagaatagcaagtggtgcttagcttatgatactaatttctaaaactgtaagttatagttctaaagttatctggagtcaaggagagcaattatctccctatcctagtcttctctcatttttcttgcctatatcagtatacagtgcttacctaccaaatattttttctcagagaaagtattgaattctaagaccatccgttccaatagcagtggcttatccattggaactggtaagtaccaatgtttcaggtaccagtggttttctgaagtgtgggtcttttggttagattccatgtagactccaaaacccaaaggaaaatgggaaatgtctttgggaagtgaggaatacagtggttaagagagaagatcatattttgtttggttttgcagtaagttataacttttacattgtggtcagagagacactacatcatctttgcctccaacgcatatgcaagtaattaagtagcttgcccagtactgtaatatgacttatgtattattcctttccttactattctagggggtaatgagtcctctacttccacggtattcccaggggtattccagtctaaagaaatagttcaccaaaacaggcactcagaataaaactcggctaaactttcagtgtggttaggagaatcatcccaaagatctctgatagatttcctttgactgctgtcttcatggttctctattattggggaccatgctaggaaattgaat

SEQ ID NO: 76863 - DNA, 1092 bp, Homo sapiens
accaataaaaagttgttgaagaaaaaggtgaatgattggatgaatgaatgagtgaatggcagtacataggaagagtgggcatttttacccaagtggaatcaggaagagtttaagctttatataggagaataaacagctttcccttgtttagtacatagtgggaagtctttctagctctaggatataaagatggggaacccggagaattgggaagccagtgttctgttaaatggtctactgtttaacttttttcctagataatcacatttttgcctggggcaatggtggtaatggccgcctggcaatgacccccacagagagaccacatggctctgatatctgtacctcatggcctcggcctatttttggatctctgcatcatgtcccggacctgtcttgccgtggatggcataccattctcatcgttggtaagagtttcatatgtctggggttgggatggctttgacagaggatggacccacatctgagtactgttagtcacattgttggaaacagaaatgtcctgaagaagccatttctgtaagtcttgtaatggtcaaggatgccatgcctagtggtgggaacagaacattgtcatttcctggagctttgctatctgccatctcttgattattttttaatataagtttgggctctgcctgcccccttagaattgatttttttggttgtttttttttgtcttttttttgagttggagtttcactcttttcgcccaggctggagtgctatggtgtgatctcggctcactgcaacctccgcctcttgggttcaagcaaattctcttgcctcagcctcccaagtagcttggactataggtgcctaccaccacgcctgactaatttttgtatttttggtagagatggggttccaccacgttggccaggctggtctagaactcctgacctcaggtgatccacctgcctcagcctcccaaagtgctgggattacaggcatgagccaccgtgcctggccctagaatttgttacttctaatcatccaccaattaatttgttgtctgtgctcatgctttcatgagaaacattcagtacatcctttaaaagaaactttaaa

SEQ ID NO: 76864 - DNA, 1015 bp, Homo sapiens
tagttcatgactttaacttcagaatgaggaatgtaaatttggattctgtggctgggcatattacctcttgatgttcctatactcctctgaactgtacttgatggcctcattcatgtccaagtcctcttttaggctctaggaatatagaaatgagtctcagaaaactcctgctttcaaggagctcacactctagtagaataggggactagcacaggcaggtgttaggtgctataatagcagcagcctagtcttctaagtcctggagtaccccaaggctcacttgtctctccaaagtgagcttgttcccttaaattccccctatacattgactgctttatatcaccaggcttgaccttcagactcatttattcaacagctcctcaacttgatgtctaaatttagggtgggccatataacccagttatcttagaccaatcctgattcatgccttcatgcctgttgtcctggcttaatgattaatagccaccctgtttcatttttttttaaaagcctgatttggataagaagttataggcatctcagacaaacttagtatactcaaaatcaaacttctgattttctgcccagatctgtacctcctgcagccttcctgtctcagtaaatggcaacttcctcctacactccacatcccatccatattggttatcttcagaataaatccaaccacttctcaccatctccactacaactggtctccctgcttccatccttgctcccctgccatcagttctcctcagtagacagagggattctcttaaataactactgctcaaaacctccagtggtttcctctatcagtcagtaagtgccagagtcatcacagtggcccgactggccctatgtgagcaggacctcagccacctcctgaccccttctgttattccgtcccttcctttactttgttctagctgcaggggtctccttgttccttgtttgtgctgctgacattacttttgctgttgctcttctctctgcctggaaactcttcgtcact

SEQ ID NO: 76865 - DNA, 1066 bp, Homo sapiens
gccccaggcaagactcacacagctgctattgatggtaagttgatttacaactgtatcacatgccttagtagctgagcctcttttattctatcaggtattaggttttctttatatgtatatcatcccgatttcccctgaaaatctagtattatttcattaatgtattcaggtacatatttttattgataattattataaatgcataataaatacatccttttatgagaacaccacacctatgattccagacatctgttgtctctgattagcaccttttataagtattctaaggtagtactcatttttctcactacaaatacagtactggagagagaatacaatatcgagtcgctgactggatctaattggttatagtgcctagatactgtatttgtcctaggtccaggatcatgtggctagttttatatttgtatattctaacaaccggaagctaatccatgaagtctgcttggctgcatcttctctgggttccaggactcatttgtgccttgttatttctttttgcttctctctcagagcgaggccggctgctgacctttggctgcaacaagtgtgggcagctgggcgttgggaactacaagaagcgtctgggaatcaacctgttggggggaccccttggtgggaagcaagtgatcagggtctcctgcggtgatgagtttaccattgctgccactgatggtgagtctgtacatatcatttcaagctttctggacacatggctgtgtttcagttcttggctgggaaagaaatggactagttatttgtatagctgaattgtggatgtacttttttatttgtattaaattggtggccggttatatatattgagctttattaacttttcatgtgttcaacatagtgattgtttttaaaggccagatttctagataatgataggttaatgttctacattcctccttttttcatttcagctttcacttttttggtaaaatgttataagaattattaagtacttctatataacttgcccagtatcttgttgattgatttcagtaaacattgattgggtagctggagagaacag

SEQ ID NO: 76866 - DNA, 1039 bp, Homo sapiens
aaagcagtatactgtctcttaacccaacacagccattttcctctcctgtttctacagttgaccaccagatgaaatattaatagttgtttttgtttagcggtcatgttgcatgaaacatattatctaattactctcagccttgccagagctggccctgtgagaggctcacagaggctgataccagctgggggaaaagcacagtcacatctctcccacctaccctagggcacaggcttacccattggagggttggctaaatcagctataccatttattgttagcagtgttttgggttttctgttttcttttttttttttctttccttgggaacttttagccaaaccagtttttatttatattttaaaaattaaattattatgcatttctagggaccatcctcaatgggattcccagctgttccttttctcctggaaaggctgtggcagaaactgagggttgaggtttcaggttttacacacatccattgtgaccccacacatgcatcaccccaccttctccagtcctgtctagttagctgtaaaaagatatgagcatttggaagtcctagatattacctcagtactctgtcacctctcctataaaatgaccagattgggaccccacagggctactgaatttctgtaactgtcaagcagccttccatctcaaaggacaaaatcagcaatgaattgaagcttctttctcaactttttgacaggtcaccctaagtaggacctattactaagacaaactgagagggtgctgtcttgtttagttgacctggaactgtcaccttttctttgatattgtaaaacttgagctcttcgttgacaacagtagccttgaccgagcacaatggctcacgcctgtaatcccagcactttgggaggccgaggcgggcaaatcacttgaggtcaggagttcgagaccagcctggccaacatggtgaaaccctgtctctactaaaaacacaaaaattaactgggcatggtggcacacgcctttaatcccagctactcaagaggctgaggcaggagaa

SEQ ID NO: 76867 - DNA, 1571 bp, Homo sapiens
ctggaccatttctcagagacagaaagcaaatggccccaaactgctggcctttgggtatttaatgaattgtctaatgaaaggactatataactgttttgagttgtattgaggtactttgctaaaagtattgtgatgttgtaggatgcatacagtttataagaggattaaatctgtgaaatgtattaaacagacacctttgcaatataaaaacctattatttcactcatgtatctttgcttttcttttggtagagagatggaggaaaaagtcactctgcttaatgcacctacaaagagaccaaggtaatgttcaagagactcttaaaaactaatatatccgaaattacaaccagggggttctttcttgagtgtaggcattatttgatccgaggatactttggcatcctttcaggagccagcatctgcttaaatgtcagacagtcatttctaagaagaaagctataatttcaccctcacactaaagtggccatcattaccatgatgaatgtggaaaagtgtaggtgttatgggtcagactggaatctgatctggccaagctgtgatgaagccctgaggcaggaattgcaaagtctgctgtgatagagcacattgaaacaagttgtcgagaaagaacatactttctcataccataattggcagttcttctcagggaacagactggaagcatttttctttgatattgtttttaatgttaaatgttcctttgttctgggggttgttggcaggtcaagcactgtgactgaagcacccattgctgtagtaacatcacgaaccagtgaagtctatgtttggggtggtggaaaatccaccccccagaaactggatgttatcaagagtggctgtagtgcccggcaggtctgtgcagggaatacccactttgctgtggtcacagtggagaaggaactgtacacttgggtggtaagtgaacgctaagcattttggaacagtgctgtaagcctaattgtttactgggcccacgatgtctaagcattttattagttgaacctatactaagggagtggcaacatggggtgatggaatggaagctcttataagagcagggattttgtctgtttagttcactgatgtatgcccagggctggtacatattaggtcacctataaatgttttttgaatgaatgaatgagagagggagagaaaaattgaaagactcaggagactggggtttcccatttacagctggatgatttcagacaagtcactcaattactctgttatattaccatgaggttcagagcaactattacctgtgaaatagctttgtaaacaaaggaaggactataccatgtcaggaaacccctgaagcccacagcagtgattgaagatggctaggtatattttgtgtagaatttgtttgttgccctctagattctcccctctcaccttccttaacaaattgtctgtgtttgctgtctgtttccttatctcccactctctcttcattcacctacaatgcagcttccatctctgccactgccactcaattgaaactagtcttgacaaaatgacccataaattgctaaaataaaa

SEQ ID NO: 76868 - DNA, 1052 bp, Homo sapiens
tagatttcaaaaaactgcaatgaaagataatttaccacttctaatacagaatgtctgtatttctcatatctcatggttcccttgctgtgtagttctagtattattcaaagtatgtttcatgaaacactggagtcagaatcaccagggaatgggggagttttgtaagtaaaaagaagattcctgggccccaccccagacgaactcaatcagaatctctgtggataaagcccagaaatctttatttgtaacaaacacctcaggtaattcttctgttctgtatatattgaggttcaagagccactgccctaactgaacaagtgaggaagatgcattataaacattctccttcatgtacaagtgttgattataatgaggtgagaagcataaaatatggagtatcacataagaaatgatttttaaaacaaaaggataatgcagtggtctttgactaattaacatctttagatccgatgtcgcccatttccattaagtgaaaactaaccctatttttactttttaggatcctgagcagagacctactgcagatgaacttctagatcgccctcttctcaggaaacgcaggaggtaaattatgaagaagtcactccattgtcttttctgagatagttgacttttagaggcttgatcagagtactaaaagaaagagtagtgtttcctgacttggttgcaatagtgctattttctaccaacatccctgcttttattgcttaggggtggcatctgacttttgcctccttagcctgtgctgttttgttgtaaatttgtactaatgaggcccaagagcccttcactccccaacccattggttttaaaccttagagttgaggcattagagtgcagtaaggaagaggggtgtctggactcagacatccttatgtttgtatctgaattttgtcattatctttgtcaagttatttaacatcgttatttcttggctttctcctctataaagtaagatgaggtcaggattaaagaagataacgcataaaaagtggtcagcccagggcctggcatagggtgcctatcaattg

SEQ ID NO: 76869 - DNA, 1054 bp, Homo sapiens
tgtatatgacttggagtcaggctttggttggaattatagctccatttttactatctgtgattttgggcaagttactttacatctctgagccccatttttctcatatataaattgataatgataataatttccttgaatggtgttagtgaggctaaaaaatatcatatatgtaatgtgcctgtctagtttgtagtagtctctcaataatgtggtggtggtattaccataatattgttagtattatcatcttattattattactgccttatctgttgcagcagagtattgcctgtacagccacaattaggatatataaattaggacgcaagttagttggcaagggaactacatgaagccaacaaggatggctaatcttgctttcctttttcttgggattcagttgaaaggtcagattataatatactctgagcatcatattattggccacatagttatagattgtatggccagttggcttcattctgtctgatagcatcagtgcatccctaaccatttttttttgatgcatactagtagttataacaagaagtcagacctattgccaattctttaaataatggtcacagacacctgagagcccctaccagtagagtatagcatcatctttatataaccaggaacaatgcagtcatcattttctcatagaacccacttaacctgtgtgtgaagatcgtgcaaggaattcgggccatggaagttgactctagccagtactctttggaattgatccaaatggttcattcgtgccttgaccaggtaggtgtgacttaaacattcacttcagtttcgtatttccccttccagcctcagtgtttggtgtatggcatagctataaaccatacaaaaccacatccacttccccagggtagagtgtatttgtggctatacccagaataggtattggtaattcattatagttgtgtgcttcagtgaacaaattcttacttcattctgttttgtaagtgttagtttgtgaaatgaatttcccatctaaattgtgctcgattttttatgaccaagagtaatttctgaa

SEQ ID NO: 76870 - DNA, 1050 bp, Homo sapiens
gtttcattgcgcgtattttagttagaacatctaattccttcattgagttaccatctccccactgccagtgtttggatttttttcccattggtgaacttctactaagtatgtctttaagtttgtgtaaagtcttcagtaggccttgaatgcctgaagcctctgtgatctaggaatcacagagctattgagcccctcaagttaccacagttcctttgtcacagagattgtccctttataattgacccaagaggtttgatatgaataagatttctttccatagtggcatcgtctcataaaaaccattttggaatctgctgatgaatgttttatggttgttatgactagttcctaggaaatttaattaagctgttgaaatgttaacatagttacctcagaaaagaagttattctttgattgtttctttgttgctcagcttgtgggaaccccatattacatgtctccagagctctgtcaaggagtaaagtacaatttcaagtctgatatctgggcagttggctgcgtcatttttgaactgcttaccttaaagaggacgtttgatgctacagtaagttggcatattatccccatattgcatttagcaggttgcaaatggtacagcttgactaagcagatcaactctattcccaggcttctgatttctggcaaaaataacctgtattcaggtacaagattagtaatctattactaaaatgctatagacccagccaggcgcagtggctcacgcctgtaatcccagcattttgggaggccgaggtgggtggatcacttgaggtcaccccggccaacatggtgaaaccccgtctccattagaaatacaaaactcagccgggtgtggtggcgcacacctgtaatcccagctatttgagaggctgaggcacaaaaattgcttgaacccaggaggtggaggttgcagtgagccaagatcatgccactgcactccagcctgggcaacagagcaagactctgtctcaaaaaaatctccaacttgaattccctgttgaaatgatcacttgaacccgggaagtggag

SEQ ID NO: 76871 - DNA, 1061 bp, Homo sapiens
ggaagagttttgtgcccatgtgaaaagtcaaaagaagtagttgcctatggagagaaagcagaatccttcatttccttgtgtcacctaaaaaaacctgttacaggagccaagctttgatctgtattaagcaattcaaatctgtgtcttgtttaattgcaggagggaacctgtatgacaaaatccttcgtcagaaggacaagttgtttgaggaagaggtaattcatatttctgtggaaggaagttagaattgtagtgttgtaattcttgcattctagttctgtatttactcttccaatagtgaagagtgtttttttccttttgttcagactccttccaggctctgatattcatgagaaaggaaacctctaacaaggaagctgtctatagctgcttcctaaacgttttacctccacatcatgattctctgtgggctttctttcctggttctattactgcgtactggtatgcccagttttctataactttgcattcttcctgaattttcctacatgtctgctttaccatactatatattataatgacattggaactattttatgaggaacctgttttttgtggttttttaccccttcacttttctttgcctactcaacctgcaaggaagagatgtcaagtcatgttgaatcataacttctggttgcagttttctttgttttgtttgtttatgtgtgtgtgtatttacttaaatggagctttttgtttctaatccaaatatttattttttctctgcagatggtggtgtggtacctatttcagattgtttcagcagtgagctgcatccataaagctggaatccttcataggtaagaagtaaaaaaaattatggatggattcttccctaccaattcagcccctaccgtggatacccccccaacaacacttttattttcttggttaagcagccaagagtttttccattgatatcactaggaaaggaaagtaatgagcaatattattttcactccctgaggttaaaccatgtttatgatctaggaagagtctcctcagtagccaagtactactgaagtcattttacagac

SEQ ID NO: 76872 - DNA, 1033 bp, Homo sapiens
cacagtgataccccatctcttaaaaaaaaaaaaaaaaaatttagctgagtgtggcagtgcgtgcctgtagtcccaactactggggaagctgaggtgggaggattgcttcagcccaggagttcaaagctgaaatgagctatgactgcactctagtttgggcaacagagtgagaccctatctcttaaaaaaaaaaaaaaaaaaagatagtagacatcaggagctacaggatacataaaagtatgagaggagattatagagttgcaaaaggggtcatgacttctcttatccagaaagggtaggtgaaaatcactagggaagtctaaatttataaaactagaggcaagtttagtattttcattttagaagctgggaccagctatagataattgctccccagttctctgcttctccagtattcttgccctgccataatcaccatcatgattagcagtctgtcatagtatcctcaatagaatctttttgagatctatccccagcccatatttttacctggaactgacatcatgcaaattaagtatgacaacaacgttttaatgctttacttcccctgtcctgcaataaattataatgctaaattgtacacataacctttaaagtctgttaaaaggaaaaaataagaggagtcagtctgtgcccctctaggaagttttccttctaggcttacagatctaggtgtggattcatttgctgccaggcaagaggaaaagcacgatacctctgttactgtgtttaggatgactcactggttgtgtggaaggaagtcgatttgacccggctgtctgagaaggaacgtcgtgatgccttgaatgagattgttattctggcactgctgcagcacgacaacattattgcctactacaatcacttcatggacaataccacgctgctgattgagctggaatattgtaatggtaagatagagttcagtgggacttttccagcaagactttcttagactcataattacgttgaggagaagaatataagaagagacatatacagtgataaaaac

SEQ ID NO: 76873 - DNA, 1038 bp, Homo sapiens
gcctagcgccagtcaggggccgcgagccggcggcggcgcggcggagcaggaggaactgcactacatccccatccgcgtcctgggccgcggcgccttcggggaagccacgctgtaccgccgcaccgaggtagcggccctcggcgccggccgccctgtctggcgctgtcgggtcgccccgagtccctccttctcggccccgctttcccagcgtcgtgagcttagtgctttaggcgcccacggggtatatgtcttagggtcttcaccactcttcccactcaccggcactagaaattggctagatcattggtttgactagtcatttttgattgtcctaagtcacctaaccgtctcttgagctttagtttccccatctgtaaaatgggcttactgataataccttgaaatcatctttttcttttttttttaagattatcttgagaatcaaacgaaggctctgttctgtaaattaaagtggtatacgaatgtgaggtattgccaaaacttccttcctctcatgctgtatatatagttctccaaggtcggggtgaggaggaggggcatagcttcaaaatccccacacccgtggcaactccgttatttttgtcattatctttaagttcagcagtgatcactcagttggaagcttttcttgaagctcattgggaagatctttgtgtgttggttctttatcagtgtttatcttgcagggtttatgcatgggaaatactttgttggtatattctaagccattagttcttaatttggggggcacaaggacccctttgataacctaagcaaagtaatcttgccccctccatcaacacatttgcacatatgcacatcctttggagagatccatggatcacggaatcccaagttaatatatactagtgtaaaaccctgcagtgattattctacttccaaaaactaacgatacactagatttgatcataaaatcttactttagggtaaacatttaatgagaacttgctggggttgctgaaggtgattcatccgtcggaaatccatctgcagttc

SEQ ID NO: 76874 - DNA, 4282 bp, Homo sapiens
tcaacatttatatataggataatgaacttttatttttatttatttacttatttttgagatggagtctcgctctgtcgctcaggctggagtacggtggtgcgatctcggctcactgcaacctccgcctcctgggttcaagcaattctcctgcctcagcctcccaagtagctgggactataggcacaagccaccatgcctggctaatttttcgtatttttaatagagacagagttagccaggatggtctcgatctcctgacttcatgatctgcctgcctcagcctcccagagtgctgggattacaggctgggattacaccatgcccagccaggataatgaacttaaaaagaaaaattatctgaaatcctactgttagacctagggacagagtgaagttaattaattgcctttacccacctcccctgccattgtttagccagctgaggaggctcacttcattatgtttacaatgcttttgtttttttttagagtcaacaaacactcgggtcctatacttcagcatcttttcaatgttctgtctcattggactagctacctggcaggtcttctacctgcgacgcttcttcaaggccaagaaattgattgagtaatgaatgaggcatattctcctcccaccttgtacctcagccagcagaacatcgctgggacgtgcctggcctaaggcatcctaccaacagcaccatcaaggcacgttggagctttcttgccagaactgatctcttttggtgtgggaggacatggggtaccacctacacccaacaagtcaatgagggacttctttttaatttggtaggattttgactggttttgcaacaataggtctattattagagtcacctatgacaaaaaataggggttacctagataatgccaaagtcagcatttgtcctgggttcccttgtgtgatctgtttggactatgttttcttttcttctcccacttgctcagcagcttgggcttccattctagttcttttaccaagatttttgtgtgaccatgttgacttcatttggattgccctctttcaatttccttgtgaaaacacccttaactttctctttacccttagctgaaatgtttacatagcttctggtgatatcttttcatgattttatatctcttaaaatggtgatggatgtgacacctcataaaagtgagctttgaactgtagataactcttaaagaaaatgtcattttagacaattaaaatatttgtgctcaactgcttgaacttttttcgtgtatgtgtatttaattctatgcaatattatcacatgtgtagattcatgtgaccaccatcacaagagacagaacagttctgtcacatggatcccttgcactgcccttttacagccgcagccacatccctttcttataccctcaccccaacctgtggctaccactgttctgtcctccatctctgtaattttgtcatttcaagaatgttgtatgaatggaatcatacagaatgtaatcttacgaggctgatcttttttcattcagcataattcccttgaaatccatccaagttgttgcatgtatgaatagtttcttcctttttttcttttaaaaatgttttatatatttagggggtataagtacagatttcttacatgcatatattgcatcgtggtgaagtgggggcagttccttttgattgctgagtagtattccatggtatggatgtaccacagtttgcttaaccattcacccactaaaggacataagagttgttttcagttttttgccctaataaagctgctgtgaacattcatgtacaggtttttatgtgaacatacattttcattttctgggataaatgctcaaaagggcaactgttgggttgtatggtaaacacatatatttttgtaagaaactaccctactctttttccagagtggctctactttttacatacagccactcatacaattcagacagcaatgtatgattgatccagtttcttcacatcctcaccagcatttggtattactactattttttatcttaaccattcacatagatgtgtgtaatgataccacatgtggttttaatttgcatttccaatggctaatgatgttgagtatctttttgtgtgctaatttgccatctatgtatcctcttcggtgaaatgtcttcatgtcttttgtctattttctatttaggtcatttgttctttttactattgagttttgagaggttttttatatatcctagataaaattcctctgttagatatgtggttgcttgaatttttaacataacttctaccaaggaaaaataagtaaaatttccaacccttgcatggccagtcacttacttaattcctgtccttcagtgttccatctagagaattaagagatatgatgtataaaatagacatcgagggccattaagagagtaaatacttaaaaatacatgttatgaaagcaaagccaataatcactgtaggagtatgagttgcctaagggccaaaactaatgtaaataagagaaagtgtggatataaatgaccattgtttataaacagttatgaaaaatgctgtgacttgaaatctttcccacatctcccaagaaagtaggtaggagtttatcctttccgtaatctctttttaaccctgctgactattacagggcttgtttaatcacagtggcaagaattacatgtatcttacagtaaagaaacagaatactggaatcgttagagaaccctgatgtgttgacctggataaagtacaaaggtggaagagggaatgagttatgctgttaaaatctcaggctattctgttaatgttcctgctactatgaacccaaactttttttttcccccttttgactccttgtgtcttcctctcctgtggcataaaagtagttctgtcgttaacttgtacaacattgccatctgctgttgagaattggtaggtactgcttctgagaacctggctgcagatccttagcataggcagcaaatgttgagaaagtctatctgtagtattacatatactaagttacagaggatgcatccaagtagagaaaataatatgtgggttaagatacatccttaaacttttttttttttggggggggggggacggagtcttgctgcaacgcccaggctggagtgcaatggcactatctcagctcgctgcaaccttcacctcctgggttcaagcaattctcctgcctcagcctcctgagtagctgggaatataggtgcacaccaccatgcctggctaatttttgtattttcagtagaagcagagtttcaccatattggccaggttggtctcgaactcctgacctcaagtgatctgcctgcctcagcctcccaaagtgctgggattacacgcgtgagccaccacacccagcctccatctttaaacttttaaatgtgaaatttctatcatgtaccgttagcctaacaagattttctttcctatttctgactggtgcctttcccctttttaggagcaacgaaagctactctcttagttatgttcttgtgatgtgacaaaatgtcaagaagataggagaagagaatattttatttcgttgatgcttttgttcccaagtgtgaccctaaacttaagctttgtaggagttgacattctttcatgtcccttccctttactcatgccgaaactatcaactgggacattttgtgcttttggtttaaaagttaattgatattatactttggttttatctaaaaagtaaatgtatttgcctttgacaaaagactgacacaagagcaaataagctttaaaatcgggtgttatgtgctttcctccatttttgagcatattatccaaaatggtctgtataatataaatgagaatgatgcagtttaagtaagccttgttataccattgtcatggacccctgtcataaagccatttcttggtttgtttgggaaagaggcatatgggatttatacagattcacttgtaaatgttggattggggatttttgtgtaaattttctcaaataaaggctagcagaaaccattttaggtgtactgttactcttgagtacttctatgtctggattggtgataattcttccatatttctcttttaaattatggcaaattatacctgatgaattagagaaaaaatattgttattcttcagttactgcagatcgatagtttatatgagctagtaaaagattatcatattttgtatgtaatatatgtaaattatatatatatatataattaagaatccttaattatgcatcctcagaccaaatatggttctg

SEQ ID NO: 76875 - DNA, 1052 bp, Homo sapiens
gtgacacagtatgtgttgtagggcttcagggaagacagtgtggacaagagtggttgaaggaggctttcaaggaggcttgaaagataggtcagatttgggtacagagagcataaatgcttttggaagtcagggattctgttctcgaattttacagcagagtttggcagtttaaatgctgtgatcaccctgggtagggagttaagagaccatggtactgttaattttggttggacacccaaagggctgagtaactttatggaatctttagtttcctcatttgaaaaatgagggactcactgcaaaatgaagcaccttgtaactataacatcctttgattatttaacaactacatgcagcttgccagggggatatcaccccctattggagaacctgtggtgcacattgtcttacagacttggcaaaacatacctcatgcttccagtgatgaaggagagtagaatagaataccagcctgccttcatgaaacatgtataatttggcatttttacagatactctgaacagttcaatcaactgcttacaagagcagaacaacagaaagtgggaattttgatattgaggattttttagctttttgtactgtgatataaagcctcaatgctatgtattgaatgcttagtccagagcaagtaaagagcgtcttcttgagaatacttaccatgatttgttttaaaattttactctgttgccctgcaaaaataatagcaatgggaaacccaggaagtttattagtcaaactttattagtcaagcaaacaggacaacttatatagatccttgtggcctaatatagcttgttcatttcacctttgattcaggaaaaacttagtatactcatctggttttctttattaaatttctagtacttacagaataaactcacatagacttggattctaatgccaactgcaccaagctgtgatactttgggcaaattatttaatacctcagagccttagtttcctcatctgcaaaacttaaggataaaaatattcaccttatagggttacgaggattaaatgagattacaaaa

SEQ ID NO: 76876 - DNA, 1093 bp, Homo sapiens
cccagctaattttttgtatttttagtagagacggggtttcaccatgttagccaggatggtctcgatctcctgacctcgtgatctgcctgtcttggcctcccaaagtgctggcggattacatgcgtgaggcaccgcgcccagcccaagggtatttattaaataacaacacatcaatgccctattagacagtagacatagctagttcccctcaaaaacagatgacattattgtgggtttatataaagaatgctttggacacagctgtcgtatagcattttagaacccctatacctcctggaatttccatcatccttggactttatagacattaggaaaggggctttatctttcctgaccttttgcttaacccaagaggggaatccctagcccaaagaaaaccacggtgcttcctttgcctgcttcctgcttcagacgtctgacatgtcctaagcctgcctttacgcatgtagttacaacacagctccaaggttctgcttcttaaccaagaaactcctccccactactttctttaacatctatccccaccctcctgcccttcacccctgctccccagcagcagaccagattgatgtagaggaggaatggctatgacacagtccgaagaccagccctttcttcagtctgcagcaaggctgccttgaaccttgcttagaaatggctgttagctggcagggcacggtggctcacacctgtaatcccagcactttgggaggccaaggtgggtggatcacccaaggtcaggagttggagaccagcctggccaacctggcgaaaaccccatctctactaaaaatacaaaaattagccgggcatggtggcgggtacctgtagtcccaactactcgggaggctgaagcaagagaatcacttgaacgatttaatttcaggcccttgagataatggagaggctttatctccagaggatttggaatctttggcatcagcattaagattcgggaatgtggcatacttctttaattttcatgtccaacacatctctccctcatatctgtggactcataattctgaaatcccatgtggtcctgtaagattgaatagtaattgtaccacac

SEQ ID NO: 76877 - DNA, 1083 bp, Homo sapiens
tatctggggcatggattcagtgctgtttagtcttgaacaactgttttgtgtttgggaaataacaatagtcaaagatagtttttagttaaaataatttcaaactttcaaggaagagggcaggatggaggaaaaagctgcaagagactaggaatggtgataatagaaatttgatgctgataagaagttatttattatagactaataaaaactgacacttatttgggtgacagggagatggaggtgtacacagaatgaggagaaggacaacagcctttttcatctctgcgagacttgggggcagcacaaaagggttcttcaaatgaagggcacctttgaaaaaccacaagaactatttaagactagataattgatctttacagaaagataagagtatttttacccaacaaaacagtacgtaagggcatgaaggaggagtggggtacaggaaatagaatgggcttttgaagaatgcaaactaagtaaatgaaggaaaattggtttaagtgatttaggaaaattgtctaggaatagtggaacagaagttgctctctctttggacagcactttggaagggaaatatcctaaaatggaagaagattggaaatgactggttaattctgcaacaggaagtagtacaacagttgcagctctttccttgttcaaatcctcaattgaatgaaactaggtagcgttatttagaggcagtaaataggagcaagtgatacagttgtgaatgggagacagtttccggtagagaattttcaattgtttgtttctgtttccaggctagtttaatttaaataaataaaacaagaagacctctttatttgatgaacttgagtaaattgaaaaatttttttaaaccttcatgattcagaagaatcttaattatatttaaataagattatgttaaagtgcttttataagatataaaacactagggagaatgttctcattattataaggtagaagaataggtaaaatgatttccagtttgtggttactgcttctgttcccgaactgtggaccattctcagttgaatttgtactctgtggaattttacctattgtaatctttttctc

SEQ ID NO: 76878 - DNA, 1036 bp, Homo sapiens
ttccctcaaaatttgacagggcaaccttttcagatgtggaaatacacattttcagccgaagttgttgcctactatctcttgatttatatgccactcaatttcacactgttttgatttttgagttttatttcccaattcaataagcctgtgtggtttcccttctgttctgttcctctgtagtaccagttgcagtatcttgtgtccttgcctgctcagagatgtttgccagcagcatgttcttgttgctttccggcaccccacacagatagaggctttgtctggaatgtttgtgattttagccagagccaggaattttctgcaactgagcagggggaggagttgtggctgtttccctctattgagagggtaggggttctgtagagggagggcgggcgggtgggtgggtaatttcccagaattttaagtatttcacacaatgattcctttgatttctttctcaggaacagggcggatacctgaccaactcgtgatcctagacatgaagcatggagtggaggcgaaaaattacgaagaggtatgtcctgctctaacagccagaggaggcagcagtgtgctatgctgtgaggtttctgtgacctcggcaggccaacaggctgtgctttgcccaaagggctgtggtttcttagcagtcttgtgacagccagccatgatcttactgatacaaaaagtggtattaacagccttagccgggcgcggtggctcactcctgtaatcccagcactttgggaggccaaggcgggtggatcgcctgaggtcaggagttcgataccagcctggtcaacatggtgacaccaagtttctactaaaaatacaaaaattagccaggagtggtggcgtgcgcctgtaatcccagctagtctactcgggaggctgaggcaggagaattgctggaacctggggggcagaggctgcagtgagccgagatcgtgccactgcactccagcctgggcgacagggcaaggctccatctcaaaaaaaaaaaaaaaaaaaaacagccttgaagaataattctggc

SEQ ID NO: 76879 - DNA, 1137 bp, Homo sapiens
tatttgctgcctattcttactacttttcttattttagatcacagattctgctggccatattctctactccaaagaggatgcaaccaaggggaaatttgcctttaccactgaagattatgacatgtttgaagtgtgttttgagagcaagggtgagtaatcaagagtgtttctctggattaagaatcttctccaactctaatgctccttaatacagtcagcacttaatatctagtttcatttgtattctttatttattctgatttggagacctgttaccttgtagtctttggagcaccttttaaaaggtcgactacatggaataaaagattgaataggtggaacagagagaatttttagggcagtaaaaatattctgtatgatactgtaatagtggatacatgtcattatatggttgtccgaacattacatttggaatgtacaccaagagtgaatcctaatgtaaactgtggactttggtagatagtgatgtgtccatgtaggttcatcatttgtaatgaatgtaccactctggtgggaaatggtgataatgggggaggctatgcatatgtaagaggaagggggatatgggaaatctttgtgccttcctctcagttttgttgtgaacctaaaactgctctaacaaagtgaagtcttaaaaaaaaggctgggcatggtggctcatgcctgtaatcccagcactttgggaggccaaggcaggcagatcactgaaggttaggagtttgagaccagcctggccaacatggtgaaaccctgtctctactaaaaatacaaaattagctgggcatggtggctcgtgcctgtaaccctagctgctcaggaggctgaggcaggagaatcacttaaacccaggaggtggaggttgcagtgagcaagattgtgtcactgcactccagcctgggtgacagagtgagactccatctcaaaaaaataaacaacaacaacaacaaaaaaaactggccgggcgcagtgactcacgcttgtaatcccagcagttgggaggccgaggcgggcggatcacctgaggccaggagtttgagaccagcctggccaacatggcgaaaccccatctctactaaaaatacaaaaattagccagatgtggtggtggcacatgcct

SEQ ID NO: 76880 - DNA, 2256 bp, Homo sapiens
tcacatggtcaggagttcgagaccagcctggccaacatggtgaaaccctatctctacttaaaaaataaaaaattagccgggcctggtggcgcacacctgtagtcccagctacttggggaggctgaggcaggagaattgcttgaacccggaggtggaggttgcagtgagctctgatcgtgccactgcactccagcctgagcaacagtgcaaatctctgtctcaaaaaaaaaaaaaaaaaaaagccgggcatggtggcatgcatctgtagtcccagctactctggaggctgaggcacaagaattgcttgaacccgggagtcagaggttgcagggagctgagatagtgccacttcactccagcctttacgacagagcaaaactctgtctcaaaaaaaaaaggaagaaaatgtggttaatgacctaaatatttatggagttctgagttatcaccaacagttataacaataatataacacctattgaatgcctgctatgtgacaaacactgttccaggcagtttacctgtataacatttaatcttcacagtagctgggcgtggtggtgtgtccttgtaatcccagctactcaggaggctggcacaagaggatctcttgagcccaggagtacataaccagcctgggcaacacagtgagaccctatctaaaaaaaaaaaatcctcacaataaccttatgatgtatgtacaactgttgtccttattttacaaatgaggtagacaagttaaggaacatgcccaagtgtttacagctggtaaacggcacacctgtgatttgagcacggaccagaaagtctgactctagaaccttccatcttaaaagtactatgttgtatggtctctcagagagagaaaaggctagctattcctgtttccgttctttttttttttttttttttttttttgatacggagtctcactctgtcgcccaggctggagtgcagtggcgagatctcggctcactgcaacctctgcctcccgggttcaagcgattctgctgcctcagctgcctgagtagctgggactacaggcgagtgccaccatgcccggctagtttttgtatatttagtagagacagggtttcaccgtgttaggcaagatggtctcgaactcctgacctcaagtgatctgcctgcctcaacctcccaaagtgctgggattacaggcgtgagccaccgcgcctggcccgtgagttttttgtttgtgtgtttgttttgagacagggtcttgctctgtcacccaggctgaagtgcaatgacatgatcacaactcactgcagccttgacctcctgggatcaggcaatcctcctccctgaggcttctgagtagctgggaccacaggtatgcaccaccacaccaaactaatttttttttttttaattatttttagaggcagggtcttcctgtgttgcccaggctggtctcaaattcctggactcaagtgaccctcccctttcggcctcctaaagtgctggcgttacaaggtgtgagccagtgggcctggtggaccttgtgagttttgaggaccctggccaggtattttgtaggttgccctctattgggcatttgtcagatgtttttctcatgataaggtgaggttatgggttttggggaggaagaccacagagataaaatgtcattttttttttcttgtcaaaaccatgattcacttataaagtgtcattttcatcacatcatatcaacatgatttgtcacgttgatactgcccttgatcatttggatgaattagtgtttgtcaggtttcttcactatacaatattcttttctttccttttttcccccttaatgatgttttggtcagtccactacagagtaactcttttttccccctttctattctgtgttctttagaaggaagtcactttatgtagcccacacttaaggagtggggagttatgcttcacactccttacgggtgcctacataaattatttgagaatcttcacggaagatttgtctctcttccttatttatttatttaatcaatcatttatatgtaagtgtagattcatggatgtttactatgtactttggattataaaccagtactataattgttgccctgattgtttcagctttagctattgggagccctttaggttcctgtgtccctttgacatacccgcattcttgtattttttggattttcatttttgtttgtttgtttgttttgagacagagccttgctttgtcacccaggctggagtgcagtggcataatct

SEQ ID NO: 76881 - DNA, 1076 bp, Homo sapiens
gatcacgaggtcaggagaatgagaccatcctggccaacatggtgaaaccctgtctctactgaaaatacaaaaattagccaggcgtggtagtgtgcacctgtggtcccagctactcaggaggctgaggcaggagaatcgcttgaacctgggaagtggaggttgcagtgagccgagatcacgccactgcactccagcctgggcgacagagtgagactccgtctcaaaaaaaaaaaaaaaaaaaaggaataggatgcatgttgctcagtcatcgaaatgaaccatcctttttatcaataacgatcccatgaacccttacttatgccagactttttctgtagggagaaatatggccctttcagcgtgaatttaacgtgactgttgttcactgggttagaaacaggtcaataaatagatggttcagtacagaaggctaattggtacattgacatttaataatataaatcgaatttctttttgtattatatacaaagttcctagcttttaattataacttgacctttgcgtccttctccataaaagttaaaggatacattgcttcatttaaatctctcttattcagtaaacagttgtctacagccttccctgttttgaactgatctagagaagggggctgcttccagtttgaaattgctacaccatatctttatgctgacttctgaagactgagtctggtttctaggaaagtggaacaaatatataaaggtaacccagtaggggtgcagtgacttctatgctgtttcttgtgtgaattgctgactggtagtttgatcctgagccattgcccccatatgcatatagagcctggcagcctggacagtagagccctctgtgaaatcagccagctggccacagacctgaacttgggctcccaaacaagtctccgacttgagggaggttgatgtcatctgctttatcctgtgctcccaacctcattgttcaacataaaatgtgggaaatcaagggaatagttgttaagaaagaacaagactttgtttgtgctcataatgaaagggtcacgctggaggtttttaccgtaaataactttggaacagtat

SEQ ID NO: 76882 - DNA, 1071 bp, Homo sapiens
agccaccacacccagctaatttttgtattttagtagagatgacggttcaccatgttggccaggatggtcttgatctcttgacctcgtgatctgcccgcctcggcctcccaaagtgctgggattacagccgtaagccaccgcgcctggcctcgtttttactttttaaaagggtttcagatataataagaccataacttatgttaaagtagtggaacccagtagtgtggtaatacatgtaatttatttctactttatttgggagagacaaactattttcagggcaattaatctgtgacccatcattttattattctgtttgggtatcaaactctctacccaggaaaatagtgatggcatgattttagaagcttagatatagtgtttccggggtgggagatcatgcttccaactcttcagaggatgttcatggactcagggaatttcagcaatgaaagagaccttgctctcatctcgtgttgctgtctgatttgttcttatattttaaagcccttcagtggctcactattgcttattgatagtttaaatttctcaacatgctttgttgtgctcttcatgatctgtttctgagctatacgtgtggtcacttcccactttgcattctacatggagccaccctggacagtaccctgaactcacttattttctgaactgtttttgtttatgccttgacctacttactagactgttagtatcctcagggtaggaactattttcaggttcatcttttctagaatgccaagcatgttaccttgcttctagtaagtactctataaataacaggaactgtagtttagcatggccttatgggaattacattgaatttagggctgctgaaggcacctcaacagcaggactttaggccgggcttggtgggtcatgcctgtaaccctaactctttgggaggccgaggcgggtggatcacctgaggtcaggagttcaagaccagcctcagcaacatgctaaaatccagtctctactaaaaatacaaaaattagctgggcatggtggcgtgtgcctgtaatcccagctacccgggaggctgaggcagga

SEQ ID NO: 76883 - DNA, 2057 bp, Homo sapiens
gccggtgggcgggcccagcgaagggccttgtggctgtttcctattggggcttggttgctatggtgtcactcgcctttaaactcgtgggtacatctttcggaaattaaaggagaattacttccagggctgcccatacttgccatggccgactcagtagtcactaacttcaacaaaaataaaactgttgcaatagtattctattaaagcttctttaactgcttaaacttgcggttttgacatggtacctatcctttcttcccttttcaaaagattcgctatagagtctttctctacatgccagtctccaaaatggcgcggacggcatcagaaggtcagaggtgagtcacgtgggtccccccggttccggcgcggttgaggccttcggtggtgaacgagtctccagcaccatgtctggtttgtctggcccaccagcccggcgcggcccttttccgttagcgttgctgcttttgttcctgctcggccccagattggtccttgccatctccttccatctgcccattaactctcgcaagtgcctccgtgaggagattcacaaggacctgctagtgactggcgcgtacgagatctccgaccagtctgggggcgctggcggcctgcgcagccacctcaaggtgcggcattgggcgacgtggggccgggagggaagacggcaggcttaggcgaggggaggctcgggttcgggggagtcgggccggcggaggcctgggagttgttctggcctcccgggagcgcaaaggacgtgcggtggagcccgccccctcaccccgctggttgcctgtcgcggggcggggcgggtcaccaacgcctgggaaccccaagaagggctgcgaggctttggcggatgtggtgacacctgagctggggcggttgtcaacgtcctataccagttttggtctcagatacattgaaccgtaatttggttctccaaataaatgttggggtgttgaatatttatacggattggcatcataagataccgcgatacctgcaggaaagtaaaggagacagagctaaccgtgattaataaaatgttatttattgagcatctgctgtgtcagttactgtgctactttgcatatattaccatttggttcatgcactaccctatgaagtaggtaggtactgttagccccattttacaaatgaggaaactgagactcagaggtaggataaactagtaagtgtcacagatggaatagattcttttttttttttcaaaattattattatactttaagttctagggtacatgcgcacaactttcaggtttgttacatatgtatacatgtgccgtgttggtgtgctgcacccattaactcgtcatttacattaggtatgtctcctaatgctatccctcccacctccccccaccccacgacaggccccggtgtgtgatgttccccaccctgtgtccaagtgttctcattgttcaattcccacctatgagtgagaacatgcggtgtttggttttctgtccttgcgatggaatagattcttacttagtttggtagttaagtatgttgagggaaaagcgctgcaaccttattccttccttgttttaaatttgtaatttctgtagttgattaaagtcgattattggttacaaaatggtctcagtctctagtcctttttctttggtatgccagaatctggacttggctcttttatgtaaataccaactatgctcttggatggtgacaactactgccataataccagtttgattctgttttgtagctaagagtagcctggcctggtctttgagacattaatataatttgatatctgtcagtatttggttgcattttaggtaattttattcattcacaataagcaaagtgtctttttttttctttgtaacacaatggggcttttgttatactaaatagaaacatttttactttttttttttttttttttttttttgagacggagtcttgctctgtcgtccaggctggagtgctgtggcgcgatctcggctcactgcagcctctgcctcccggtttcaagcaattctcctgcctcagccttccgag

SEQ ID NO: 76884 - DNA, 1776 bp, Homo sapiens
ttctccagcatgggctcgcctgtcaacgcgcaggtaaggctggcttcccgtcgccgcggggccgggggcttggggtcgcggaggaggagacaccgggcgggacgctccagtagatgagtagggggctcccttgtgcctggagggaggctgccgtggccggagcggtgccggctcgggggctcgggacttgctctgagcgcacgcacgcttgccatagtaagaattggttcccccttcgggaggcaggttcgttctgagcaacctctggtctgcactccaggacggatctctgacattagctggagcagacgtgtcccaagcacaaactcgctaactagagcctggcttctccggggaggtggcagaaagcggcaatcccccctcccccggcagcctggagcacggaggagggatgagggaggagggtgcagcgggcgggtgtgtaaggcagtttcattgataaaaagcgagttcattctggagactccggagcggcgcctgcgtcagcgcagacgtcagggatatttataacaaaccccctttcaagcaagtgatgctgaagggataacgggaacgcagcggcaggatggaagagacaggcactgcgctgcggaatgcctgggaggaaaagggggagacctttcatccaggatgagggacatttaagatgaaatgtccgtggcaggatcgtttctcttcactgctgcatgcggcactgggaactcgccccacctgtgtccggaacctgctcgctcacgtcggctttccccttctgttttgttctaggacttctgcacggacctggccgtctccagtgccaacttcattcccacggtcactgccatctcgaccagtccggacctgcagtggctggtgcagcccgccctcgtctcctccgtggccccatcgcagaccagagcccctcaccctttcggagtccccgccccctccgctggggcttactccagggctggcgttgtgaagaccatgacaggaggccgagcgcagagcattggcaggaggggcaaggtggaacaggtgaggaactctagcgtactcttcctgggaatgtgggggctgggtgggaagcagccccggagatgcaggagcccagtacagaggatgaagccactgatggggctggctgcacatccgtaactgggagccctggctccaagcccattccatcccaactcagactctgagtctcaccctaagaagtactctcatagtttcttccctaagtttcttaccgcatgctttcagactgggctcttctttgttctcttgctgaggatcttattttaaatgcaagtcacacctagtctgcaactgcaggtcagaaatggtttcacagtggggtgccaggaagcagggaagctgcaggagccagttctactggggtgggtgaatggaggtgatggcagacacttttactgaatgtcggtctttttttgtgattattctagttatctccagaagaagaagagaaaaggagaatccgaagggaaaggaataagatggctgcagccaaatgccgcaaccggaggagggagctgactgatacactccaagcggtaggtactctgtgggttgctcctttttaaaacttaaggggaaagttggagattgagcataagggcccttgagtaagactgtgtcttatgctttcctttatccctctgtatacaggagacagaccaactagaagatgagaagtctgctttgcagaccgagattgccaacctgctgaaggagaaggaaaaactagagttc

SEQ ID NO: 76885 - DNA, 1299 bp, Homo sapiens
gagctggagcccctgtgcactccggtggtcacctgtactcccagctgcactgcttacacgtcttccttcgtcttcacctaccccgaggctgactccttccccagctgtgcagctgcccaccgcaagggcagcagcagcaatgagccttcctctgactcgctcagctcacccacgctgctggccctgtgagggggcagggaaggggaggcagccggcacccacaagtgccactgcccgagctggtgcattacagagaggagaaacacatcttccctagagggttcctgtagacctagggaggaccttatctgtgcgtgaaacacaccaggctgtgggcctcaaggacttgaaagcatccatgtgtggactcaagtccttacctcttccggagatgtagcaaaacgcatggagtgtgtattgttcccagtgacacttcagagagctggtagttagtagcatgttgagccaggcctgggtctgtgtctcttttctctttctccttagtcttctcatagcattaactaatctattgggttcattattggaattaacctggtgctggatattttcaaattgtatctagtgcagctgattttaacaataactactgtgttcctggcaatagtgtgttctgattagaaatgaccaatattatactaagaaaagatacgactttattttctggtagatagaaataaatagctatatccatgtactgtagtttttcttcaacatcaatgttcattgtaatgttactgatcatgcattgttgaggtggtctgaatgttctgacattaacagttttccatgaaaacgttttattgtgtttttaatttatttattaagatggattctcagatatttatatttttattttatttttttctaccttgaggtcttttgacatgtggaaagtgaatttgaatgaaaaatttaagcattgtttgcttattgttccaagacattgtcaataaaagcatttaagttgaatgcgaccaaccttgtgctcttttcattctggaagtcttgtaagtttctgaaaggtattattggagaccagtttgtcaagaagggtagctgctggagggggacacaccctctgtctgatcccttatcaaagaggacaaggaaactatagagctgattttagaatattttacaaatacatgccttccattggaatgctaagattttctactgcttctggggacgggaaaccgctgtgtaacagcttttgtgggaatacattttttctgtttcagtactcgcagggggaaatatttaaattttgttgtgcta

SEQ ID NO: 76886 - DNA, 1876 bp, Homo sapiens
acttgagcaatcagagccagggttgagggcaagctacattcttttctgcctttctgctgcaggatgcagtttgctttttttccatgcgaatgaattatgtttgaaaccgaaatgggaggaagagaaaaatggagtgagtgtatatgggtatgtgtgtgtgcatacctatataggcaggggagggcagcaggcacattatttttccattttcctttaattaaggctctgtggaggtgtgtttgaaaacagagggtctcctatgcctttgaggagggtgagaacactgttttggctgcgtcccgggccatatgcagcgtatggtggccaatgaaaccgggcctggctcattctgttgcttgtcttggcagtcggttccgtggcttgtattaccagctctggaacttaggggctgccaagctccatgtgcctgtgtatgtgtgtgtgcgtgtgcatgtgtgtgcacatgcgttcttgtgtgtgtgtgtggtttggcctctcggaactcagcagagacaaatgccttagcgacccagtcttggaattttcagactgtgtttctttacttattgctggctgtgggaggcctggccagagcccaccattcttagttgttgttgttttttagtctgttttcttgctgcagcccacgggatttagttgcagagctccatttgcaaagcttcagctggccagtggcattttttaaaaaaaagaccagggcgattatcacaccttgtgtgtgtgtctgtattaggtgtggtagtgttaacccctgccagccaccaaggaccagagctggcgtgaagtagaagggaaaatagaaagcttgtccaatggttgtacgctcccagcttcctcttgctgcctgggttaaagattcctggcagagataacttcatatgtatttattgagcgcctacattaggcagaggacaaagcgatgttataggcaaggccttggaagcatttctctggtctccagggaagagcaggagttccctgggggttggttccaggttcttctatggctgggatggctgtgcagggatcacggctgccagtgttcagtggcttctcttgaacccagctaccgctccttgtcttcttatgaagcagtgcagggatggagtagagggcacaggagatgctggctgtctgccttggggcagaaatggaaacctagttcttgatggcaccttgttgccagtgtctgtgcagctgtgttctggcctgcagggtggaggagaccttagaggaaaccgaggccgagggcaggtgctgggccccatttctgcaccttctacccagccctgacctggcaccctttgtttctgttctgcagtcaactgccaggatgcaagatggtcctgcccccttggggtttagagctggaaagtgggagagcggagaatcctctggggagaatcctcttcatggctgcaggaaacagagactagtccagaagggaccttgaggggtcatctggcactagtgcccctccaggaaggaaggccctggtggccacactgacttcactcttactatgtgcaggcactgttccaggtactttccaagtattaactaatttaatcctcttgacagccatacagggcaaataacattgttattctttacagctgaggaaagagaggcacagagaggttagggaacttgcccaagggcacacagctagtaagaagggacagagctaggattcacactcaggtgatctggctccaaaaccgccactcttaacccccccttcctcttggcctgcagagctggggacagccatctgaagagggccttttgctgctcgccttcactctcagtcttggggccttccccatcatcttgcttctcgccttctggatct

SEQ ID NO: 76887 - DNA, 3351 bp, Homo sapiens
agtgtgggagatgatttcacctcttgtcatctttcctaagtcttccttgaagtgggtaagttccttctggctgttactggttccttggtgctgccacctccactgccccccactcccccttttttatagatccctaaatcacatcaaattgttttatttttcaaatcactaaagttgcctttctgccttagatcgtcagccagctctttgcagttaatgaggatccaattatgaaaggcagctgctcagctcctccatcttctatcccccacccccagaaatgtttaggatgacttctggctggtgaatatcagctgttgtggttgtctcctaggaatggcatggctgagggctttgtggtttatatctgagcagttaggggctcttttgcagggggaggaaagacagggggacttttgcttctacaaaggaaagactagtgccttgtctcctgggtgaggcttgtcattgggatggattcacaggcgagcagaaatggcaaaatttatggggcccgtgctcccagggggtggccgctccttcagggggttccacagtagcagaaaatgcattatattttgggatcatttgttagtgtctcatttctaccatctgtatgagaataaacagaagctgcaaacagagcctatcattcccggaacagaatggggtctggcttccatctcccagagatggaaggcttaggcagggaaatacacagaagcctctggagtgtttttcttggggtctactgtgggaatgaataacttggaggtgaaattacagcctgataacgagcatctaagcttccagagatggattcttacaccatttgctgaattttgctctgctgtgaatttgctgtcatttgttcattcatttattcacttagttattatttcaacaagtattattgatgatgctttctgcgccagaaatgatgctaagcactggggtcacccgggcaacaaccagccctgactgctgcttaccacctggaatcacagcgctgctggccgcgtggccacatggtttgttcccggcacagttttgctacaaggaataggtcttcctgctggccccttccctgttctccttagaggaggccaggggagacgtgcagctcatctacagggccctggagcggcctcctagcgtggcaggctgcagccctctctgcattgcaggttccattccagagggctgagagggagctctcttactgccactaggctccagtccagctcagagtttgggggatcagagaacattgaacacccacatgcgagaggtctcaggggctatttctgtgtctgggctcccatgcaggctaccgtggagttattcagggaacttcctaaacctggatctccatggggggtggagggtcctctgtgcaagacaatgaccctctactgtgggctggtgtctgaaagcccaccgtgagaaagtcattccttctgctgaaggcgtcgttacctattggaccccagaaagggaaacaaagaaggaagggtgagaaagctttggtctagaaccctgggaccaggagtcgagccctggctccaatcctctccagctgtgtgaccttggggaggccatttagcctctctgagctttagtttcctcctgtcaaaatgaggatgtggtttagatgagcacagggcctccttcagctctaaaactgtaactcaatgtgattgagcctcagatctttttctgatggcccaggggacacggggtgaaggaaggagagaaaggatgtgagtgggaaggagtgctaagaggaccgggtatgggaggcacagtaggtagagcacagttagaggagcctgaggacaccaaataaaaactctggggcaagccagggagctatgggcagaggctttatgacagatgcagcaggcatgctgaggatgaaatggcgggtccacttcccattcccaggcacctcgctttagacaccttgctttagacaaagtgatggccagtggaaacctttgtgcttgagggtgcaagttactcacatgctttttctcttagagaaatagaacttattgggaaatagactctggacttggacagggaaccaaatttcaccttcaaaagtgaaatgtagatggagaatatggcttgcactcttggccaaaacaggttcacaaatgcccctctctggaatgatctagacctgggaagctgaatgggggcaggtggttgtgggtcaccctccaaggccactcctgcaggagacagagagcccaagaaccatgtggccatctgagtacattaactgcccaacggagaagtattgtccgatggacatcagatcttccctcttctgccaaatacatctctctccatgggaagagacaggtaaagatggaaggataggccaaagattttccctcaggagtgctaagccagcgaatattttgattttatggccctgggcagaaaggtgaaaagagggagaaatgatttcctttccaggactagaatctaagagcagttttgtactaacatgctacttaaaaggctgcttcaaagctaagactgcacatctgacctccatattcctagtgcctgctggcctatagtaggtggtcagtaactggatggatgggtaggtaggaggagccctttaagggactggctttattggcagaccagctttcttcactgccatctgtgccttgaaatgaccatttcttacccatgagcttcccccagtaaagggaaggaagaattcccttggtgttgacctgtctaatttacatccttcttccatgtctgaatctgtcttcccttgtacacctttttggttgggcagagctggaatatgtgtttgctctgagaatgaagagaacatggaggtagccgggcgcagtggctcacgcctataatcccagcactttgggaggccaaggtgggcagatcatttgaagccaggagttcaacaccagcctggctaacatgatgaactcctgtatctactaaaaatacaaaaattagctgggcgtggtggcaggtgcctgtaattccagctactcgtgaggctgagacaggagaattgcttgaacccaggaggcggaggttgcagtgagctgagatcgtgccactgcactccagcctgggcaaaaaaaaaaaaaaaaaaaagcatggaggagttttctggtactgggttccacagggaaagcacatgctaattaattccacctgctttgcctcagtcccttcctcatagatagcacacacactcacctttaacttagatttgcttcatctcctactcagggtgtcttaacaaatatgcagaataggatgtgtgattggaggggaggcaccatgcca

SEQ ID NO: 76888 - DNA, 1067 bp, Homo sapiens
ggccatctctctggggtggtgggaggattggggagataatgggaatgggaatgtgtacatgttttgaaaagtagacaagagaatgccaatattaggttatcttttaaaattgttatcattagtcacatcgtgacctccacccctcttggccctttctgcagctgaaccagggaacttggaggaagagtagcgtggcctcccttcccaagcagctgccagagctaggcatggcctcggtcagccagcagtgtccgccttagatggcgtttgcccgggacccacacgtggagcacccacatgtggcatttgcaaggaattcctcctcaggtcccttgcacctgcagctctcatgagccctttttctcggggcactggtgagcagcagcagtccccggcatggctgaggatctgtgcagggcatgcccccggcgacttgcccagggctggccgtttctctgaaggcctgtcccagcaaggttcccagcagcgccgtttcttcagaggcctgccagagtagctgccccctggaaaggaggagcctgtggtgggaggtggggaagaggctgggatcgggagggcgcaggaagcagctgagcatctgggaatggtagctctgcttggagggagagttcacaggcaaagatgagcctggggggagctcggagggctgaagtgctggaagtgctggagagaggactttcttcgtggagaagggtgtctgggtacccgtaggggagagctggggatattaggcaactatctctcagctccccttctcctgataggtacctaaaaactgcagaggactgctgggggcttggctgtggtggcaaactggccgtggtggcaaactggccatttgcaggctggacctggctctcagatgtattttgtttggccggctcagtgttttaaaagaaacgcgaacccccatttcatttgaaaattttgattaaaaaattgtaagatctcatcatacactaccctgttctggcatggtaatggctaagtggggtggacagaggcacttcactgtttcctctttccagtgggccacaggcccctgc

SEQ ID NO: 76889 - DNA, 1080 bp, Homo sapiens
tggagtccaggttacccccatagtagagaagagtttgaggtctagggagggggttcagtcactcagggtcacactgctgggaagtgatagcgctggggcctggtgtggtggacgatggctgccgttacagccgggtctcacttgtgctgagctaagccctaggcacggtactaggtctctttgtgaagtaccttgtttaccctgcacaagtaccctctgaagtaactagtgttgttgctgttgttatacccacattacagatgaggtcaacaaggctgagggaggtccaaggtcactggctgggaaatgagctcaggcagtctgccttgagcccaagctttaaccacatgccgtgtggcctcccatgcctctataccccttccaggcttctaaccagagctctgttgagctggggaggctggatgaacctggccgcagaatgttcgatcattttgatgacattgtctgatgagtgctgagccctgcagtcctgcagccttactgtctcctagttccgagagagagagagagggagagagagagagagagcgagagagcgagccggctgagccgctgtgcgggcagctctgtcagagctggttcttgggttgtttgccttgcagaggccagcagtctcctgggctctgtccaaacgcatggagcaattcagtaaaagaaaatgggaggaattaagttcaacgacaggttttgtgaattataaagtgctttgtgctgatgtcattattattacatggtcaacacatgacgttaaactgttttggtgccaactgcttgcctgcagtccctttgttcaagccatatttgttaagcatctactatgtgctgagcactgcaccaggcactgggaacagagctacagataaagcagtcaaagccttacatctctcggcaccgtatattgcagtgacggcatccaaaagtaagcaaattaatacacgatatataaggtgagttagtggtcagcaccacgaagaaaaattaagcagaccaaggacgtggcagtggtaggactgctcattctgatggttggccagggaccctgggaacgtcatttcctgg

SEQ ID NO: 76890 - DNA, 1017 bp, Homo sapiens
ctgagcagaaaaagttgccccaaaccagctgatgtgctgggtaaatgttggcctaagcatgcttgtgtttttagtgatttgaaacgtaaaggcagcccactgacattttttagcaagctttgcataattggtttttaattgtggctctttggaatagcattggccttcttccccctgactcagatgctttttttgtctcatacttgtttggcagagaggtccaatctgtcctctcttggaacagaatctcccaactcatctttgaaatccgtaatttccactttagttccgttactttgttagcacattttcgaaagctgttagcttaaaaaaaaaaattaaatttgagggagaatgagtgatagttaaaggcagctatgagtgtgtttaacattggcccctgtggtgttgagtcttatttgataccatatccagagcattcacaagggttctgaagcttttatttaaaatcagaagtcggtcacacccactgttatcctagcacagggtcccttggagaggtggtggtgaggacgtggctggatctctatgtccttagcagaaatcagacacctctgaaaagctcaggaagtcttacagcttcttaggttttctattaatatcttaaagtgaggataataataatacctacctcttagtgttgttatgaatttttttttttgagacagattctcactctgttgcccaggctggagtgcaatggcatgatcttggctcactgcagccttgacctcttgagctcaagaaatcctctcacctcagcctcctgagtagctgggactacaggcacatgtcaccatgcctggctaatttttgtattttttgtagagatgggggttttgccatgttgcccaggctgtttttggactcctgggctcaagcgatcctcccatcttggcctcccaaagtgctgggattacaggcgtgagccaccaacccctgttgctgctatgataatgaaatgaactaatgctgctaaaggtttcacatgatgcc

SEQ ID NO: 76891 - DNA, 1050 bp, Homo sapiens
gtaggcttgtgactcacttttcaaatgtgttgatcgtgcaaagtagtttttataattgaatcaaaaacctgtttcttgggcttgtattgacctgagggtattttgtcctcggagatggtgggtggtctgaggcgttgcaggagcagggcacatccaggcttcctaaccagaggggctacttctggggcctgggaagagttctgggcttgggtgcaagttctgggttcaaagtctggctctctcgctcattcccagcacaaccttgggaaagttagctcgtttcctcatctgtaacaggagaaaatccaaactgccctttccaaagtagtacagtttcctgcacatactgcacatggtgactggatccacatcctcatcacagagcttcatcgcgaagattaagtgaggtgctgtgtgaaagatgaccttgactgcagtgcagtatgtccgtaaattacctttgttagagactgattccatgtgtagtgaactacctattctgacagcactaacctttctgaagtattagcctatgacctgggtttcagggaagcaagcagactttccagtttctggttgtttatgcagtttagacgcagctggagttttaattatcataacaaactataaatgagaaggcttttcaagcctctgttttcccctaagctgccttctgtgaccccttatcttgtttcctgtggtgttaatgtcatcgttgtattcccatcaaccaacaatcttttagcagccttaagaagggctgtcaagtcttctgtcaatcctaccatcttactttgatgtttccaggtccaccggcaacatggactcagagttgggaaactgagtcctctcctgggtgaggctcatctggctgaacaactatgaagccatttaagtctgttttccttctactgtgcccaaaaggcacaaggcaacctggcctgaggttggagcatggagatctagaggaactcatggatggattcaggcgggatgtgaaagtgctgggagtgagggcctgggcctcctctgggtttagccacccttcca

SEQ ID NO: 76892 - DNA, 1505 bp, Homo sapiens
aaacagagttcccatgcgatccagccatttcactcctacatatatttcctttcccaacagaaaggaaaacatgtccacacaaaaacatacatgagagtttacagtggcattattcataatagctccaaagtggaagcagctcaaatgtccatgaattggtgcatgaataaataaaacatggtctatccatacaatggattattatttagccataaaaaggaatgaagaactgatacatgctgtaatatggatgaaccttggaaacattatgctgggtaaaagaagccagccacaagagaccacagagtgtgtgggtccatttagatgaaatgtccagaataggcaaattcatagagacaggaagtagagccagtactgtggttacctaggggtggggagatgggaggagtggggagtgatggccaagggatatgaggtttcttttgggggtgatgaaagtgttctaaaattgtagtgatagttgcacaactctggatataatacaagttggtgaattgtatactttaatggacaaattgtatggtatgtgtgagtttgatctcaataaagtgcttttaaaaatggagaataataatatctgccttacagggttgtggggaggctgaaaaggaataatgtatacaaatcccccagtatgtaacaatgttccagaattagtagctagggttattaaaacccccttttagaccagcggcagtgaagaagccttttttcctttttattgctagtatctatccaggagcaaggagaacaatctgataggatttaatatagaactagggaggatatatggtatagaatagcagtttctaactctgactactgattagaattccccggaaagtctttcaaaaatattgatcctgattcagctggtctgagtggggctggcaggtgttctaacctgtagccattagctgaaaacctggtaatccagttaagaaaccagcccagttctttgaaggagcgaggacatctgtgttcaggtcagaagtcatacacaagcaatgcactttatagtttgcaaacttcttttgtagacgtcatctctgatctgttccaacaaccctatgaggtggtgttagtagtatgagttgttagagagctgacgctcagaagattaagtcacttgccagggtctcattttttaaagcataattttatctattattaaaaaaaggcaagatccacacacatgctcatacctattagttatcagacctaacaccttggagagcactgccaaggtgacagctggtgccaggttaatctattttacatagacttcagcacaaagctcttcctgctacttcgcattaactgatgagcatcctgagagtggaaagcaagctgatgaggcactatctattatctgtctatgttttttattttttttgagttggagtctcactattgcccaggctggagtgcagtggcgtgatctcggctcactgcaacctctgcctctggggttcaagtgattc

SEQ ID NO: 76893 - DNA, 1009 bp, Homo sapiens
gagaatggttaaaggatctaaaaccacatttttctcaacacctatctcaagcttcctagatggatccacctgccattggatactcattaatgcttatggttccccgaatctgtgtaaggcaggggttgctttctgaatcagcaaataccttagcgtttccaaaccagttatttccatgtcttgagatgctcaacattgccacgtccacgccctaagggacttcccaattaattacgctgccgagcttgtcaataggctggttccttcattgttttagaaggaagaatcagagaagctgttctcatgccaaaggaaccctcatttgctgccactgacccagagttctcagcagttctggtctgataactgaggatccactccatagccctggcaatggggagctctgtgtcccactctatctgcctcagtgtggcaaagcccttccataccttctctctgcacctaaattgcatccatctccttaaataaatcactcttggtaaaacccctcttccatcctccgggccagatatccctggctgtgaacggtttggccctttcacctcggtagggtttatattagctggtgttcagtattcttgatggggaggttgcctttgccgggagatttgtctgttatctgtgccttgtgcttgaaagaaattggatgaaatgcatgttttagccacacaccctgcatacagattaaatggaactgccttggtagagaataattaagccaaggaccttgtttttcaccttcatgatgaaagacaaatgacttccaaaggctttaataagatggaacttgaaatgttctcctactttggccagcttgggactttcagaacagccttgttcataaatattctgtgcaacgactgcattttcatttaattgtagatagagtcattttgcaggagctcttgtctccatttttgacccagtgtaatcaaggcatattacaccatttgttgttgttaaagagtcagtttcagctgtattatta

SEQ ID NO: 76894 - DNA, 1045 bp, Homo sapiens
ttggcatttattcgagggccagcaaagtttcagaccagtggttctcaactaggactgatttttgcctcccaggagacatttggcaatgtctgcagacatttttgattgtcacaactcagagggagctgtgctaccagcatctagcaggtagatgccagagatgctctaaacacccttcaatgcacaggccagccccacaagtatttagtccaaaatggcgatagcgtaagagattgagcaacttgtatcagtcaaagagcaagcagtagttgcaactgcgtatgtgacaaccagagggcccgtaagcccataagcctgccagtcctcctggcagggtacaggtggagcggcctccccagggggtccccagaaccctcagtgggcccaaccctctccctccaggggtcccgtcttcctcccacagctggtctgaccgaactgttccttggctcatctctgaggtggcagcatgagtgcccgggaactctgagacgggcaggcctcgtgaccagacgctgagagaaaacagcctcactaaaggaaaaaaaaatgctcggggaaaatattaaaaaccagctctggtggtttttggttccacaggctgggacgtgactgggaagctggcctggtcctctgttctgagaattccaagagaggcgcatctcggagggccaggagagacccctcgtgaatccatggaagcctgtgagccctcgggctggggcagttaggtgccaatgtcagccccctgctcactggtgactctctggtgaccttgggaacttctcacaaaccctctgaccatcacggtctccccagcccaagggcttagttccatcttcaaactctcctgagcccctgcctcaaggggtgtcagggtaacccacccatctgtgagtgtttgctgaggccctgctatgtacagtgaatgccctggggaatccaagagccatgagcccccaactggctcttgtggcctttccactgtaaggggaagaagcaatctgtgcaacaaggcagagcttactactgtgtgaccaacagc

SEQ ID NO: 76895 - DNA, 1049 bp, Homo sapiens
attctcacgaaggagaagtgctccgttctgcagtgagcctggccaggggggccacaccacagactcccaggaggcttctgctctgcgtggttcttctgctctcgtttccttaacgattgggccagagcatctctgctcttgtaaaatagcaggcaattagatctcgaagtctttgaagtgggcagattcaccaggcgttggactgaagtttctatttgtcctggcactgagaatagcaaaggaacagggggactgaactggtaaggatatagcaggtttgttgcacttttaaaaaatatgttttcaattaccttaagaacccatttatgtgcagtatatcctgctgctgattttgaacaaggatgatccaataggcactggtattaaaacgctgaaatagaggttgacaagtagctgcttccctaaatccttggagtttccttcctccctccttcccctcctttggcaccaacccccttcccacctccccaagatccagcaactaaaaggttatttgcttggcacggcagggagtaggggctgtgctgaatggtgggaacccacgctacatgggttgtcagctgtgtcacccctaattagacatcatttcaatctactcatgaaagcagcttgctgcaggactctgtgctggccatatttaattagagcagtataaggttttttttttttaagttaaaaactcatattgtattgcccatgtaccagagactattctaagaactttacaaacattaactcatttgatccttataacgaccctatgatattggtggtgtgatatcctcccgttttctaggtatggaaagaggcatagagaggtgaagtctcttgctgatatcttctagaccgggctggctgcagggtctgttgctctcaaccagaggaaatagaaccatgaaagaacaaggtagggttttcctccttctgccaaactgagattcacaaagtggactctagcattcttcctctctgccattccctcccaccaaatttacacctggggaaacagtggcccagagagggaagga

SEQ ID NO: 76896 - DNA, 1109 bp, Homo sapiens
ttgaaacaccacaaagttggtactatttaggcaagtctgcacactccagtccataattctgttgctataaatactgctctctaccccttggccagcatcatttagatgtttgcttatacctgctagtgaataactgatctagcaacatggagaataaacaagggctccaagacctcaagtggaggagaccaggctagagtgaaggcactctgccaggcaagctaccttgggacatgtagtcgaggtttggcagggggtcttgggactgagtctgcggatgccccagaaagaagcaaggagagtccaaggtggctgctggggctgagagacactgcaaaactaagaacccagagcttgagcttaatcatgagaatgagccccgagcacccaggaatgccaggcggctccacggtaaccgataatgtccaggcaaagaccgctcatatgactgttatttgtgaaatctccaaatccaaggcttcttttgaaaaggtcaactcgggatcaaggaggtagcaggccttcaaagacaaagacaatctaaacaacctcattgatttggtggaaaatcactcaggaagggggtttatggatttaaaggctaagctaagatctctaagaacttagggagtagggttacagctggccaactccagacttccttcaagctcccgcccccgtcacagggtttgtcctgaaagctgtgattatgctggtggcttttactgccctgactcctggattccctcagttctttgggtgaaagaggttagagaaatgcaggaagcagcagctactgaaattaggatagcctacaatcattgatccctagggaagataataatagcgatgagagctgatacactgtgctcaaagcaccctataaatatatatactctttgaatcattttattttttaattattaatttttttcttttggggggcaacacttcactccataaaatagaaggcgtgctcccctaatgtctattttaaagtggaggaaattggcatttaagtagcttgcccaaggtcacataacagtaagcgatgaggctaaacttcaagctctggccatcagtactcatctgtactcttatccattagg

SEQ ID NO: 76897 - DNA, 1086 bp, Homo sapiens
cacgatcagaatcacctgggaggcttattcaaatgcaaattgccgggggcctcactcccagagtttctgctgcagtaggtctggggtggaacagagaccacactttggaaactatttcactaaaccattgagccccagaaaaaccactcagcttcagcagtatgggccaacctgttcaggactctgttccccaggtctttatcaggaccagtgagcactggtgtattttttttgctcccagtccttctggataatttcctttctttttctgtggattctgccatccttggctcatcccagttagcaaagcagctgttcccctgaagctaagcctgagttggaacattccttgccctttgcagtatcaggctagggcaggcaagaggcttagagaggagcgggaggaatgaatgggaagacgggaggagactattttctttcttctccttcccacgctccacctcacttggcttttcaggaatgtctccttacgggatctcttcactcggaaatggactttctaagtggctgagtatgtactatgaagggcagatgggaatgctgcttgaatgagatgttgctgagagcctcatgatcattgcaaccatcagcctgtcagttgtagtgatgtttggggacatgtctgggttggttggcccactgtggctcactgtgctgctcactgtgtgcacagttggcccactgtgctgctcaggagactgcattgagcccaaccttgtagcatccctggggtgaactgctgggagaggctgggacatgaggaaattgttcatgacctgagctgggaaaatctgattcaataatcagctttgtgaggatgtaaagcagagtgattaagatcaagaaatctggagccacagggcctgagttcaaatccagctccatcacttaatacctgtgtgattgcaaagcaaattatttcccattttgcaagataatttgaccttcgcttaactttgtatcttttactccctgggaacctgataaagggagtacgtcaactacctttaggcaacattgcttatgataaaaatgtcctctggtgatacaaatggacagagagac

SEQ ID NO: 76898 - DNA, 1048 bp, Homo sapiens
ggaaataaggaggactctaagctcctccttccaggtcccagagagccacggagatcctgctcaatatccaggaagttcccactcccagcacagggcctgtgtacccaggacatagtctctcagctgaaggttgaacacaccaggcatccttgccccttctgtaaatgctgactggctgtcactgatggcaagatggagaagcagcaagggatcccagaggcctgctgagcacaaggtctccctgtgaacttcttcctggccttcaggggtgcccgtctccttggtatgatcacatagaggatgcccagatcattagagggcctagtatgtcttggtgggaagaaacaaaacagcaaagggagtcctaggggaggaggtgggctccccatccttcttgttctggaagttcttcatccccttgtttctctggtctggtcttcagcttctttatgactggctatctcccactgggatttgagtttgctgtggagctcacgtacccagaatcagaaggcatctcctccggcctcctcaacatatctgcacaggtagagctcgtatttcctgtttgtttcctggctgggaaggcattgcatcatggcagctcagttcttcctcatgagttagttgactgggcccttgtttcctatcttctttatgcctttccaggtatttgggatcatctttaccatctcccagggccagattattgacaactatggaaccaagcctgggaacatcttcctgtgtgtgttccttactcttggagcagccctcactggtgagttggagcctgagggcaagatgaggctcaggttggccatttgggaccctagtgtctcgatggagcaacagatagggagtacgtacgtagggggacagatggaagggtttgttggggaatctgttgggaggcagcacattgttttggtagaatgagcatgggttttggagccagaagactcatgttggaatcccagactgtgacaatgacttccatagctattgaccttggataagtggaccaacctctgggaacctcagtttt

SEQ ID NO: 76899 - DNA, 1017 bp, Homo sapiens
caacacagcaaatcttatgtcacttgacataatacgtcacgttccaaactgaaacctttcactaggctatacatatatttacccaagtgtaccaaatcatttctctctctctctttttttttttttcgagatggagtcttgctctgtcacccaggctggagtgcaatggcatgatctcagcttaccgcaacctccacctcccgagtagctgggattacaagcgtgcgacactagcctggctaatttttgtatttttagtagagataggatttcaccatgttggccaggctggtctcaaactcctgatctgcccaccttggcctcccaaagtactgggattacaggcatgagccatcgcgcccggccagtgtaccaaatcattatgtccccttgtacacagtgtgggtgaaaaatccatctccacagtggccatactatggccctgacacagaattaaagaatgtcattcctgctgaaaggccttccctgtctccccagtgaatttcctgttctaggctccttcttccacatgcttttctgctgctgcctgccaactctagaacgtaatagcaaaagacaaatagtaaagacctaaagattatcatctatctgccaacacagatccttcaaacactaaaaatatcccttacagatatctcttgccttagaaaattggcgaagatttttcaaaatgaaaaatactcagtgttggcgctcatatgactgcctagcaatagaaattgctagtactcaaagtacctttctagaggacagtttagcaacacataccaaagtctttgaaatgggcatgaccattattccatttctccaggaaatatggtacttgagaacatgcacaaagattcagcttccaacatattaatcacaatattatttgtaacaattcaaaacaaccttaatgtccacagacaggaaaattgctaaataaatcatggcttatccgtataaaggaacactatgcaggcattaaaagtatgttgtaggccaggtacagtg

SEQ ID NO: 76900 - DNA, 1180 bp, Homo sapiens
atctcctgggtcatcggactgattgctcaagttctgcaggagaggaagcaccattagaacaactccatcagaacagctccaccgggacttgtgggcctaaattttcctggcctaacgggtctgtctccaaaccctctttcctaagagctgagcaaaccaaccataataaacttgacaaaagactttgttgtggccatgacagagataccgactcaggagggctacctacctaggtgtgatcatgctgggggctaccttctgagtatatttgtgaaagcacatatttgggaactctggtagcttgagttgggaatgggaaggttcttttttacagaagtacttccccagggacttctgtgtgtcacagtcacctctgatgcctttatcttgatgttgcattgggaatctcagccatcagcccaagtgcttgttttattccaaggcagggtaatccccgtcaacttactctaacctttgctgaaaactaatcttgattcattctactctgaaaatccaaaggtgcttctgagagataagagggaaggggtagaaggaaaggtgccccttgaaatgggaattgagcctgttagaattaaaagcttatctcacctctgctggggacagtatttgcaccaccaacccctctcctcacctgctttgagcgataatctttatcagatattctaaacttaaagggattccctttaaaccaactcaagctgatctttcctatctagcctgctgtttggctgtactcatgggctttggtaatatctcctaaaaatgaggttttggtaatttttcctatgcattgggcaactgtgatcgtgaccactgtgctgtcttgctccagccactgccctggcctcagcatatcagggcagcctgtgctggctgcaatactgtggtgcttgggccactgcctgagaggagccaggtttgtgtgtgtctgcatgtgtgtgtgtgtgtgtttgtacagattcaagcaatggatgcaaggaacatgctgtatgtaatagaagaaagaagtccacgttttcggcagaagtagtgagtcagtgtggaagagaggtgagggtgtgctttactttttgataaagagaaagatgtttactcataaacccttcaaaaggtattaacaaaatgtttaccaaacctattgctttattttaaaaacata

SEQ ID NO: 76901 - DNA, 1862 bp, Homo sapiens
ctcagtttagcagttgaaaccttcagttttgccctagatgagaatatcgttgtgatcaaataaccagctcttcctcaggaacaagtgtcctttcttttaagtcttaatgacatcctgggttcttatttgtctgtatgaagtctgatacttttcctctgttctgaacaaacagtaactttggttcccatttctgtctgcttccttataggctctatcacatcacactctggaccttcctccttgccctggggcatttcctctctgagttgtttgtctatggaactgcagctcccacgattggcgtcctggcacccctgatggtggcaagtaagcatccaaccaccctagacctcctacaggagctgtgccagctctagagctagtacagagggtggacacaggagagagagagaagaaaggtaccgtatgtatgttagtcactagtctttcctctgtatttaaggtttctccatcctgggtatgctggtcgggctccggtatctagaagtagaaccagtatccagacagaagaagagaaactgaggccagcattatcacctccaggactttctcgttttccaccttggccatcttcttccttcgtcgtctctcctctttaatttcttttctattccatcatctgcccttttattcacttttagcctctttttttaatttttaaaatttaaagatatgcatactgaaaagtatataacatgtacgtacaatttaaagaataattttaaagtgaatactacgtaactccatccaagtcaagaaattgccagcttctcggaagcccactgtgtctccttcccctacctgcaacctcttccaggctcccttttccagccttcccctttttcccttttattttcatgccttgatttgacttgtgtggtgggaacatgtgaactatgaaacttaaacctgctgcccacccagagcagctgtgaccaagggctgcctcaaggggttgtccacgcaggttgggctcctctctgctgctggacccaagactctgaaccttccaagggacaggcagttcttctaagaagggctcccctgtgtgtgagcaagaccacagctctccttctatctacagatgcatgagggttggaagagtctgggctgtttttagaccttctggtcagctgtatttgtgtaacaacttttgtaataaatagaaaaaccctctgctctgatcagttcttgtactttgacctctgctaagacaagagcatggctgcctcctctgagccctaggagaatcacagctttatgcctgattgaatacaccatagtgagtaggacagctcatgacacaggtcagcctggctgcctccggctccttactgtcatttgctcattcctcttgtattcttgaagtcaaatcttcttttttctcaccttcaagagtctgcgttcacaactaaacactaagtgccctttcttatttcctcctaaagaagaaacagattcttgagagagcagagacaaaaaaatagaactaggcagcatagatgaaacaactgcatgacatgggaagaagacaactaaaccccgaggagaatgcactggaatggacagttgctcttaaaccctacccagagggcctcccccagctggaccctcatacacagtgtgtgtatccaaaaggccattgctatttcagcaaatatttgttgagtacttctccatgccggacacttgggaaagagaaatgaacgacacaggcaatgcccctgccctgtgggccttatattatagtcaaggtaacagaatcaacaagccaacacaaaaataaagaacttcaaatagggataagaactctaacaaacacaaggtattttggtcaagaa

SEQ ID NO: 76902 - DNA, 1536 bp, Homo sapiens
cactcacatatcttaaagaccatatatgggcatctaaattggtccccagtatctctgagttctctcctggatcagccttgaaagtctgctggcctcctgggcatcttgcatttccagatcagtctctacaacgttccccaaaacctgtcctgatccagaccctctaggcttccaggacaaaaggggtaaattactatatctaggagttatttgcctaactgggctctttgtgggtttccactcttggaacttcccttccaactgtagacatttgaagagaatctgagaagttctcattctggaattccttctattccttctagttcccatgttgccactaggacctccatcctgcccagccacagagaggtcaggtccagctccctatctcccatgaaccaccagtgaaataggaggagtttggaaggaacctcaagtctccccttctgaacactcttgcttttttctgctacacagtgaatggcctccaagctcggacctttgggatctggacgctgctctcatcagtgattcgctgcctctgtgccattgacattcacaacaagacgtatgtaagggaaggaagagctttagcatccttttgttggaaatcagatgcgaggcatacctgttaccttgagtaatgggaactgttaatcattttaatgcattagcttagaatgtgaataataaaaaactcacaggttacattccctccaagcctagaaaacatagtagacctaacaggtcttcattaaagtctgaaaattctttggaactgacatagcaaactggcaggccattatccagtggcctgcatcatgcccctccacttctttatgaaagaatcagcccttcttctactaaagaagtagagtggtatgctctttttagagtagccacccacacatacctttctcacattcctccttaagaagcaggaatgaacagaaatcacaatccatgaaaaaagaggaacccacaagtaaactgttgtatgtgtatgcagcatcagcaggtgagggtgaaagagaagctagggctcctgaatctacctgtcttgggtactcaaacagaccagggtggaacaattgcaggcaatcagaagccataaccagtgctggccactagagggggctcgagctttcttcccagcgggagtcatcatcacactctaggtggaaacagtttgttcaggtcaccgagggaggctatctgaatgccaacttcacattaaaatgtttttctgtcttatccaggctcttggcatctggggaaaacaggaggcgataatatttattgagcccctcttattatgctgagcttttatctacgtgatcttgattaagtcttttcttagcagccctggaggtcatgattttcattcctgattttgcacatctaaatattagagatacagttagtttaaagaaagactgactcaagtgagatttgaagcagggctattagccgtttgatctcttcaaccttatttttttttttaattttttttcaaacttgaacctgcagtttact

SEQ ID NO: 76903 - DNA, 1040 bp, Homo sapiens
tttaatgctggtaagttgctgtctctaaacctgaaaacacaacgaatataacagggcatgtcagacctcccatcttgtcatggccaggagctcagttttaggatttttctggggtcccctaggccaagaggggctctgttcagtccgtgatgggcttaggattttatttggagttgacacacagcagtttatttttaacttttagattgttcttctagtttatggagcatggtatacctgagaaccagagtccagaaaacctagggatgtaaatagtgacctcacaccataagtcctactcaaatttataaagttccatacacttggaagaatccgtcatcaatagccaggcaggtgtctgtgagtatagttataatcgcctttgagctatttgcattacgaaggaatggcatgaaaacatgaaggtatagaagtaaagatagaggactgattccaacccagaaaaaggagttctgatttagggtaatattttggagaaattgcttagacaaggataagtactgtgccacttattgcaaagtatactgttcattcaccactattagtgtgactgaatttctttttttggcctgcttcattcttcctcccttcctgcttatggttaacatagactggccctcattgtctcatgtcctctgcctttgtttccaaggcaaaaagccctcccacgtttgaggggagtcatgagccgtttcctgaatgtgttaagaagttggctggttatggtgtccatcatagccatggggaacacgctgcagagcttccgagaccacacttttctctatgaaaagctctacactggcaagccaaaccttggtaagaaatcaaagaatttctgcatcctttataggacttataggactggccctatgctgtggttcccaaaccaggctgtacatcagagtaacctaggaaacgtcaacaaacacaggtacccatttccctcaccaaacctatttattgaacctgggtggagctcaggaatccagttgctaaaacacttcccagatgattctgat

SEQ ID NO: 76904 - DNA, 1683 bp, Homo sapiens
catgagccaccgcacttgtccgtgagggaagttctgataccagtttgtatcctgtcttgttgctgttttatttctggcacttaacatggcgccttattgttgaattaatggacaaaagaattttaatggatgaatgggtgaattctaagtcggtttgctactataaggtttatctctgatcagcacttcatactcagtttctgcaaggataaggaaagcctgagaaagaaatgcaagaatattaagagacatcatgggtttctatagaagggttaatttattttagtttctgcatcggggatttgcccaaccctcccattccttgaacttgttctgtgatacactgcttttgtctcactaggctcacgtactaattgggccaccccggtgagtacactgtggatgaaaaaatcactgtggctttttctgccattgcttttcctggagaaggggtatctctgatgtttttttgccttcttgtctttctgtctgccctcaggttcacccaagcagcactgactataacctaatgtggacaggatcccacctgaagcccttcttactgcgcaccctctctgaagcacaaaaagttaatcactttcccaggtaatgctctttgtagctgctttgcttcatttaaaggtacatgacattggggcatgtagccagcaaaggtaattagtgtccttaaagaagaggaagatgaaaatgaagaagaagaaggacttttttttttttttttgagatgagtatcgctctgtcacccaggctggagtgcagtggcatgatcttggctcactgcaacctctgcctcctgagttcaagcaattctcctgcctcagcctacccagtagctgggaatacaagcttgcaccaccatgcccggctaatttttgtatctttgggagagacgaggtttcgccatgtaggccaggctggtctcaaactcctgacctcaattgatctgcctgccttggcctcccaaagtgctgggattacagacatgagccaccacgcccggccagaagaagaaatttttctggtacggaacagcactctgcaaatcaaactgttgtgttcatatccctgagcatgaatgaacactttctaagggctatatagacatggatggttttaaaggagatagtttctggttctctttcctaaagttgagctgcttgggagtacctcatgaggatgggtttgcctttcttacttccccttcacagttactgttttttcacttttattaaagaatggctcacctagaatcttagtctggtatattgtccttaggtgtagaaattttcagggttccaaagaaaggtagaaaaaaattagtgtctaatttaattctagtaatagcataacaaatcctttttgcatgatggtagtttctatttctttgtttttaaaataattgaaggatgatataatctagctattagctgatcattaaacataattttgatgacagatcattttataattttttgatgtgtaattaggaaggagttcacagagttgagcgtcattggtgtttggatgaattgtatactacaatacttgcaatgataatcagtcatgtatatataaacagttatagccttacggtcacagggaattaaaaatatatgccaattcctatgtataattttgctgtacagaaggtatgatatgatg

SEQ ID NO: 76905 - DNA, 1050 bp, Homo sapiens
cttcctctatatcctttgtaatatcctttttaataaaccagtaaacataaatgtttctctgagttctgtgagctgctctaacaaattaattgatcccaaggagggagtcgtagggatgcctatttatagccaggtggttagaagcacaggtaaaacaacttggggcttgctattggcattggaagtgggaggcagtcttgtgggactgagccttcaacttatgggaactgacactatctcgaggtaggtagggtcaaatttgagttgaattagaggacacccactgcaagattgcttgctttgtgtgtggggaaacacacatttggtgtctaaagtgttgagtgattatgttgaattgagagtagagagtaggaaaaacactttggtttttcctcaatatctcagaatatagcaggagaaacggagcttgttttcctcagaataaccatttggcagttcattataaagtttaacatatgtggtgattgtaaaatgtgtccataaattctttgacattgttttcaaaaggtttaacttaatttttctgttcttgagtgttgactggatttagtgacttgcctctaactagtggaatatgacagaagtgattatcgcttctgagactagattgtaaaagacattacagcttcttgctcactttcttggatcacttgatctgggagaaaccagttgtcacgtcatgaaggcacttggccttatgaaaaagttcatgtggggaggaactgaggcctcctgccagcaggcagccccatgtgagtgatgagccatctggaagttgggttttccatcctctcttgagcctgatgactgcagtgctggccagtatcttgactgtaacctcataaaggaccttgggacagaaccacctagctctctcactcccacattcctggccccagaaactatgaggtcataaatatatactgttattttaagctgctgtgttttagggtaatttgttgtacagcaataaataactaaaacaacttactgaacaaccaagcagtcccacttctagagaaataaaaa

SEQ ID NO: 76906 - DNA, 1035 bp, Homo sapiens
tattctgatatgttcagtaaacttgtcagtatcatttatgtaagggcacactggcatcatataagcatgcccctgtcttatgtattttttgcttgaatgtcccttctctccattgatgacttagtgcctatgtaagtattatttttttttttttaagagacagagcctccctctgtagcccagaaccacagtggcacgatcatggctcactgcaccctctgcttcatgggctcaagtgatccttcctcctcaacctcccaagtagctgggaatacaggcatgcaccattaggctcagctaattttttaattttttgtagagatgggatctcgctctgttgcctgggctggtcttgaacacctgggctcaaaggatcctccactcttggcttcgcaaaattctgagatgacaggcatgatccaccacacccggcctgtaaggatactttatattcctgcatgtgaattatacatgcttccttttcggtatccctttttcgcttgccatttaagaacattctttcagccttgatttcttgtcttctgtaatttatgttctttgagggtagagatatcgcatatctttggatgttagggtttggagctacaagttagtcacattctctcccctttgagttcagactaataaaaaaaaatacacgtaggagccaaataggcacctaagtgtcagctgtatggctggtaaagtgacacagaaacacatggcctggatccagatctaaaatgggcttcttatttattttgcatcattgtgaacttacccacccaggccaggcagaggcgctgggctggtttcaggctttcctccacaggggcagagcctgactcagtaggcttaatgcacagaagagacatgagtacagatgagatgtgaggcaggtctcttgtgaaagtccaaattacggtggtaatagctaacatttactgaatgtttactttctagtaggcacctctactctggtagtattttagatgaggcgactaaggtacagtttggttaagaaactttccatga

SEQ ID NO: 76907 - DNA, 1232 bp, Homo sapiens
tatttagtagaatagaattagaggtctgtgaccctgaagaccgtgactaaggatctgttgccaactccagccattcccctcaaggggacagctttctaagcagaaggaagaaagaagcaacaaagaagaagatggggtggtaccagtatcagaaaagcaaaactttccccagaattgggctctatggccatctctagttgtaagggagattgagaagtgattctaacatgtgaattttcatgtccgccaactaattacagatgactagatttcaaagcaatgggtaaatttgtagaattacgattttagaattataagagatcttagtaaatcaggctaaattttacaaatctcattttaaagataagactaggtgatttaagcaaattacctctagagtcatatacttgaaaagccagaattacaactcagatctttctactccaggttcattgctgtttctgttagaccaagcctgctgccactgtaggaactggaaagcacttgaaagaactggggagcctgttttagtacatcttcatcctgaagcagagagtcctgagcaagactgcccggcctttgcctctgatttttcttgcttcctacccacacatttagaacctgtaaaagagaacaatccttgttctgaaaatatcacaaatcaaggagaaaagcctagcatgaaagacagtctttgatatttagaatttcaagaacattcaggattttaatcatagtgaagcaccagaagaagcattaacttctttttttttgagacagtcttactctatcgcccaggctggagtgcaatggtgtgatctcggctcactgcaacctctgcctcctgggttcaagcaattcttctgcctcaacctcctgagtagctgggattacagatgtgcaccatgcctagctaatttttgtgtttttagtagagatggggtttcaccatgttggccaggctagtctcgaactcctgacctcaggtgatccgcccacctcggcctcccaaattgctgggattacaggcataagccactgcgcccagccagatgttgtgggaagtcagggaccctgagcggagggactggctgaagccatggcagagtaacataaattgtgaagatttcatggatgtttattagttccccaaattaatacttttataatttcttacgcctatctttactgcagtctctgaacataaattgtgaagattttatggacattta

SEQ ID NO: 76908 - DNA, 1097 bp, Homo sapiens
tttgtggcatgtagaaatcatatgaaattcagtgttcatacataaaattttatgtaaacagccacacccctttgcttacatattgtttatggctactttcaagctacaattgcagagttaggtactgccacagaaactgcatggcctgcaaagcctaaaatatttattctctggctttttacaaaaatagtttgccgacccttcatacagatgcattgtagtgtatttaattaatattttgctgttataacacagcattgaaaatcttatatatgcaatattttacacatgtgtgagtagaactagaggatatagttctagaggtagaattgctcacagagttttaaattctgtgcggcacattaaattttttctaattctgttaattctgcatcaagggaaaaggcagaggaagatgggggagagtggacaaaagatctctttctttcctcctgctgaaatggtttgtggcattgacaaagtcaagtttgtgtgggaggctttgaagagactggctcatgtcagagggagaggaaagaaaaggagacaagtagttgctggcaagtcatctgggaaaaggagctgagcctagagagctccttctgaagacctgcctggtataggcccaaatgcagggtggagggaagtgtgcaaaacttcaggactccagtatctgaaagtcttgttctgatactggagccctagaaaaggacttgcctcttaataggtccaaccagaagaacagaaactatagggaactttcttaggtttatgctgttgtattctagataaactgggactgatatcttggcgcacagcaacctaggcaatttggaaaaaggaagtctttgtgagatctgctcagaaacatttgcatttgcttgatttatttccccacactattccttccctttctctcttccttcattgaagaaaaataccaaaaacaaaaaattctctcaatttttacctttcatcccatctctgctttgaaacagtactgactgctgccacctgacgtatttcatcaaaagtggaagaggcacagctgggaccagtgctctctctccagtctgggatgtgagaatcagcagcac

SEQ ID NO: 76909 - DNA, 1029 bp, Homo sapiens
gaatgaaactggccgctggtctgggtttctactgtggttgtgtaggactcttttcctaatatcttctccctggaagaggctgactgtgaattttgtgtaagggcaaaacatgttgactctcaggctttactttaggtggacatggtgagaagcactccccttccaccttgccaaaataaagtgggccatattgtgaatgcagaggaggattttggtgatctccctcttgggcagagctacctttcttttcctttttgtgtgtactggtgataaggtagcctcaagttctactcttctctatcagatttctgcacccacacgtctcctggcctcactgttccaaatgctgtttgttaattatctgattctaattccttggctgatccctgagcttcatgtttgttgagtacaagcttggaaatttgcaggagcctccttgggaaggtcactcttatctcttttggacttttctggcttcttttactttttcctagctttgatatcatttcattcttttgaaaatattctttctgtccttccactggaactctggaagggcaggggtaggtagatgtgttgtatgtgggaccagaaccctatcttaaattccccacttgtcttttcacattgagctgtttgccatatgtgtagaaactaactttctgagggatctttcacattggaaagtccttaaattcagtctggactcaaaacagtaccgtaaacaatgatggccagacccttcatgccaaagaaatataggatctggttttgatagagcaactgctacagccccaggcattggctgcaacttctgttacctggcctaggccactctggaggccttttaccctgagtctcctgtgacataaggccatggtcatatgccttggctctgtctcctcttgtctctgctctgacgttggtgttgaaggcccctctccaacagcttttccttcagctctgtgccaggagctccagtgttgtttgaatctcatagacggcactagtttgggtttaggttttagc

SEQ ID NO: 76910 - DNA, 1983 bp, Homo sapiens
aatacttaccattgtgttccagttgcctacagtattcagtatagtacaatgctgtacaggtttgtagcctacaagcaagaagctgtattatctatcctaggtgtgtagtaggctataccatccaggtttgtgtaaatacgctctatgatgttcacacaacgatgaaattggcctatcaatgcatttctcagagcatatccccattgttaagtgacgaatggttgtatgtgcaaacttggtcctggggtacctagtaaatagtgctcttttaggttattgttaatagagaaatggtgttgaaacttcagacctagagaagatgaaatttgataatatgtgatggtctaaatcaaaggtcactaacataaatgctcacaagtacattcactgaaggaagagtggagactggagaatggagagtacatgtctcatctaaaggcatttactatttagtgccagcagctgatactggtattgccagatctggtttgttaagtgaggcttgaacatgtagatttttactgtgaaacaaagcacttttttacacttttaattttgaaaccgttttgaacttatagagttgtcagagctgtaagaattatatgaaaaattaccttttaccctatgtctagagatctcattccaattctgccaattgtcctaagattttttttttttttaattacaaaaggatccaatcaaggatcacatgttgtatttagccgtcgggtctccgtagtctccttcagtctgaaacagttccttagtctttctttgactttcatgatctcagcatttttgaagattacaggccagtcattttgtggattgtccctcagtttgggcttgtctgatattttctcatgaagagacctaggtaatgcatttggggccagaataccacaaaagtgatactaattcttgtcattgcattatatgtgatggcacatgctagtcatttagtggtgtttgaccatttgctttaggtcatctgctagattcctccactgtaaaattatttggtcttaccctttgtaattagtaagtattttataaggagatactttaaatcatgtaaaatttcattcttcatctcatttctcatttttaagaaaaatctattgatttttcttgccttaatgaattattgctgtaatagttgccaaatgatgattttttaattccatcataacttttatttcttggcatttttctgtgaggaagagctttatcttctcgtttatttattcatctatttatttataccaatgcagactcaagcgttcctgttttatttaatgggttataattctttactatcatgatttattttgatgctcaaattgtcccagatttggccagtgggagacctctcaagctggctttgtgtccttttgacatgtctttatcattctttgagcacaagatgtttcaggctcatcttgttctttctctattctatccctggaatcaaccatttctccaaggagcactggttgctttttcttggagtataatatttagaaatcaatatctgggtgctagatacgctcattgttttggggcatttctgctttcagaccctggccatgagcagagttaggaaattatgtatttatgtacatatacacttgtacatctgtatttctatatctgtctctaatgtattgttgaaaaatagaagtttatactagtacgcacaattctagttcaaaactacagagttccttcttgttttttgcttttcatattttaaaatctcttttccaacagcaggaaatctggctcgcagtatctttaacatatttatttatttgctcaattcctttgtatgtggccagtttcctgaccccactgggccactgtcccattcagatgccgtttttatatggatttatacccttatttggtggcctccctgcttagaaaacctccttgtgcttctggctgacttcccaccctactcaccatcttccttttttt

SEQ ID NO: 76911 - DNA, 1049 bp, Homo sapiens
tttgtcaggcttttcatgttgaccaagttagatcaagtacttgtagtaactacaagagatgaaaagcctctttttctgaagcagaagctttcccctccttctaattcattgttctttgaggggagaggatgacaggagggatgtcaccttgaggtaatgtctggctgaggcaggcagccagcacggggcccctttgcatctcacaagaattcagagaatgacagtctgcaacttgcttggacaatctattagaggaagattgggatgcataggcaagggttactcaccagggcactggggtgtgacatggctagaagttaagtgataactactggaagttggaagtttctagaaaatctggggtccttctcaagcacagacataataatgctcatcaaactcttgtcttttagcctagtcatcattttctctttgtccacatcctttttcctagcctcatgtttgtttattttagttttttgggtttggggttttttttcttttcactattctttctttggctcttgtatatttctggtacagggaattagggagtggagatagtgggtggatgagaagaaacagagaagaggaaagttttttaatgctgacctttaatgtggtgaaaattcatgttgacttcatagtctgagtaagcatatgtaaataatttgtaagtcatatgaaaataaacttgtggccttcttttttttttcacacacttggatatgcctcttgggaaaaccactctagtgaagggtgatatggttacagtggtatgtaaacaggggttgatatctaccataaccattcgccttgagtgtccttttgttgatactgagcatccttttgttgatattgagcatcactggaaagttctctctttccctggttacttccttcagaggcacatgtattttatactttggtcttcttttgacaacagtccgggatatcaaattgctaccctgttttcagtgggctccatgtttaattcctcttttgccttcatttcaaattcaggactaagtctcttgcactgtgcccat

SEQ ID NO: 76912 - DNA, 1833 bp, Homo sapiens
ctcactcacccattccaactcagttctggtctgaaaatggcatcagaggttgttttgtggactcaggtgacattcacctcaaaggttaattgtcttttaacttgttgtaaccattcttaaatttgtttgccttctttcacacattgctttcactctttcttgatgcataattgtttggttaagaaagaatttgccgccttcttccccaccctcttgaaaaaggcaaactgtatgcattttcatttccattgaagaaattggtatgaaaggatatatgacaaaaaggaccaagaaaaaatgagtaactggaagtcagcaaagtgaattaaaaaaaaaactttttaaaaagacaagaaggctatttgcaaagagtcttgttattatagccaagcctagttacatatgtgactttgatttattaatttgttttagttgtgacgatccagaagtggaggattatggaaacaaatggagcatgagtgctatgcttaggtacctgaaacaagaaggcagagatacaaccggtgagtactgggcctttttccttcttgacttctcttctttggataactttatcattgtctcttgccaggaatcattctctgttgctttgatagtgttgctgagacgggatgattgtccttggtgttactttttcctgcagttgacaagctggggaacaggttttccattaccctcaaaatcccttttcttgtttcgggtctgaaagacataactttttccttttaatccttagtgaatttacccttcttgaatgttgaactgctgactaaaatatggtcagctttttatataacaaattgcctgtctccatattggccccaagtttcgagttttctaagttaatctctctcattcatgttgctgagttggagaatgggcactgtttgagcacagggcttcaaatcaaaatggacacaattgctgagccttgagcagaacgggaaactgtgtgccaaaaaagacttttcatttcacaagggaaagggtcataggggaagtgtgagaagggaagtgaggctcctattccattatgtgtctgtcttttgtcataagaggccacctgagggtatcccttggcacctacattcttgactgtattgatctgttcacagatatgcctgcctctatagcacccattcagaagtctgccatatagaggcttttttgaatgagcacacatgcttttatagttatattgttatctggaatccagttcataatccatgtattttgatattgagtctgaaatttaaaaatttttgtttgcagcattgatggcccatgtagaagacctgatcattaagactataatctctgctgaactagctattgctactgcctgtaaaacctttgttcctcatcgcagcagttgttttggtaaggagactcaagaagcttaacatgttttgtgaagaggatcttgggaagttggacgggattttagggtagagaggcttagtgattctatagcagtaagaggtatgtgatggactcttctttctaagctcatgtagcatatgaagagcctactaagaggccaatagtgagcttggtcagaagtcccctgaggagtaactagctttctgtgtgggaagcagggattggaacgaacgtgttggtctttctgtcagagtgcagtcagaaaaagtctgcaacggactgtacaggaatccagctctaacaaatatattccagagctccttggcagccaggctgggaacagttccaagaagctctggctggtaccagtatgtgctttctcccattttccgatgactcctcctttttgtttgagtcttctttctagtg

SEQ ID NO: 76913 - DNA, 1074 bp, Homo sapiens
tttgcccccaccatgcatggcagcacttttttttaaattgagacagtatctcactacgttacccagtctggccttgaactcctgggcccaaaggatccacctgcctcagcctcccgagtagctaggactataggtgtgtgccaccatacccagttgcatgtcagcgtcttttgctcttagagaatgttcaggaaatgtttcttgaatgaatgattggcacttgctttaattgctttttggtggcctgacagtagacttcccaatggatctggtttggtaatggcctagaactcttagaattattgcagactgtttgaagatggggatgaggggttgggactaggagcgtaactccaacttccaaaacctcattagatttaaataataaataaaggtttatttttctacatctacttggctcttatatgagggtaaatttctgatatcccttgctgtaaaaatctttgttctaaataattataaaaccttttctgaatgtttccttttgtttgtttgtttgtttgttttataacttgattgccttttggaagcttgggagcttcattattgaacttattggcaatagaatgttccgacgtggaagaagctgtgactttctctgactcagtgaaataccccttaagtccatttcatcagccatgggtctcctttcttcctccctacttgtgttcagttttaataaactgagtgcatctggagttttttaagttgttgactatcttcttggcttttgtggttctaattccacttcctgtcagccctgggattttgtgtgcttcattaacctcatcccatcagatatgattttgtatacgtgtgtatatttgtatgagtctctgcctcccactgactcctaacttcccctggggtttaagtcacaaggaataagctagttgtttttttttttttccatttattttagagtaaacaggaattgaaagcttcccagaagattttggctcaaacagagcattggtgcttttaggggaaaccaacagaccagacatggggttcgctatattcttttggtggttgttcctgtccttccatctt

SEQ ID NO: 76914 - DNA, 1049 bp, Homo sapiens
tccacccacataaagacatgtccttatgagtccggccacttttggcatgccccatatcctggattctccctctgctctcccgtaactagatactcaggaaaaatgatatcatcctttctagcagatcaggcctgaaaaggacactccttttgctctagttaagcatacccagtcctaaatactcctttcaaatctacctttacatctggtaaccagatagcatattgatttcttggactagttaaccaattggctgtgggcattttcttttcattttcttgtgggtctgcttttttccaaaattctccttctggaccccatataaagacttcctctttagctttttcaatttgaatccaaagccaaggtaaaaagaatttccttcatacaatagcatttcagtgacagtgagttctggctaatgtcagcactttccattgcctcagggaccacagcttcagctgggactttatttctggggagagttagtggattgatccaaaattagtggtgtgacatgtttagtaatctattaggccttggatggattattattttcttgagaaaatctttatttcctcctctctccctaaactaacttttatcaggttttttcttaatacagctttaatatgtaaagtttcctaagaatctctcttattttctttatgattggtggctttattataaatatttcaagtgttgtgatcagggttattttgtaggaagtggctgccaattattttgtctttctcaaaaactatgcattgtttttcacttaaaatatatttttttcattcagtatttctgaagtatttcctatgtgctagttatggtgcaggctacttgtaatacaacaatgaatgaaacatggaccctgccctcaagtgatagggaggagcagacatgaaatgataaatgacattacaagtagtataagtgactcaggtgctctaggaatatataagatttactagctgtgcctaggggatccacagaaagccatttttaacagcaagaatgtagtatgcaacatacagtgtcatgac

SEQ ID NO: 76915 - DNA, 1101 bp, Homo sapiens
ctgctaatttcttagaaaatggcaggttttaatgttgcccattccccattcaggatttgtgtgccaagatcctgcccagcgggcatcaactcggccaatttatcccacctttgagtcttccaggcgaaaccctttccagaaacctcaggtaagccaattccacagcagggagcctgaaggaggcttactgggaagtggcggctgatgtaactgtgggagcagaagcactgtgggtatgaggtcacttagagcaggagaatttggggatcactctagacaggaggcagttatattcagctgtggctaatagcttatgctttcaacattttccaagaaacttactccctgttttttgttttgtcttttctcttggctttttttcattatcttccttctttctgtttttaaaaatcacgttttttccgcctcagattgatatgctcagaaacaaggcacagaaaaggagcctattaattcttagtcattactgcattctttctgatcttcagactagctttgtaaagaagatgctttgttgaaatagtatcttctctacaagtaattctcctcaaaggaccctccatgatcatgagttattgattgaggctaaatgagataaaagcccaaagaaacttatacttgtctaaaatatcatttgatcaagcattgcttcggtctttgtgtactctgcatttttgttccagttaaaccaatcagctgatccttctatttactcattccatcatcttgtcagtccctgtctgttttgaccctgctaattttccacttttgtttcttggcctttaacatttcttcttatttaaaaaaaaatccactttgctcttctcttcccatctggtttgattgctttgcctgctcagacattttggaagtcttttcttattaaatccatcgtcacctttacttttcattttaacatttatttacttgttctatattacattgttttgcattcattgatttgttgcttttaaattgttctgtactctcctgccagattgtaggctctttgaaggcataagcagctttttcttcctactccccattttctctttccttttcttctctccttttatccct

SEQ ID NO: 76916 - DNA, 1049 bp, Homo sapiens
ggagtagtgctattttctgtttgcgaaatccatatactattatttattcagataattttttattagaacagggttttcaaactcaaatgcttagagggcctgcaggcaggtaatataaatgagtaaatagaggcaggcataaaacagccaagagtgatatgactgaggtaaactggagagtgcatacctcatctgaaagggatggctgttttactaatgtgctctagctaattactatcaggcataagtgtgggccaggtgttatgagatcttgctattgtcaagagaaatcagaaatcttacttttaagtattggcagccacttcattagaaacaatactttgcaggccaagcataacatgtctttgagctagattcagtctatgcctatctatgaccccgtgctgcagaattattccctaattaatgttgggatgtggaacagggtgtactgtattttaaaggctattatcttggattaaatataaaatcagttaccagggttgtacttgatcagtgcatcatcagagatcaaagggttttctttaatttttagtaagaaaaagtagaggattaacctaggtgtactagaaaaacttaatttaggcagtcacattcctttgcaaattgtttcctgcagtatctgtggcaagaaccacagaattatgtataaaggatcatgaacatttctgtgcagctttaacacagtttctgccaagtttcacttctagaggtagctgtattgccagtcttaaatgaattggtcccttttcttagtttgcctgtcagctttattggcaactctttgcaaactctagaaaatctgttcaatgcttgttttgccaactggtaggtaatggcatgattacatccataagcagcctacaggacacttacataaaggctaaaggaactgtagattggtcatgtgtactgtgtgaaaccagtttgtcaggtggactagttgacttcaggatcttcagtatctggcagtaggattgtgccctcagtggtgagaagttgaagctggaatatatatggcataggag

SEQ ID NO: 76917 - DNA, 1003 bp, Homo sapiens
aattttttttttcagacatcttatgaaacatactgttgtctatagcttaatattggaaatgttttcacattgggtgtagggttgtatttgagttccttaacaggtgacatttcaaatatgtagtgatctgcagtttataaatcttagaagctctgccacaatagtgtctcagatgctacctttgaaatacaaacatctttctttctgaatgatcagcatttgctttcttactgtttttgttagcagtatttgagattaaccattgctttcttctgcacagatttaaaaaattctttttgaagtaataggctagcagtgggggtcctgtgcctgctatttgatgctttagtatgagggatatagatattctcatatataaacgtgtcactgcaactgttgtttagcaaaaagctccagtatatttattttggcgtttgtactctctgatgcaatttctggtaagcttgaatgcttgacatgtaacttttcttagctactgtttctgataaagtgatttatatggtttatgtgaatccaagaaatgaaaaataacttactggatgccttgtctaatatttagtaactgattaatgtggctctgtagtatgagttttggtgcttagttggtggaattcgaaactctataatatgtagtattttatatttagtaaatacctaagtatgctagttgctcccatggcagaaaacaaaacaaaataatgctgttgacttcaaagagcttatattctaaatatacctggaactaatgtactgaaaggagtacgttaggaaaggggtactctttcatagcctgtggcatttgactgtaaagaagtgtctttgataggtaattctaatttatttttacttacttatttgagacagcgtgtcactccatcacccaggctggagtgcagtgacgcgatcacagctcactacagcctggacttcctgggctcaggtgatcctcccaccttggcctcctgattagctgggactacag

SEQ ID NO: 76918 - DNA, 1518 bp, Homo sapiens
tggctgccttcttggagtacccagggtagtcacgtttgtgccaggcctcttgaagtccagcaaccacagtgatagccttttggccacagctcttttctgtgttactgatgtctctcatctcaatatttccccctcaaattgtaaaacatttcacagcccaactttttcatttgtgatataatagattgttccttggttttgtgtcttatgtctcaattctcttaattgttcatctcctgtgctaaaaatatacccactgaaataaatacacatttatttttctattgagggcatcttcagatttttccatatccttgaaatattggatgtgctctaaaaccaaggtttgggttaaatactagcttagaaagtcacgtggacctcattctttctttcttctcttttctctctcaacccatagtgttcttttactgttctgttttctcctcttgcctttgagtttattagctttcgtctgttttccagggttccaggctgagattaattacagaaagtgggctatgaatttgagcttataaatctttagaaaaataatgatgttgagggaatgaacagagggtaatgaggagtaatgaaaacttaaaaaattttttttactattttcattttcttctccttagcgttgccgtccactctctgccagtgatgcggaaatgaaaaacctcgtgggctcagcccgggagaaagggccagggaagttgggtggttctgtgcttggtctgtcaatggaggaggtaaagataagttcattttaggcttttgtgggttaacacagggtttagtgaaaattagtgagtgattgataatattcatgacaaactcatgtcttacattgaaaagagaaagattcaagattggagaaatgttttctcagggaagaacattttaaatggaattaatttctcccttcatgctactttcatattcttgggtcataactatcttcctttgtcctatagccacatggactccggttttcaaaataggtactcattttatcttatttttcatctagatcaaagttttacgaagggtgaaggaggagaatgatcggcgaggtggatttattcgcatatttcctacatctgagacatgggaaatatatgggtgaggtgactaccttttttttttattctttacctgaggtccatagaattagattaattgtgatacactgtcatcactgctccccccgatgatgcttttcttattttgtttatttataatatgataaatattatccaacccgagaactagattattgacagtaatttaatatacctgtgtattatttctcccttttaatcctctgcctccctcctaactagcttcctatcccagggttagggactgtcctaaactttgtgtttatcattaccttgatttgaaaaaaaaaattgtttatctatatgtgtatctaagcaatatattgttttattgagatctagtttatatgcagtaaaatgcatctattttaaatgtacagtttgaagatga

SEQ ID NO: 76919 - DNA, 1232 bp, Homo sapiens
tcaagaaatatgcttcctataacatactgctgttaacttggaaattgagaaaaaagaaaaaaatcttaaacattaagaataaatgaagagcactgagttctgttgttcattttttggcactcattttatattgccatcaatagggattttgggccctgtagaggtgtaagcagatgcaagctggcatatgatagaccatatgctggagcatgaaacaagtcctaatatatttaaaaggattaaaatgatacagagtatgttctttggccccagtagaattgaatatcaataacaatagaaaatcttcacatatttgggaattaaacatttctaaataatccatgggtaaaagaagaaatcatgaggaaaattagaaaatactttgaactgaatgatactaaaaatatgtcaagatatgtacgctacagctaaagtagtgctttgggggaaattataagtttaaatgcttaccttggaaaattgaggactgagatcactgttctaatgtttgttttaagaaactgaaaaaagtagagtaactccaaagtaagtggaagaaaggaaaggcagaaatcaaataaaaaacaaacagtaaagaatgttaacaaaatccaaagtgtgttcattgataaggtagcataattgataaacccttaggtagactgatctagaataaagagaaaggacactaattaccaatatcatcagatagaaaagagaggatttcactatagattcaacagacataaagtggatgctaaggtgcggaaaaaggatattaaggcaatattattagcaactttattccattactttgacagcttagttgaaatgacaattctttgtggtggtgggaaagttgggggcaacacccaaactgataccagctgaagtagaaattttgaaaagccctgtatctgttgagaaaattgaaattgtcctgaaaaactttcctatagagaaaactccaggctcactggtttcactattgaattctgtcaagcatttgaggaataataacaccaatcttatacagattcttttaagaatataggaagggacacttcccagttcatcttacgatgccagcatgactatgattccaaaacctgacaaagacattaaaatagaagaagaagagaaaattacaggctaatatccttcatgaacatagacacaaaatttcttaatactagcaaatctaatctgccattataaaaaggataatacat

SEQ ID NO: 76920 - DNA, 1050 bp, Homo sapiens
gtaatcccagcactttaggaggccaaggtgggcgaatcgcttgagcccaggagttcgagaccagcccaggcaatctggcaaaatcctgtctctacaaaaaatacaaaaattagctgggtatggtaacatgtgcctatagtcccagctacttggaaggctgaggttggaggactacttgaccccaggatgtcgagctgtaatgagccgagatcctgccactgccctccagcctgggcaacagagcgagaccctgaatcaaaaaatgataataaatgaaaacaaaaataaataaaagaatatatgagattagagagtgacatgtgggtgctattaattctgtgccttgtttgtggtttggtttagaaatgggcttttactaaaaagagaaaaggaaggtattgggagagaggaacatttaatccttttttcagcaacattagtgattcttcgtatttagtgattacccaaccagctgaaatgaatgttaaaactgagacagagagtgaagaggaggaagaagtcgcattagataatgaagatgaagaacaggaggcttcccaggaggagtctgcaggatttcttagagaaaatcaagccaaatatacaccctcattgacagctttggtagaaaatacacccaaagaaaattccatgaaagttcgtgaatggaataataaaggtggacactgctgcaaacttgagactcaggagctagagcctaaatttaacctgatgcagattcttcaagataatggcaatcttaggtatgtatcttttataattatattagtaaaactgataacagctaacttgtactgtgtaccagctactattttagtggttttacagtcatttttcatttaatatttacagaagtcctatgaaataatgactgtgattagatactgttattattaaggaaactgagccttagagaggttaggtaacttgtctaaggtagagctatgatacaaacccgggtctcattggttgggcatttgtgtcagtcactgagtataaggtaactgggacaaggagctcaagcagctc

SEQ ID NO: 76921 - DNA, 1092 bp, Homo sapiens
tggaagctagactggagccctcttaagatgtgcagcttactttagccaaatcctacctcctaaccttgtgaaaacagtcagtagaaagcattcagtgattgcatttgtggggattgtaaacaaagtttgtgttgggccctaatcttcgctgatataattttggctacagtatcagaaggccgatcagctgaagtaaccaaaatctggcctgaaagaaaacagatctgccatgaacagcagctgaggtgaaaatcatcagtgtctctctggtacttctgtcttccaaactatagcttgatcagatttccttatttccagcctaggccaccaggcagaaaatagctgcgttctttaatgatgttgctaaggtgcttttcacaagacttgaggatttctttcgcccactgaacatctgggcttgtcctgcctggcccatcagttcatctgtgccaaactctgttggacctccctcatttgctctgggctccagccattccatcttgtagttgagaacagtgtggccttaaatttggtcttaagagtccctttataggatttatctatttcctgctttggacacttttatatactagaaatattaattgccattgcaaaatccacacttttgcttttgtactaactgataagttcttatggacctccaaatgtaaaaaacattttctcattaatacagtggtttttgtgaagattgagtacttctcctgtctgttcccccaagaaagttgttaaaaagttcaaagagggtcaagcacagtgactcaggcctatatgtaatcccagcactttgggaggccaaggcaggcggatcacttgaggccaggagttcgagaccagcctggccaacatggtgaaaccccgtctctactaaaaatacaaaaattagctgggtgtgatggtgtgcacctgtaagtccagctagttgggtggctgaggcacaagaatcacgtgaatccagcaggatggaggttgcggtgagctgagattccaccactacactgcagcctgggtgacagaatgagaccttgtctcaaaaaaaaaatttcaaagagaaggagtaagaaatctaatttt

SEQ ID NO: 76922 - DNA, 1091 bp, Homo sapiens
cagctggtctgaaaaactatttattacttctgaaggcccagtggccatagttaattcttaattcttatcaaaaggcatattccttttgagcactgagatgaatcctaggctgtgtgagtctgcacggttgttagtgcctgtagaaagtggcaaattgaccattggagaacaaatttgagctgtggattgaatgtaatgacatattctttcttgaacgagttatactttcatctttaaaacattttatacattacagaattttacagtcaagcccaagaaatatactatttaattagaatattttgcaaagcattctatatcccgggatctcagaatgcattaaaaatatcattttgggtgtttgggtttgggaggtttggtcagtttgcagaaggaaaagctgatagaaatttaaatggcttttctaaagttgcatggaattgttggtagaatatcagtgcaccaaactcatagccacaatttactccagatctgttgagaattttgttatgtcttatataagtgaagaatttattcagtatggaagctggtataagagtaccttccaagatctgtctttcctctcctaattggaacaaaatactgtgtctctgttgtcatattgttaaagctacaagggtgatcatagatattactaagctactataaaaacctctttaatcaatgggctgtgtaagtagaaagtaaaaacatgattaaaatttacattcattctgcaacttttacttgggaatttcaaaatgttttacaaaatcatggccaaaagtaatatgtcaaatttataggtggcaaaagtacatacaagaattaaatgtctttactataaggacagattaactcaaggctattgaaactacatgatgaagtgcatatttattaggagtcagttttatcttgttgtttttctgtggggtttgggcactgggtaggaaacagaacaaatggctgaaaagaaatcaaagaagaaagttgaggaagaagaggaagatggggtgaatatggaaaactttcaggagttcatcagacaagcaaggtagtagacattcttgattgataaaagctgtcttatt

SEQ ID NO: 76923 - DNA, 1044 bp, Homo sapiens
taggaccaaaactaaagctaagcctctcatggaattagttttacttcagcctcatcccagcgtgtgaagcagtaattattttctttctcaaatccttagttgtttgaagggagtaaataagaaggcctaatgtgaaataggaagcaaagaatattataagaacaatgttgattcttggagggagttgggtagttagattttagtgatagaattatgggaagagggaataggatactaagatatgatgggaaggaattttcaaattaaataagtggctatgagacgggaaaggccagtgctctgctacacttttatcattgggtcactaactagattatatgtttccggtttataaatgggcagctagaagcaccaagacattgagattttgtgattgtagtaaaaaaaaaaaaaaaatacccaaaatagccaatattagtgcttacctatctagctcctatcgttcactagactgcaaagcctacaaagtgaaaagatcctaatcctgtaggaatccaaggtgactgtatcctgattgggaagtcatcccccttcagttcatttttttcgtctataaagaacttcagtgccagcgaattaaaagtccattagactatggtttgtagggatctgaacttgccattagatgtcagtgttaacttttagagtcttggtaatagggtggtcagtactgagggaggtgctgtaggatgtaataagcaggatggagtagtggagaaagagctagattagccatccagagacttgccactgactcctgtgtgatcttgagcagttcactccattgttattctgacactgactcctgtatgatctttggcagttcatgccactgttctgtcactgattagctatgtgatcttggacagttcactctactcttctgacactgactagctgtgtgatcttgggcagttcaccccactgttctcctgccactgactcctgtgtgatattgggcagttaattccattgttctgacactgactagctgtgtgatcttggacagttcattctactctt

SEQ ID NO: 76924 - DNA, 1064 bp, Homo sapiens
aacatggcaaaaccccaactccacaaaaaagacaaaaattagccaggtgcggtggcacgtgcctgtagtcccagctactctggaggctgaggtgggaggatcgattgagcccaagagctgcagtgtgccataactgcaccactgcactccaacctcggctacaaagtaagaaagaccctgtgtcaaaattttttcattgataacaccatacctgcccttcataattaagcagttgacattaatcagatgcttactttgtactaggcactgtgccaaggactttatatgcattatctctttaaccctaatgaggtgtaggtacttactttttgccaattaagatgaagaaatagaagctggtaggataagtgactctgctaatgtcacacagatggcaagttactgtgctaagactcaaactcagctctgtctgactctgtgctctttacctcagtgtttttctgtctctttcggtgtgaataaggactcaaacctctcattagacgaaagtgaccgaacttcaccctgtgagcttgttgttccatgatgttgctacagagttgtagccaagcctatacttgtgcctgctcagagaaacaaggagttgaactttgttttcttgatttgaaatgcttctctagttcttgaagcagcttgcaaaacatgtggctctgttgagaattatcagttatttgttgggcaaactcctcatcagattattttatagtatagtcaactgattcttcgaccagacaaaactcagccttgttaatcactagagatgcaataagaatagatcttatgatggcagcagcaactccccctgtcaacacacaaaatctacatgtataaattggaaaccctacgaagagatttgcccattttgtcaggtttcccaggaatgtctctggcaaatcttgatctggaactctgtctggattttggaacactaaatgtctatatatatacgtatattatgaaaatgatggagctcagcagaaagagaagatatgccaagagaatttagtgctgaggtattggaactgcagagattccctgctttt

SEQ ID NO: 76925 - DNA, 1144 bp, Homo sapiens
ggaggaggaggagagcaaggggtgaaacatctgccaagcaggccccaaagcttaggtggaggtaggatcttgtgaccagatttcccacaggcagttactcacttagcagcagccagctagagggaggcaggggcagagacatgtggaacaagttgactgtttttaggcttaaatttcttgtttttttgttttttcgttgttaccactatttctcagggcagcatagcaagtaatcttggaattttctgaagtttgtcctaagctgttttgtccacttttgcattcttggcatatttaatgattactctttttaatgtttgagcatctgaacaacattgagaaatagtaaaaccttaaagttgctaatgaaactattttcccttctcattcccctttgttgttttgtaacttgtcttcaccccatcaaaggcatttctgctgttttttggaaaatcccctgcccgtgagctttgtggaggagaggaagcattgaatggttccttttacctgttctctcgtttccttagctaccattcctggtaacaagtgcttctcaaactctgcaatgcaagtaagtttcccgtggatcttgaaaatgcaaattttggttcagtgcagctggggctggggctggggctggggctgtggctgggccaagattctgcatttttaatatgctcccagtaatgcaggtgctcttggtccagagaccaaattctaagtcgcaaggctcagtggtacaaggcagtgagataacacagtgattaaaacaacaagattgggagaattttcatcaggcagaccaggaattgaatccaggggctgacacataataattatttgttcttgagcaagttattttatctctcaacctcagtttccccatctacctgtcttgaagactaagtaggttaatatacataaaatatgcttagcatgttgcctggaacaagctgtgtgtgtgtgtgtgtgtgtgtgtgtgtgtttcagacagggtcttgctctattatccaggcactgtgtgtgtgtttgtgtgtgtgtgtgtgtgtgtgtgtgtgtgtgtgtgtgtgtgtgtgtttgagacagcgtcttgctctattatccaggctggagtgcagtggtgtgatctcagctcactgcagtc

SEQ ID NO: 76926 - DNA, 1053 bp, Homo sapiens
attacagaacatttccattatcacagatcattctagaagatagaaaatgatttatttcacttgtttttctgatagatcagtgatggctacttggagaaatgtgtaaagaagattctgagaccatctccaagtcagccccgagttgcttgattatgggttagcagtatgagtcctaggaagagactgctgggtgagggatgtaggggtgttagctctggcatatgtgctgagtgtcttctagacaaaaaatccacaagtctaagaatagaatatttaatctagaggggcaggttattatcatttggtaggaacagattttttgttttcttttagcaggaatcctttagagagaaaggtgagaagcttttaaagttttctcattccttgtatagtctctcatttaagtagcagtcacttttgctgtttctcaaattaacaatgatactttgcttttgcataaaacaaaatcacagtggctgccacttcttggtttatccatcacatcaggaatggttgttatgtgaataaacgtaaccctccaataatccaaaagtaatttcatgatcaagtcactttttacctgccaagaaacaaaactggccgaggatgtttttctttgttttacttctttaatgtcttctgatgaaagataacaagtgggaagtaaaatcaaagggaaagaaggaaaagctggtatagttttgtcaatctctgtataatcactgttttaagaatttgaggtctgtatctgatgatattttaaaaatctctaataattaagggtaactaggattgttttcctactagtttccaaactagaaaagatttttaaaactggagtaccagttctgcaacttttatgtgactttgagcaaattgcttatcataacctctctgagccttagtttctccacttgtgaaatggtgtggaacagtatctacctctgtgaataatgggtaaggactaagtgaaatataaaacccagagtgcctaacaccgctactgtaaggactcattaaaccatattatttgggaaaagtagaccacatgcg

SEQ ID NO: 76927 - DNA, 1080 bp, Homo sapiens
gtgcctttgtcacagccacagcttcagctcagaggggtcagcatctgttggccttgacttgattttgcctatatgttgttaatgatgctttttaaaaactctgtaaagtcaggttatttccctcgctttatttctaggtaacaaacctgaatttggcaactggcatcataaacagaagcagtgcttcagctcccccaaccctccgacccatcatcagtcctagtggcccgacatggtctacacagtcagacccccaagctcccgagaatcactccagctctcctggaagcaggtatgtgaagggccctgcaactagcatttgggttactcagggatggcctgtgtcccaagcaagccattcccaccttgagttctgtatggagatagcactaaggcatatgccctttctccacctgcctcgatcctctggcacctgactaagagagcctcattttatttgtaagacagttttcaagcatatcaaatgaaaaggacatttctgagatagttaagaaaatcaccttagggtaaaagagcaagaatttacactatgtttaaaccttgcttatagtcatcatttttatgtgccaactttttgcactttgtccttgtctcttagttttttttttaataccttgtgttgtttatagttttttttatactacattgtgtttcagtaactgtagactctgttcttttgaaggacatatttgtttcttatttttttatctagtttcatataactgaactcaaacaacctcgctgaacaatgctcatttgggaagtgggaaggaaatttcctttatgtagttgagagatgtggctaaagataaaatccacgtagcttctggcaataatgtaagcagcttccaaattaaaaaagaaaccactgtattgaattctggtcttgctgtgtgttttaattacccctgtattaaaaaaaaaaaaaaaaagaaatggattcccagcacatcttgctttagtgcctattaaatatggattaaattgcatcagtccctgagtcgaatgcgctagagagaaatgtgactgttacagtgaagtattttgaccagctgagat

SEQ ID NO: 76928 - DNA, 1027 bp, Homo sapiens
atatactgttcagagctgaagggctccctgagcttatgacttccagctggtcaagaacagtcatatgcctcttggcctaaccattcatccaaggagggagaaggaaagggggttactaaatgaagttcctggttcagctggatcttcacatccatctagatttaaactttgttgagacacctttaaaagttcatcttacacaagaaggaaatgaaatcttattttttgttgtcaactatttcccatttcagaggagcagccaccacatgtagggcaatggtagcaataaggcaggtagcactgcagagcagatgagtgctcagattctgcagttagctatgcctcggttgcctcatctgtaacatgaggcaaggttaaagtgagataaagcacagaaacatttagcgcagtgcctggcacctcctcttctttttctcatcattgtcctcatgtggcatacaactgaaatggaagcatctcctttgtttgaaatgtttttagaagtcatctttgggatgattttatagtttctcattttatatttattttattttgttttgttttgttttgttttattttattttattttattttattttattttgagatggagcctcgttctgtcacccaggctggagtgcagtggcatgatctcggctcactgcaaccacacctcccaagttcaggagattctcctgcctcagcctcccgagtagctgggtctaccactactcccggctaatttttgtatttttagtagagatggggtttcaccatattggccaggccggtctcgaactcctgacctcatgatccgcccgcctcagcctcccaaagtgctgggattacagacgtgagccgcctggcctggctcattttatatttaaatctgtgatctaatctgagttaatttttgtatgaggtatgagattttggttgaggttccttctttgcctatgtatgttcaattgctccaacttcatttgttaatacacaaatggtttagaaaggttattgttcctccatt

SEQ ID NO: 76929 - DNA, 1035 bp, Homo sapiens
tccattgtcaggtccagctggctggaatctcattgtacttttaaaggacagacatatcagcttctagctttttgacatgatacctcaatgcattcttcccaaatttatgtaattgtcacacagttatttaataaaatcaaagtaaagttagccaaaacatctccctccccagcatcttcccatcatcacttctgctgctttttccttttctgtatctctgcttattgagtggctaatcagaagtctctcctcaagagcttgtaattctgtgttttaaattagatattttatttggatcctacccatattcttaatctttttcattgagtcaaccttattctctctgttgaatttactatatccacaaagagcagttcttatgatggctaatttctgatttatgtttctggtgcttgtgatagtgattcagtagatgatttaatgcacaaagaaggaggtcatatgctgggaaaagaaggaagagatagaaataagttagacgccgaatatataaactggtaattgagatgtcagttttaggccaaaatctaatagatcagcaaaccaatgagttggcagtccttagagaagtagaagggaatcatttaagcccagcactgattcatgaaaaaagtaagttatgctagagtaacttcatttcccttcaaggtagaattactttggtaagagaagaccaggggactacaaaggaatgactgtaactaggtttccccaaggcataatgaaatcttgtgagcacaaaagagaaatgtgaatgtggtaatactgtcattaagaatatttggtgactggtcgggtgtggtggctcacacctgtaatcccaatactgtgggaggctgaagcaggtggattgcttgagccaaggagttcgaggccaccctgggcaacaggtttgagaccatcctgtctctaacaaaaatacaagaaattagctgggcgtagtagtgtgcacctgtagtcccagctgcttgggaagctgaggtgggaggattgcttgagcccaggaggcggagg

SEQ ID NO: 76930 - DNA, 1030 bp, Homo sapiens
tactgacagttattaacagttatagttaatttataatttaccttttacattaagatttcttagtagactgtttcagtatgtattaagtttatatctaagtgcaattcagcttttcttttttactaatgagagtagttatcaatcattcattgaacgcatttcataaacagatttattctttacagagcctccactgtgcaatttcagtgctaaatttaactattatgacccttgactctcttctaactacatttgacttttattatcaatatatcatcaagcttactttcagagccaaccattctttctgcccttcatccacaggactcatttacaccaagattgtcactgtctttgcatttctcacttcttcagaccttcatgccagtttactgggtcattcggactaacatgattttcatcactaatgttaacatataagctagctccccttgattctgcctaacatctcctgggctttaaacccctgtgttaataccacctattccagagtcctgctattcctgacattttttcacctcctcattcttcctgtggactcgcctgacaagtcactgctctaggtcatgagcttttaaaaagcaggaactatgtgtttttcttcttggtagtccgtaagcacctaggaacagtgtccaataaatgtggattgaattgcactgaaatgaaataactgcttaggcatgtatctttacatatgatcccagtattgcaaagtacaagagagaaaaagttattttatagctaaaatcaggaaattataaaaacaggaaataataacaagagttttaatgaaagataagtgaaaatgctgtaactttttgtttgcatgtttgtctgtttaaaattgaggtataattatgtaaactaaaaaatcatctattttggctggacgcagtggcttacgcctgtaatcccagcactttgggaggccgaggcgggcagatcacttgagatcaggagttcgagaccagcctgaccaacacagtgaaaccccatctctactaaa

SEQ ID NO: 76931 - DNA, 1034 bp, Homo sapiens
taaaagttcattgcacgtgtctaaaaaaattctgcctcctcctgcaggaatgaattctgtttcgccaagccttcagctgctgtgtgtttgtgttgtggaggaggggaggggaaagaaagagaaattcagcaggcaccctgtctttttccaagcagctggcaataacatgctagctcctcagcgtggcacaaagagcaggcaaacagtctagccatgcaggaggtgtcttgatacatctttataatggcgtatcagagaggaaggttggactggggacatgagaggggaggagtgtgtgtgtgtgtgtgtgtgtgtgtgtgtgtgtgtgtgtgtgtgtgtgtttaagttccagagcatattgactccggaacttaatgtcataacctattgcttcgttgtttttttgtttggttggttcttttgttctattttattttcccacttgacttttagcaggaactcatacttagtgtctagcttttagttattattgattttcctaggaccacttgatttagtagattttgccaagccaaacttttattcttatttaatgaaaatacatagaaaatacatgaaataatactgcattcggttgttttggaaataggccactctagacaggctttggagtcagataacccacagcttaagtcttggccctgtctagtccgtgacttaagacaggttattcaaacttttaaaacctcattttccttatctctaatttgaagatgatgatatatacctgtgtattatcatgattgtagttctcaggatgtgatattgatattaccatatgtcaagcaccaaagtggccatttttttgtattatctcagtggatctttacagctgccctcttattagcctcatttcacagatgaaaaagcatagtatcagttagataactttctctgtgtcacataagtaataaatggtagaactgggatttgaacccaggtctgtcagcctgcagcatccaagctcatggctattatgctatatgctgcctcctgctgctaataaggcattc

SEQ ID NO: 76932 - DNA, 1030 bp, Homo sapiens
tttgaagtgaaaactaatcttatataaaacatcagtatctaaggtcctaccataaattttgcatttaggaaggtgtgaagttatttttgtttgagatctgcagaagggctgacatattttgtgtctgagtatgagttggacacaaataacacactaggcactgtttaaagtccagaaaatggtccttttacaagattacatctggatataaatacacatttgcctattttgttgtgtaggaatttagtttttgctaaaaaaaagatgaatagttgggattggtgtttttatttttaatttttaattttttccatttattaagcacctttctactagtcactgtaggggaaactaaaattaatcatatataaattcagccatttccagtgtgaatcacccagaagggagaaaaagtacacacgtaagtggctataatacatggtagaatgtactgtgatgagtcatacaaatacatttttctaagcattcagaagaggaaaagattatttctgccagagagaattgagtaaatatgatctggggagcctaaacatatgtttccgttttaagaatttgctttcacaactagtgagtgtcataagtctggaaaaatatcttgaagaaatgcataagcaactgccattcacaaaggattactgataggtggacttcgctgtcatcccatcctttagtttctcagtagaactgaggtaggtagaggtttgggaaggaatggaacatttgttgagtgcctactgtgtgcctaggtctttgctttatttcaagaaatccttattgaatgcctaggctaaggttacctacatgatgacctccaaaaatccaatgaagtaattttttttaattaagctcctcatcttctaaaggtgaagtaattttaactgcttatgagacagctctgagaagttaacttgaaaagatcacccactttgtaagtgacaaggcctacatttgagctgaggtacatttgaccgcaagccatgtcttttccatttactctgggtctctctgc

SEQ ID NO: 76933 - DNA, 1048 bp, Homo sapiens
tgtggagccaaaaccctaaggatctagatgtcactttaactttcaagcaaaattacttgcctggcagctctcaacagaatggcctattttcatgatcagattcttactcttttcaccacgtgttgtatagtttttggagctcctgggtggatctggagtacagtcacataaaacccctgattgctccccagattttctttccagagccagaggggtaagaatttgggttgatcacccacttttacgctgttcaaaagcaaaagagagactgtgaattggaatttgacaggaagtggggtggcgttatctgggggaacggtgatccccttaacctagtttcagattttaccttgtgtcctttgggccaaaatcaaatgtagtgttaagtagagatacttttttccatttttcaggatctttggatactccccaagttattttcgccacatccaaacccttgcccacacaatctgaagcccttgctacagttataggacagagaaaatcaaagtcggtgaagtcagggccaatttaaggtaacggtaagaataagagcatatttttatcattttcacttgctgactttatactacagcaagagacttagtggctaccaaaagaagttctagcttctcaaaatgacagtgaagttggggctttataaaccaaaacttagaaggatgctcccaaactgggtcaaagttgagctccaaatagtttgctcctataatggtctaccagtaggtggcgctgtggcagtaagaactttctctactattactagaggcttttgtttaaaaatacgaggattttaagacaattcaaataaagaaactaaaaccataattgagttatcacaaagtataacataatatatgggaaaacatgatatttgaaggtaaagttgcagtagttgcaaaagagaatggatatttattattaaggcttttagactagaatttataaactggactttcagattatgggaggcagggagggaacaaattttttttcaaattttggtgaggttgatgaattgtgtttttgc

SEQ ID NO: 76934 - DNA, 1101 bp, Homo sapiens
acacgtcaatgaagacagttttgtgaggggacaaaaggaatatagtctaagtttccttgtggtcttcgtaatccaagggtaagataatggttatttagaggattgggtgaattgcatgtgtcttaggcaatcctaaatataacttctctcaattgattgcttgataagaactagttgtgctcttaggcaaggatccagatacctggtcttttatcttactgtttgaagatgcgtctattaatatatgcttgggaaagcaggtggcagaggtaacatcttctgaaagctttggcagctaagcagtattctcgctctatcatgtggcatgttgattgtctgctccctgactcccatacacagtttcctctgcctaggcaccatctccccacttttgctccctccctccccaatatgcctattcctgtttgtcctcaaccacttttctcctgtccagccctaccctatgttaatctgatttagatgcttttgactctgctctttagaactctgtaattacctctatcatggcttttacaatactctaggatctttatggttacttaactgctccctctactaagcttgaaatttcctggaatgcgaggatcaggtccaagtggactctaaaactctagggtctagcatagtgcccagcctgtagtaggggcttaagaaatcccaattcagaaaagaaaacaaaaaataataaggtgacaaataaataaccaaaaataaaaaagaaattctgattgaatagatgaatgagtaaattttcatatttctgcctttttttattcttctactgacatttggaatacctgcctacatatgcaaattcttcctattcttaggccaagctcagtggctcacacctgtaatcccagtactttgggaggccgaggtgggcagatcactggaggccaggagttcaagaccagcgtggccaacataacgaaaccctgtctctattaaaaatacaaaaattagctgggcgtggtggcacacgtctttagcaccagctactcgggtggctgaggcagaagaattgcttcagtccagggaggcagaggttgcagtgagccaagattgtaccactgcgct

SEQ ID NO: 76935 - DNA, 1026 bp, Homo sapiens
aattaccatatgatccagcaatttcattctgtgtgcgtatgcccaaaagaattgaaagcagagacagaaacagatatttgtatcctcctaacagcattattcacagtaatcaaaagacagaagcatcccaagtgtccgtcggcagatgaatgagtcaacaaaatgtggtctatgtattcagtgaaatactattcagccttcaaaataaaggaaattctgcaataagctacagcatggaactttcaggacgttatgctaagtgaaatgagccaatcacaaaaagacaagtactatatgattccacttatacaaggtacctaaagtagtcagaatcggaaaggtagaaagtagaatggtggtcagcagggggtggggagagaggggaataggatgtttttgtttaatgggcacagagttgcagttttgcaggatgcagagttctggagctgaatgatgggatggtcgtgcagcgtgaatgcacttaatgccactgaactgtacacttgaaattgttaggatggtaaagtttatgttacatgtattttgccacaatttttaaagaaagattatagattgtgtatgtattataccccagattaggtgtttttgttttctcgattttgcatttgaggaaactaaggctgagagaagttaagtagcttgtccaagccacacggtcaatgatggagctgaaattcacacccaagcagtttttttctagaagctgctgaactgcttcttcatctgaaaactcggcccgtcaaggtgatttcattttatcagcttcctttcctaatggagctaagcggctggtgatcaggccctgtggcctccgcctccctgcagtgtctggttgttatctcaaatggctcattagggggatgcctggcagtaggggggcatgtgtagtttaggctggctgtctctttatccagccatttaactttctcttatttagatggagccagacctggagagggaggataaggagcaaggtgggccttctgcctctactcccctgggtgg

SEQ ID NO: 76936 - DNA, 1936 bp, Homo sapiens
caggaaaggtggtgtgcctaggggacagcagctgtccctgggcctggcctcactctctttttccctgtttggaaaggtgtcaggctcccgagtatttctgttgctttcgtcagcacagagcaaggaggaccttgactatagtttcacagccttaagcttcacctcatgcttcaaatccacgaaagagcagctgagaatggggctagctgtgccaccaattgcttctctcccattgttaatccctttaattctgctgttcctaggcacccctccctgacaccatcctgttgcccacttgtgatgtgattgaacaagtggtttggcctttgaaaggtgattcttagagatacctcaagtgacccagcccctggtttgctgggatgctcttggtgttcgtttccatggagcaccagagattgtctgtaggcgaaaccctttccaaccaaacccaactcaaaaaggaggtaactgccactgacctcctctgagatcctggcctagccgccagggtcattagggaaagcagcatttcattgcttagcaaagatagtgagaaagctccagttctttttggctcaaacagaagagtttatgtcctgacacctgagttattaaattatggcacagctagctctgtgatgaatgaatgacaaaaacatatatatatatatatatatatatatcactgtatttctgctttactctatcatttcctgggcaaaatgttattttatttataaaattcatccatctctttcacaaacctcagcttttatggcaaaacacacagacacgcactgagccacttttcagcctatatgtactcttttcagagagcattagaattaaactaattagaattcctccctccctcccctgagattgatgtatttctcagcattctacgatgcttattacactaaaaaaaagacaacttcctaatggcgtgaggacagagaaagtggcatgtgtgttgggggtaaaagggaatattcgagcattaacctgcctggtgatcgcagggcacaaggaaagcctcttctgtcctgggctgtccccttagttgtgataggaaggggagtagcaggaaatggaatctgccctggtcatgggattttttgaaagaaacaaagcatgatctgatgaagagcaggttaatcctgctatttcatttcccttgcagaaagggtgggggcaggattgtgatatgaagtatttagtttcacatctgttccaggaattatcctcggcataaatccatttttcttttaagcatcgtaaagcatcccagggagctcctcctcctgcccaccctccccacccccacagtttatttcgtggccacggagcagctgacatacttccagagagatcatcttgtcattgtacacaaggagggaatctctgagtcttagaagtcagaatttctgtggatcagtggtatcaattttgtgtactgctttccatgaagtgtttagaataaaactaattagcatagcagcagcgtagtataatgaaaagagctctcaatttaaaattagaactgattctcatctcagctttgctaccatttgtgtgaatttgggcaagtcaccaaacctctttggtctcagggtcctcatggtttcccaaaatgtgttcacaaaatacaagtcttcacagtcaaataagtttgacaaatgctatttaccctatgccacttcttagagttgtaatatattaacatattaaagactctgaaaagtctttcaataaagataccttttttttttttttttttggtggggatggagtctcgctctgtcgcccaggctggagtacagtggcacgatcttggctcactgcaacctccgcttccgggtttcaagcaattctctctgcctcagccgcccaagtagctgggattacaggtgcccactaccacacctggctaatt

SEQ ID NO: 76937 - DNA, 1051 bp, Homo sapiens
taccacagtgggatccacggcctcactcaaaagagagctatggttcccagatccctgacaagagggccacaatctgaaaaggggttcctggttagctcttttaggcttagcctgagaacagaattagcctcatatttttaggccatttgccatacacattttctctcattctcaactgatacgggtggggggagattttcgaaaacagtgatgttggtaatttatagttagtaaataaaccatgtttccatatgcaaggattcacaccaggggatcctgcccacaggtatctggaggtcaaattcgtatgtgctttctgccaatctgagccactgcctctgtgtctctgagaataatatactctgcaagaaggaaagacgcacaagcaatagtgcagtcttcttagcaggcggaagtcagcacggtgtgccccctgtgtaaggggagttgcgctaagcaatgtgtttggtgattgacagattctctgccccagattctggttacctctgattagtagatgcggacatggaattaagggtaattgaaggatatttatcgagtcagacatacaccttagaataaggcttttactgttctagaaacaatattccagaagatgaaatcatccaggatgccccaaaaatatttatttatacaaagattttgagagtaatattcatacttgtctttatacctcagtctatgcgtctggggccaagtcactgtgtggcacatgtgcagcttccccgaatgcctcacatgttgtagcacctgcttccaggaacaccaaatgaacacagggtcttggaggggaagtgggggaagaacccataatgccccaaggctgcatggaaccacaatccagaaatgtgcatcctgacctggaaggcgtctaaccaagtgtccaaggggaaatatgatcgagggagaggtgagaggagggacccagagggcagacaggagagggttgatttccaccctttcttctgcgttcagcatatccaaaaggcccaatacagttgatgggccaggaactgcatgacctggattt

SEQ ID NO: 76938 - DNA, 1064 bp, Homo sapiens
ccaagttcagtgtctaccttcctcctttgtaacccccatcaggcctttttatctttaaaactggttaggatcgcacttactaaaagattgggccccagagcaagtctttagtgtctgctgtgaaatctctaagtgttttgaaggtcaccaggcctgctgatacgtgaatgttttttagtacctggggatgtgaatgtagttattcattcattcaacaaatatttattgagcccctactgtgtatcaggcagtgtcctaggtgctggagatacagcaatgaataaagcaaagttcctgccctcatgtgattatgttgtagtgggagaagatgggcaataaatagactacatttaacatacacaaaaatcaggcagtaaagaagtttttctaccctatggatctatacagggtcttcaaaaagtttaaaaccttgaaatacttaaaaattattagagaaaacacctgtgaacagcatttagcgacaagatcattgaatttttgttttagcacaaccgccatatgtaggatgctgtattcagatactcagtgctgtgacaaatggaaaagggcaaccatggtgaagggatggaattgtctgacttgagaagaaaataagctgcttattatcagaaagattgtttccaccatccctgaaacctaaatgacactacaatttgaagtgtcgacattgcataagagtttttacgagctcttctgtaacccctctcagtttagtggggcagtcagtccttagaacatcttaaaacaagtttcagcagggtagagtggaaagcacccaggaaacccaggatctgaaatcagaaggctttgctcctaggtttatgtcagccacttcatcaccttcctaggcctcagtttcctcctttgtaaaatgacagcagtctcagtttctgtccattattgtgagaatcaaaggaagccacattaaatgagatctaaaagtgcttatattaatgctgttttttttaaacaaagtaagcaaaagtataaatatttcagcacccaagagtctgactaaataaagttttgtttatgtgctggga

SEQ ID NO: 76939 - DNA, 1026 bp, Homo sapiens
tctactgaggttgaaaactggtggccttcaggctgaatttggcctatagtcatgttttatgtgatccatacagggttaagaatttttaaatttggttcgcatttataaatcaggaaatgtaatatggaaattcagatttggggcttctctttaaaatcagaagccctggcacagtgagaatgctgggttgacattcccacatggcggcaattggctggtgctgcagctgctgatagcttacatgcatccatccctctccagttaactgcttagtactttgatacacctggtcagatttactcacatttgatctgcctggttcccatttccgtctgaattgaaaactcctgtcttttaggatagattaatttttcaagtggcctcctctatctatcagtattgaatctggttgcctacaacagaaacaacttcagtacttgaatcaaacaggagcaatttttctttcacatagcaaagagtccagtggagggcagagcagagtgggtgcagtcactggagcatgtcctgcattactctagctccttccagcttcctgctctgctatctggagcctgtgacttttgttctcatggttgcaagatggctggtcattctcctgggatcagatatgcattctaggtgggaagagagggaattgttgaagagttcaaggtgcatgccagtaagaagggtgtaccccttcttatcaggaaaacagtagccagagtcctcactaaggagagctctagtttcatttcattggtcagaactggatcttacagccacactctcagtttcaggggagtttttaatgggcacattaccacaccatagcatcggggtttcttggtaagggaggtgagtagaatggctcttgagtaggcagttcaaaaatgacatgtcaatttaaaacaaatagaaattatagaaagcccttttttttttttgtagccctgggtatgaagagaaaattattttagcttaaaaaaaatgtacattcttctccagtttttgttttggagttga

SEQ ID NO: 76940 - DNA, 1065 bp, Homo sapiens
gtgctggggccacttttcaaatggtatatagtagggatagtgaaatgtgtactaatttgctagccatgaccttgctctgtacttatagtgtcttctccttgggctcccacaactaaggcaagattaagaactgcagtgtgaaacctgcagtgtccctggtctcaccactgcgtgatacagagtggggaatgaagccaggcatttctctctaggtctcacatgatgggggccgccagcccatgggttaatgcttctctcacttcttttccattatcacccttgaggagtcttgtgagagatcaggtttcctaaagcatcaaggttacagcttgcttctactgctctcagcttgttccaagtcattccatcctggctttggttgaggtagcaaggctagactgtgcttatacaaagtcactaagtcatgtgccaggaggggttgcttcttagagtgttgggaatttacaccttcaatattatgcacatttctggctacacacatgctgggttgattttaataaacagaaaggagttaagagaatgacagaaatgtataggttttggtttatgatgaatgttgaaaagaatttttatgttggctgaatggcagaaagtatagggaaatggggcatgtctttataagtgtctgaaaggtatatagacccaagaagaggaagaagggagagctgatgtaggatgacccaaaaggatgtaattgagattaagaagatgccatccaaggtgggaaagtccagggtgaatttgaagaatggttttcagggctgaaatctgttctctttggatccgcctcttcaacaaactactggcagccctatcccatgagtcacttaaattgggcagtttgatgactctgtattgagctgtgggatatggctctttttattataggttatgtgtgaacatttgggaagtgcgacaccagtagagcatttgccaaacactgtggctgtcctgagcatcatgttatgtctcattgagctacagaactgtggtttcctcttcttgatttgggcagctttcaaggatatctctctcttcagggaa

SEQ ID NO: 76941 - DNA, 1053 bp, Homo sapiens
tttggcactgtgaaaatgcccagttgcccaccagtcagtcttgtacctaatggctttagcactcactgatgatcagctttctttcttatacgtaaaatagactttgcgttttgatatgtccatttcagcttgagagaactatgtttattcacaggagttcacttataagattgagtgatccattaccttccatgaccttaaatctactatggagaaactcagttctctgagggattagttgtcagacccagggttgaggcaggaggaagaaactgggagagttggaactgtgcgtggaggacagattgcaggagtagatgccagccctgaagcgtatgcacataccgtattactatcagtcttttcacttgccaagcatataaagaacaactttcttggatcttctctaagattgctggagaaagaaagggaagtttgtttttagtcagtaatgtaagattgaatgtgggagctgcattgcccctagaagctggaagatggatatgtgtgaagtttgcaattgatcttgcttaactaaatgtctttctgttggaatttatgcatgtatttggactggctttttgaaacaggttgcaatttggacttagaactcttggcctgattcatattttggggttagggtggagtttctccaggacttctgagagtgtgtgagaagtttctaaactcagaaggctccttttttggcactgcagcatcttttctgttttggcatcttaagaatctgggggaaccatataaagatcagaaacaagtctggccctaaagactccctctgacatggtaattccagttattgaatcctagcccattcggatgagaccatataaagaggccatttcctgaaattcccgctctctgcctctcacaggctcctttttgtagaaagctggtatttcaggactgcaaccgccagtcacgtgcttccaactctttactcacagtcattcctgccccctgtttatttttggagagaacacatttttgctgcttttcaggagctatgcagggtcctgccccctccgtccatca

SEQ ID NO: 76942 - DNA, 1003 bp, Homo sapiens
tcagtgtggggctgtagatggcagatgccattctctctgagctggatgatgttgggtaagatgtttaccatggctgagcacctggatggacacattgatgatccctacagggtgattcaaagactgaaggaaattacatatgtaacaggaatgttgctgttgtgtttagccctcccagcctttccacagcttagactagatgctgatccctgtggttccatattgaggggcggcagagtgtggtgacagccgcaggtactggagccagctgcctggctttgaatcctaactgtgccatttattatctcagagaccccaagcaagtaatttaatatctctggtctccatttctgtatctctacaatggggttaaaaatagttcttacttgaaaggatcattgtgaggattaaatgaattcgtatgtgtaaaatatttagaagagagatgcatttaggaagcacttgtagatgttggctattatcatgatgatgatgactgtttcttatccccattctgtcctcatagataggctttgaccatattcttctcacaggcattctggcaggtggtgatgtttgtgagttgcaggagctttgggatctttatggtgccataaatgcttcatatgaagggtcggtttgggagaagtaattccagatcaagaaaagcaatggttattttgattatgaagaatcttctttaattgtgaactacattaaagccttaagcataggaatgtcagctttccaaagctgtagtatcagaagtattttttaaaccttatgatgttaagaattagccaggggtgttcaagagagagaatacagacacagattcttagtttctgtttctggttgggccagtaaaaccccttcttcattcctcttttctgcttatcactagagacagaaactaaaaactacgggttcaggctgctaaaagcctaaaataaaacaaagcagaacaacaacaaaataaggcaagttggacaagtttgaatta

SEQ ID NO: 76943 - DNA, 1008 bp, Homo sapiens
aggctaaaaagtgtgaaaagcaaaaactcatggagccagagggctcctagatctgtaagcacagttgcaaacatacgttctgtccttttaaaccggctctgttataggctgtccatccccatagaagtcaatttcccagaaaggtgtcacagagggaaggttagctggagctgcccagctggtgtgccatgtgctgcactgtgggtgccagtgtgccatgatgtgggcacaccctgcctgtggggtagacctagccaaggcccctaggctggtcacctgtggccatgagaagtctcatctgtccacccatttgtgtgttatttttaattgcttcatgtcttgaaaaagacagggaagtactatgtcagacatatataagggcacacagttatttagtctcaagaagatatacctatggatgtgaacacgctttatcctatatgaggccaaggatgagtagaaaagcttgacgatatataaataataaataatgcaattgattcccttcctcatacctttcctgctgctgctggagataatttttattaattgataaggactgtttttgtttgttaaccatcatgacattaggatgcatatcaaaattaataattccttaatgtcatctgatatccaggtcatattgagttacttccattgtctcaaaaatgtgttttataggtggattgtaaacagaacaaatcaaggtccatatattgtatttagccatttccttccttccttccttccttctttccttccttccttttttttgtttgtttgttcgttcgtttgttcttttgttctttcgttctttctgtctttctttttttttttttttttggtggagtctcactctcttgcccagcctataatgcagtggtgtgatctcggctcactgagtctccgccacccaggttcaagcaattctcccacctcagcctcccaagtagctgaaactacaggcgcgcgccaccacacctggcttatttttgtatttttagtaga

SEQ ID NO: 76944 - DNA, 1052 bp, Homo sapiens
tgttggtggacatttaggttctttctttctatttttgccattatctgtcccctgagtttttttagacagctctagactttaggaaatttgcaccttcatcctcagaaacagattctggcttccacgaaagtgctgcagaacccatttgtggagagcccacgtgtcttgtccagtccttgtgttgtatggacgaggacacacacacacacacacacgtacacacattatttattgtgacttcttttgctggccactgtgctaaacacagttatctttttcctcaaaacaaccctatgaagtaggtgctgttattatccctgcttgcagatgaggaaactgaagagtaaaaaaaaaaaaaaaagttaagtaacttgctcagagtcatacagctagtgagtagccagccagaatttggacccacgtaagtctgatcctagggatcatggtcttattctcagtgctttgctgccttctgtttttatgccccttgacacctgatacagcatctttgcccgtggtagaacctcagcagatattccctgagggctcttttgacaagaaaccaacatgttcagcttgtgagaataatagcaaggagtgcatgcatgacctaagcccttcctagcatcctttggcctcgctctctgcagagttgtgctccagccagctgcctgacccaccagaagaaggtgagtgcagaggatgcagcctgtgcttaggggtactggccaaggccctgccagccctgccattaaaaggcttaattaggctagtcattaagttcaattacgcattggaaatgattgtcccttctaaccctgcagtgccctccaagaactggatccattcccaggcagcccgctcaggagccaggttctagttacaggtgcacctgtaaaactgcttctggtttcggggcctgtgatgccatggcagactagggcagagtagcccagagcgaggcactccaagtacatgttaaatcgggttaggtttctgcctttgaggccatttcctaagtgccaccttctcttattgggccaccttttccc

SEQ ID NO: 76945 - DNA, 1571 bp, Homo sapiens
agaagtcatattaagcaggaagaaaacaaatggaaatgttaagagcaggttaactgtttaggagaggagtataaagggggaagtaacatttctgtggaaagttgtagcaggtctgacaacagctaagaaaaagagaaacagaacaaggaggaaaatgccttaaattcttaagtaggaagagagtttgggtcaactttgttttgcctaaaagtaattgaaaaagggaagaggcaggactgcccgcccgcctgcctgcctgcccgcctgccttcctccctctgttccttccctccctcctttttttttttttttgtcattgcagtttccaaacctgcacactacactgtcttgattgagatttttagggctggataaaccagttgcaaggaagggactgcgtgggggttgtcagaatggagagcagtattaatggggaacagatgtgggtgggggccagaatcaaggggaggcagggttggtgatcattcacagagctggggagagacctgaggagctatggagtctggccccttccgtttggagatggagaaaatgagaactagggaggttaagtgacactgagttatagaatcttagagttagaaaggcccttaaatgtcaccttgccccactgcccaaggtcgtacagctaattagtataatagaatgtgcctctcgttctgcagccgtgcccattctcaaaccttgagcgctgcacgcatttatctcaagttcacaaaaaggccatgcactatactatttgtgcaagagtgagtctgttagaataaaattgtctttactgctaccctctgggaccctcacagaattgagatgttgatcgtatgaagcaatcttattgaacaaaaaaacttccaaggaaaaaagttgtgtcccctgagccagccagtctctgctaagggggacctgctgctttgcagagtgagcagctgaaagccaggagggaatgattagagaggccaaccattggttaaaattctccgaacataaatgatctccttgttctccctttgatggattcggtctctcaaaaataaaatgcatctgtgaacatcacacctacttctttccttttcttttgagtcctgtatggagaagtacccaacagcaattttaatatagatgaaacaggttgggcacacataggtataaatatgcataggaaatggaggcccctcacatcatccgagttttttctggtctagtgggtcggtcagtgattttaccttttgacccatgctgcccccaccagagctgaatactgatggctacaccagtttctccaggtttcacagcacccattgtaaaagagcccacgtgttgaagtggcagggtgcccttggttcttatttaccagggattcaccagggtgggccctgagcctcccaggaggctgccacacatggtcctgtgctcccccagtggctcgcatgccagcaaccagaactgaggcaccttctcttcatgtacctcatgacttgggtgagtctcagtgtatttatggggtttcggggaaatcacagaatgtaaaagaacagaagcagagaagatgg

SEQ ID NO: 76946 - DNA, 1069 bp, Homo sapiens
acatttggaggagggggttggggacgaagagggaagcctgtggggagtgagagtggacatcgggcagaagtgcaattcctcagagccccaagacgctgggcagagttgacaggacccaaatgctaaagttgtggagggaaaggggagtttgggaagaccctgtcctgagccctaaactcagcacagtgcattttcttaccaacttctgaatattcatctcaggctggattctgcacccgaggagagccaggcacactccaaaactgtcacactgccgatggtgcgtggcacagccagcttcctctctgtccctccatagggcctgtgcagtcttaccagcctggggaacggcattctcagcagcctgcacaatggactgtattaatcacgtagaacgagagggaaaaagaaagctaaatttctattagcataagaaatagaatcttagagcattccatctccaattctctagcaggatagagagatataatctaagctctgaacagcttctttctagctataagacttgctaaatgtggttcattatttggggggtggtggatgtgtctctgctttattttccctagcagcaatttctttctatttttatcccttttcactctttttatcccttgttttctctgcctgtctctttctgttgaattttctctgtgtctgtctctcctttgcatgctctctttttccaggtacaacatctgtgcctccacagtcggaagtcataataaagacaccaggcttggaactgacatttccatcctctggcgtcacttgactagagtgatcaaaagtcgaaatcacgaattgcctgaaagtggcaagggccttctcagctgttgttgaaatgatttgcacctctttgaaaactaagattgaattcagtccatgaaagcagaaatgaaagatgtcttcaccagtctacctttgggatttctccttctttccgtgtttacagttgctttgggaattccaggactgtctcaccccaccaggccttttttcttgcaccatccctcccttctcccccacccctgaccgtttaaaacaaaat

SEQ ID NO: 76947 - DNA, 1041 bp, Homo sapiens
accccaggccagggcgctgtgcaggctcagagctagcctttcagcatgctggaaggacaggcgtctgtttgactcttttctaatgacctgctgggtaagaaagtggcagagggagcactcgtcttctgggatggtttttccaaggcaatgggggtgagggggagccagaggggctagaccacgtggggaggacacagtggcccatgccggagcaaggaggcctggcttgaagagctaagccagtctgtatttggggtggggtgtcatatttggacttagaaggaaaatcagggttggtatctcctgagggccctttgagcatttgtttttaatgcatattgggaagtgctctgtggccagacaccgtgttaggtgctattcacctagatggctttgcacgtggttaagactaagagtaaagtccctgcagggcccgtgttagctgtgtcttccttcatccctgcagtgcccttgttagctatgtcttcctgcatgttaccaacctccaataataatactaacgaacatgtctgaagctcttaccagttgtcaggcaacgtgcaaaatgctttctgtacattatcccactcagtcttctcaattgtgaggtgggtactgcaatcatgcccatttcagagagaagagaaactgaggcttaagcccaggcctttctcattccatcctcaagaagcaccagatgagtgagtagtgtccgtccctgttttgtgtttctgttggtgatctgctggatcctcttcctgacttggggtgcagcaaagttctgtccctcctctggggtctccctcagtgaggaacacacatccatggtcaatgccgggtggctctgccccttggaagctctgcccattgactttgcataaagggagcactgaacccagggagtctcaccttgcaccaaggacatcaggttttccttctgaccacctttaagtgggccactaagttgttttccttgagtctagaggcaaaatggcaacacctgccaggaagggtttctcagaggtagccacctggccctgg

SEQ ID NO: 76948 - DNA, 1053 bp, Homo sapiens
aattcacccactcatccatttgtaccctccttccatggactaaataaggaatcacaaaatgatgaattgtaattttgttaaatgccatggtgtcttgagaccatataatgggggcacctaattgcccattactttatgtcacaaacacacaaggtctctagggaccgtgtctcccagatcgccaataccatcgagtgcatcatcaccttgttcctggcacttccccgtgcacctctgcctgcgctctctgagttctaggaccttgccctcacacacacctgcctgcatttatgcatataacctatggcactgggccaccctcgagggcatggcagcacgaggggccttgttcatcttcctgctattttgccacatcaggcatacatgagtcccatcagagcattcctgtgtcaactccagacgtgtgtgtgtgtctggataggtgtgtatgtgcctcttggatatgggtagttatgttcttggtctgaggactggggggatactgaggtccttctggagagtggtgtgagcaactccaggtgtgtgggtatgtctctgagcatgccctgggccttgaatcattcccagcccatcaccagaaccctccactgtgttgtcctgccagtaattacagcagataaactgctccagttgagggctgctgtccccggctggctgccagccatgcggccccaggctgcgccgtgggagtccattcattttaataagaggtacaccctgtgttattaagaagagtgtttattactgtcgccacacactgacagcaacttccatcatcgttaaacggcagatgcggggagggtaggggggctgtgcactgcagctttgcagaggcacaggcccagctggtgaggctgaggagggaggggttgtctgtctccctctcttaccgcagaactgcatggcaccccctttcccagacagaattgagcttctgctgagcctgaccctgttcgaggtgggggttggggccagcaaagggatgcaggaggggactctgctcgacatctgagtgctgtcccggagagggcg

SEQ ID NO: 76949 - DNA, 1054 bp, Homo sapiens
tctggtgggaagagacagatctagaatcagaatctctgggttctatccctttctttcactagccagctccatgggctgaagcaagccagttaacccttcagactcactctccatctgcccaggtgcagggagtgctgtctgctgggggttattgtgaggctcaaaagcagtaaaagctataaatggtttgaggaagttaatgcatggggcagacagatgtaagaggctggtaagagggggtgaggtggaaaaggagatgcaagaagaatgaagggctgaatgagaccacccagaagccaggcctgggctgcaggggcttccttggggtcatgtttcttgtggagaagaggtgggtgatgtcaatgactggagctgggagggagggtgagatggcaggtgtctcacggagtgttgatagcttggggcacggagtgttgatagcttgccctgtctgaagatctgctcattctaatctgataaaaccaatgcagatcaaatattgacagacacctgtggggctatgtttggcttatgggccctggtttgcacctcctgagttagactcagggagtaggtaaagaagcacttggaagcctgctggtgtcttgcaaacgagtgtgtttaaggataatcaactcatgccaactcaagggtacacccacagaagggtgatatgactacccaggccagggttctaggccaacagcattccattctttgtcctgcaccttggtggagacaggtgtcttcatcctaattagtgaagcttagagaaaggccccgatgagtgctacagacaacatgtgacatcatcctcatcagtgccctcagtccagctggcttctcaacatgtaggaagcatcacacccatgcctgattctcctgccctgtctcctacttggaagaagttcctgattgagctcttcagagaatcccatccaaggaggggctaggccagggattgctttgcctaaggctggttctccttccttccctcccctccgtgatacagtaaagccgcctaagagccagcatctgtggtcctgctgccctt

SEQ ID NO: 76950 - DNA, 1042 bp, Homo sapiens
cattccagaaaatatggagcaatagaaagaggggaaaatcccctaaatacaaagctagcattttgatgtgctttcttctagtcttttctcctatatttctttaacttattttcccaaaagcccccagcccagagcatgtactatgtcaatgaatgtggagtcagggtggaaacctcatttttctcctctgaccccattcagagtggcccctgaggacatggtttcattctgcctggtgcccggacacagcaatggtgatacaggcattcggtaggctgatctcttaatccagattggtgtagtcctttgaaactgaaagtagctcctttttatgtcgcctgcttctcagcattaacttctctttgatgtaatttttgcttccgttgctctctcccttcatgggttagattagtgtgaaattggcctggctcctctggagactgcagtattaagcttcaaatacttggttcttattggaaatccttaacccacatcaggggagaaaagtggcagcattacttgggaatgagagagagagagtgtgtgcatgcacacacgtgcgtgtgcatatgcttacaaacgtgtgcaggggtgggtgtagactaagaaggagagaagcacactggcaaggggaaggtggggaagaggagattgagattcttctccatttattgagtgctgaggatctgctcatcttaatcttaggaggaaggggtaggaatgggtcttagggaacttgaaaacgtgataataagggtagaaagcctgtttaatttgctggcgctctcagtggagctgtccaaaagtcttggtgctgaagggaagaaagaaaggtgccagtgctggagaaagtaacagggcagttacgtaacccaacccacttcactggggttatgtctgcctctatgggtgtggcgcctggttcagatgtgaccttgaattgcacacaagacatggttaccaacattatgagaggactggcaggagccaccagtcctgctcttacttcttgttactcaggacaagaaattagacttggcac

SEQ ID NO: 76951 - DNA, 1097 bp, Homo sapiens
gacaaacatatttgggggctagaaaatttgacctggagaagtgacttttgcgaagttttcactcacttttttgcattcttcccaactctagctgtgagtgttggggactgtttgaaagtgagtcctggggagaggggctgagaaggggcaggaaagcccatctacaaggccagtggcttttcccccaacccagtccttcccaaattcccacagcctccagatccctgcaaccctccctcccgcttagctcaatagctcttgaaagttctctaatcacctctctgcttcctgcattaataagcctctcatctcactgatggcaatcagaatatttgcttatgaaagggacacggttaataacacgattgctcccctccgcctccttccttcctctccttccccctccctttccctcgccctccacacaattctctcaattaacgataggcagaaattaatttttcccctcgatcgaaacaattgcagggaagcggattgccagtgtggcttcagatagggacggctcccagcagagtggagagaaaggagcgagatgcaggagataagcaggctctatctgcaggcacaggacagagtaatacaaatgttatccttagaaatgtacttaaagaggatatgtttataattcggaggggattttcgggggctctcctgccctccctccctctccagggcactccactcaactcacttctgcatacagaacccagagtttgttgggaattttgatcctgttgtctcgaaatgagtggcatgggcctgcggtgagaagggagatcaggttatgcagggggtcttggccatggtctgggcccagggcttaggccactattgatagggctctctttgtggccaagtgccaaacaccaggtgtcaggtctgactgttgtgtgggcttttcaggtgagggcctggcttatctgccatctttaccaacccttctgcaccggcctgcactcctggcatgggcctccctcccagcccactccaccacccaggtagagaagcagagtcccgtgtggaagccaagatcatatcccagcacaatgggcttaagaacacagactctaaagccc

SEQ ID NO: 76952 - DNA, 1022 bp, Homo sapiens
acacccctccttgtcccctgccccatctcctggcttcctgtggctccgcccaccgcggggcggaagtgggtgtggccacgggcggaagcactgggtcaggggcccaatcgtgcagccagcccctcccactcgccaccgccccacccctccggcccagaccggaaatgaggtcagagagggaagccccggcggtgagagtcggcccaaaaagcggcggccgttggaggtggctgcggcagctggtgagggggaggaatgggttgagagtgttggggtcctgggggctagtaccagaggggatcggagcgccaagccgcggctgagcggctaagggcgtcttggggctgcggcagacggccggagggtgagggtggtggggccttgcttttcagggcccttgtccccatccctggggatgtgggtcgggccgtctccggggccacagccccctcttcccctttcttctttctgcctctctggggcgggctgcagcctgagggcttggtgtcccgagccatggtcgccccagccctcagggacgggccggggcgtggtggagagtccttcgaaacacagtttttgtcatatatgtggccatgttgcgacccccgatcccggagggagctcagtcgccaagacttgcattttggcagtttctgccctagaagagccgatccccgcccctcgtgagcccaaatgagcagttgcctcctgcctctcccacctcctactccgcccctcacttccaccctgctcctgtctctcttcttacttgctgtccaccagctacccgttccttcctgtgcgtgactcagcctcatctctgcccgggtgcgtgcctggccgccgggtcctctcgagagtgtgcatccgcgactggagatggggagttctagggttcttttgtcactactgttggaattacaggctttgaggcaggaaaggattctgcacaggcattcgactgcaagttgtttgatgacttcgttccatgttcaagtttgtgctgttctgcctgaggt

SEQ ID NO: 76953 - DNA, 1039 bp, Homo sapiens
ttccctctgtcaggaaggctatatgtaatagaaacacagttgtttctaaaaactgtttaaaacgcgtacctcaaatgcaaaactaataattttattttaaaaaacaatttgctgcttattatgccatacagtttatacataaatattgttgtttagaactcaggtctcagcagaggctggtgtgtgtgtgtgagagagaatatgctagcgccaggtatacggagtttataaatgttccattaagttgcctgtcctcattaagaatcatggctttagatgctttttggctataattctgttttctgctacttgtggtttgattatattgaatttatttttttatggctgacattcaaattgtctgaacacatggtgggctttgaaaataacagtaccgagtcccattagtcttacatcagatgtgatcaagccagaaaaatttgtctctaatgggtacatgtttaaaaatgtaagtgtagttttggtgactttttattttttacatctcagatagtcctaggaacattgataccccccagcttgatactttaatgttattaatattaatctgtggttatctttttcttaatagtgaggatgccattggtgttttggatgggacaattctttatggtgcattgcagaatatttagcatctctgcattattcacacccccttttcattgtatcaacccaaaggcctccaggggtgatccctaggtggattgagtactcccagttgagaaccagtgtattctattattgttaatattagttggcatttattaagcactcaactatgggccaggcactgtactatggacttagcatatactcttatttaatgttcacaattccactatatggtggataccactatttgtatttacagaagggaagttgaggttataagagcttagataatttgcctaagatcacccagtgccaaaactgggaatcaagcctgattccaaagctcattcttaaccaccatgttgtgctgccctttgagttgttctgtctcaatttaactttccca

SEQ ID NO: 76954 - DNA, 1915 bp, Homo sapiens
caagtttgttttaatattgagcatatataccaaatagaagtcttcttagtattgagaatggtgattttaaaagtagccttttgggatagtagctttgtgtatgtttcttccccttaatttcttgttaaactacgacataattgtatgtgagagagcgactgttaactctgtctgctctaacagcccaagtatggctccagatgcagagcctgttttctagcatgagatgcttcactcttttctgttccttcttactccagacacatctattgcacattctagtcaggatgtaataatgtaaattctcgttatctgagagtctggataacttaagtggatgggaattcttatgaaattcttactcttttcaaattgaggagaactcattcacccatttgggctattatcctggcccctcacttcagagttctttcaatatgtagatgctaaagggttgtagctgtgaaggaataatgggcggagtggtggcacacacggcattgaggaaagttctttaaaatcttctagttatttaggagttctaaattccccttgacttgtctcgattcatttgtagttacaaacagaagtgctttgtattttttccccctgaatccattctgtggggaaagggggtgattcttactctttgactgaatgttgtgttcagcctctcttcaagaggagagtggaactaaaatctcccttaattgttaggcacacctttaaaaagggctggcattagagtgtaaggagataatagtatatgatttggatattatactgtcttgatgagttgattctgtcaataattttctactttattttttccctgcatttttaaaagaaatactttcaagaatcttcttggttaccctttcataaatctacttggatgtgccactgtttattcacatacagatcaaaatgtagaattttactttttagcagtggtattgagggttgtcagagtaatgatccacattgtaagattattaagatgaagttgattgttaagcttagcttagcctagtcaatggtagcgttttttttttctaaagcatgtattagatgttttagatttgaaaatgtgtgtctcaatcagcttatttctaatttccttaaactcactctttgcgacctaaacatggagtatagacttcatcaatatttgtttgcttttctgtttctggtcttcctttaatattacaccagccaatccctcacaagttttgaggaactaaaaatggttatagtatagtagtttttttctgcttgcatagagatcaaactattattttaatatttttctgtgtatgtgtgtttgtgagtattctaaagcagaacaactactgtaaaattattttctactgatctttatttaaattgtctgtatagcaactattaatagctattagctattaggtgactgtagcctaattttgctctattctttactaacacatcatttgtttgttccccttgaatatagtttagcttcttttttttttcataagtgaattggttgggtgatggccagaggtcacattcaggagccttcctaaggtgatgtattagaggctgatctcacaggaaagaaaatattctcctctcttggaaggcaagtgacagagatagagtgctaaacctacccactccttctccagcccaggctgaccttctgcggccctttggtgcctcttgttttcttatttttatagaaaatcaatatcccttctgatacaaacaatagctcagaagcaagaataagtgggagaaagctgagatctctgtccatcacctctcactttaactcccccaaactctttaattatgagtgtgctttgctccaggtgtttgtgacagtgaaattgctaaatgaggaccattttaaccaaagattgggtgatcaata

SEQ ID NO: 76955 - DNA, 1694 bp, Homo sapiens
aaccagataaatcaaatttagaagcacaccatgagaagaaacaaaatcaactgtgagcaatagctcagaaaatgaaactgggcagaatttcgtgggacaaaagttatatttcaatgagttcaaattaagtttgtttttatatttttgtttttaactttagttccttttttcagaatgagttttgtgtatctgctcgatatgaaggaggacagtaaattcagaaaacataagttttgtcatatttttttcttgttcatggatttttgtttacttctttgtagatgggggaaaacttgaaagatgctagatgtcttaaaattacatagcttcatttgaaactgatagttggcaatatttgagaataaaattgtttggtaaatttgtaaatttgtgttgttgaatataccaaactaggttgagattacgtctttgagctttaatagctttctagtcctaaactaacaaagtgactttagatttttttagtactttaaaatataagtgaaaattttagaattctcctcttatatttcttttgtttggggaggaaaataaaactttgtagcttcctgatgaaatttacatatctgattgactaacaggttggagtgaaattagggaagcttgaaaaccaaaataagtgtacagtgctttgtttttgactggagctgatgagttctcttgtgttttactctttttacagtgaaaccagcagtgtgtgtagcagcagtgacactgggctctttaccaatgatgaagggcgacaaggtaatgtcgatcccagctttgggaccttggttccgtgtttatggaaatatttgaataatcataggagtgactcatggagaatatggtgactgtctatggcagtggttctcaaactttaaggcatatgagagtcacctagggaactgttaaaactgcacagtcctgagctcctagaaatcaaataggtctagagttggcccctggaatctgcatttttcacaagcacctgaagtgattcttatgccagtagatcagacttgggaatcattggtctaggtggtcagagtgttgagcctgggacattgggaagtttctttttattagaataaagaaataggttcatgtgttactgtctttttttaggtgttaagacattattttcatatagagaaaatcttgtcacttttgtagccttatttataaatgattatagtgtcctaggtgaatatattatataaaacatcatcttcctcaaagtaaaactggagtatagagtcctgtgaataaggctggtatagttaattaccagttctttatttttactacctaaacactaatttaaaactttgcctatatataagggtattttagaaaatgtttgtcctctagacttgtgtggggccacatgccaataaaaattttatgtagcctttttggactgtggttttcttaatctaaataagggatttagggatttctaaagtctcttctcactccgaagtccaataatttttctccacgggttaagcaattaaaggacagacgtagtggctacatgtctaggttgatccaagtaggctccccagtaactgaagagatactggggctgtgagacttagcatccaagtcctgatttttggagaaggactgtggggccagcatcttgttcatgcctcgaagttgtaggcatagaggcagtttatcct

SEQ ID NO: 76956 - DNA, 1397 bp, Homo sapiens
atattgaagtacagagaaactagttattatacactaatgcctgtattcagttcatctatgtatctggtttcgtgagatgcttttagagtagcggttctcaaaacgtggtccccaggccagcttggcatcatgagggaacttgttagaaatacacatttttggtcttgcccagactagaatcagaaactctggagtaagggctcagcagtccatgttttaacaagccctcctgctgcttcagatgcatgctcaaagttgagaactactgtaagagagacagctgtttgtggtgtgtttttataagggaacactttgagtaactttcttagttgtaatatctcctgcttttcaccagaatgcagttttcattgcccattttggagatctccacagtgatttaagagttattatcctgcgtgttaatgacccatgaatctcatacttcatgggattgacatttctgagcaacttgtctggaatccagtgtacattagagactgactacattatgaactctttagatattcttgtaataatttccttcaattttgctattttgcaaggggtatgtggtggcagacatacaattatctattctttgttggcaggaataaactctagtggaaactgagatactatcactatagccagtagaaagaagtttgtactaccaacagtctggatatatggatctggttgtgactttgctgttaattaacaaatggccttgggaaaatggtataacttattgaaaagccttaggggattatgttatttgttgctgtggttattttttttttccgcagtagcttggatttctagtgtcaagatgatttctgtcccattaatgagataccaacgataaatgaagtatggacatatattctttattcaccttttatgataaaggcaaatatagcaagaaatccctcaggtatagctagctttgaattgagaaacatttatgggttttgaacctccaagtttataccactgagaatggtataggggaggcagtttgtttttgtaataaagatctcaggcttttgagttagtcaggctttgggttcagatcctggcttcattgtttactaaattgaccttgacttctctaggctttagttgccttgtttgtaagttggagttagtgtagggcttggaagagatgacatatttacagatttttagcatggatcctggtaggttgtaagggtttagtgagtggtagctttatttatttatttttagctattaaagcggtccagtctaacacagtatgacatttatgtgaaaccaggttggtgttccagttttcattgtaaaatgaatcaagaaggaccagaacaatgccttgatttatttaaaagtataatcagcctgtaattccagcactttga

SEQ ID NO: 76957 - DNA, 1168 bp, Homo sapiens
cttattgttaacagggatagctagcagaatagcagtacatggggtggaagaaggagaggttttacttttattgtttaggcttgacagataatgttccccctgccacctgtgttactttctttcagctcttataaaataagagccatccacttccatggaaacaagtcactttatcttgaaggtttccctttagcttgcctggaagggagtgagggcctgttggatgtgcctttaatgatttcaaatgaataggataatatttacttgtttaattcatcttcatcaccttaaagggatatttatcatttctagaagaggtcaccgctctgccccccttcttccccctcccccatctctcttctgcttttctaaattgtaatcataaataatgagtttcattcacagctccctgccagtgagctgctaattacacaaagtactgcttgtaatttacacagtaataaactgtaaatttaaacattacggcactttaagttaataatttttctgctgtaacaaatagctcatttttcacccatcttttcccttggcccccctaccatgtctgtctgtgaccaggaggcatagctataagaaatgcagaacatgaagaatatagtatatgaaaacttctcatttaactccactaccgcccggactctgacctcagagtaatttttctacagccagttctgctgaaatgtgtagcctgatgtttagcacggtccacacacatagatgaatatagacacaaatgtgtttgaagaacagccttgatgttcttggcattcacgcccgtgacttgtgttctctcaacacaacagttactcagatgtgtgttggtatgctttcccaggtgccatggtaggtaagcattgtgaatgtactcaagttaaatgaagagtgaattgccgttttccaattttttggaaatggttcgtttctgaactctttgtggtgttatgggtaagcttttacactataatcttgagaaccctgaatttaggaatcaattttatacaaatttctatttttatttcatgagatgatgtttgagggacaaagtacagagtaacaatttttgcaagtcacaaaattctcttgatgtatttatatttagtcagcagatatttacattttaccagtgaggatttggtaatgtcccagg

SEQ ID NO: 76958 - DNA, 2035 bp, Homo sapiens
ctttatgtgtgaagctttgtgatttttttggaggattgcattatcttggtgattagttgtaaaatagatgaacactgacaggtgaaaagttgtaggcttcctgtttgttgtgggtttttttgttttttttttttaacaacttagtagcttactgagttgatatacacgatccacattttagacttggaatcttcattatgaatttgctgtttcaaaatgaactagagtggtagaagacataactggtgtatatgtatgagatgattttagatggcatatagatgcccaatttttaagttatgtattatagtgtacattggaaaagatgtaattatggtatcaagcctgttatttcacggaaatatagtaaggacaaagctgagcaaaaataattgatatgaggaaaaataataagtaaacagtagtacaggttgtaggcagataaggaaagtcatgaaggtggtatgtgagagactgcagtttggggaacactaagctagagcactaatcatgtttgcatcagaggatccaaaggcagaaggggacctgtggcagtcacctgatccagatccgttatttgcaaatgacgaactggagatctgtaagattcaaactatttgcccaaagtgatacagctaatagaaccaagattggaacctctgtggcagatagaacagttgcttagtttgtattctcataaaacaagtttgaagttatcattccgggttcttccagtctttgtatgtcagagggtattaagttctaaactttttagagaggactgttatgttgtgggaaaagtccaaagaaagctagcaaacataaagtgagggatctcctttgatcctcacagccaccttttgaagtcaaatagatgttttgcagatgagaaactgaaattatactctgaaagcaatatttcatttagccctcataataaccctgtaaaataggtagggcaggcctggcacagtggctcatgcttgtaatcccagcactttgggaggctgaggcaggtggatcacctgaggtcaggggttcgagaccagcctggccaacatggcgaaaccctgtctctactaaaaatacaaaaaaaaaaaaaaaattagctgggtgtggtggtaggcgcctgtaatcccagctacttgggaggctgaggcaggagaattttttgaactcgggaggtggaggttgcagtgagctgagatcacaccactgcactccagcctaggtgatggagtgattaggtaagacagatagtgatatattcatttaacagataaggatagtaaagctcagaggttatgtaatttttaacacccagtatctcagtggtagattggaactaaaaggtgttctgattcttagtctagttctctttccacaatactatgctgctgttatgtgtcaaccggttattcttggaaacatttgccaggataaggaaatgaaaaggtaatttcatgctaatcttcttgggaacaagggctgatacatagttgataatcagcaggcacaagttcctgttatatcatgtggaaaaaactgtcttctgccatttaagtgactattgtatgtcagaagtttttgaaaaattgttgtttaataaggaatagctttttttttccgaggtgtgctagatcaggtttggtacattcataggcaaactatgaaatatgtgtgactttactgaacagtgcctgtgtttggtataacaagagttggatagtcaaaggggaaaagtaatcaaatgtaggttaccctttaggatcaggtccgtttcatgtaagccttactaaaatagtcttattcattcctgcagttcaatcccctgtctcccctttactccctggatgttcttgccgatgcttctcaccgaaggtgttcaccagcacactgctctgccaggtaattgtcttttagtagcggttatttgcttctggacaatactatattcctttctattacccctcaaattatagagtatgcttgtgtacagtatccaatttgatcctgacaatcttttgaggtaaat

SEQ ID NO: 76959 - DNA, 1659 bp, Homo sapiens
ggtgattaatatgccagccagggttaagaactgttgtcctaaatgcatatggttttgtgactggtgctttgtaatttgcttaatagggtctcccctttcataattggtgcaaactctgtactttggtatggtatgcaccattccttacgggaggtagacctctggacttctcttagctttggagaacctactgcaggtagagaagagtgttagtatctgcacggtgcccagcacatagttcttaataaatggatcaggggcagagttttgtcaggtggatatatggatagttggattgttggctgggtgtgtagatgaaatccataaaccaagtgttttggtttggttgttttggttgctagtattgggatttgctgttaaaggtgtgatacctggtattggtgttaagaattgctgctgcccaaacagcagatggtgtgattggcgttctggtagaggcagtggtattgttaagggcacagtcacaaacttgtaataagaagactagtgctgcaagcagtttttcccaaaatgagagatttgttgattgtgaaggatagtttttcttactattattaccaaagaaaatgatagctaggatttatcaattgctacatacaggtcagttgcatctatgtgattcatcaatcaccagttgcagtttttgagtgcaaaaacttttcatggcagtgttttagttttctccaactcaaaggaaaggtcaacttttagtgacctttcctttattttggaagataatttggtcaagcattaccattttaatttattctttctttaagctctgaaatagcaaagcactgatatcttcttttcatataggtcagcttcctttgtaaataaactgttttttctttgagaaatcttatttttagttgtggtaaggatggcagatatcagcctggtatgcaaatgttatacgtgtttcttaatgaatggatgaaaagtttcatagcttctactttcttcatagtccattggcataggtggtaggagattaagagtgtagatattagtgtcaggcagacctgggcgagaatccgggctttacccaggcaaatgacttaatcttcccatacctcaatttctacatctttaaaatggaaatatcaatactttttaaattggttgaatggggaccaaaatgaaataatatatgtaaatattgagcatcctggtaaccaatattatttttgttatgtagttactgccctaccccatccttaggataattgcaattttaaaaactttgagttggcttccagagtcatttgctaattagatgtaatactgattcttgaggtgcttaaatgacctcaaatggtctataagaggaggcatttggacagagttggggttaaaaaaaaagagagagagaccttcctgcccattagagagttgaaataggataggctgagctcatttgtaattcattttatctgttcacaaacgttatgatctgcatatcagagttgtgtgcccagctggctgtgccacttgacaaggagtttcaaagagtaagaagaagactcacttcatgctattaattttgacctttggagccataataaacagcctgaggttttacctcagggcttgggggaaggaaccttttattagtcctgtatctgttgatgctgt

SEQ ID NO: 76960 - DNA, 1050 bp, Homo sapiens
taaactagcttgccattcgcagacagactgttttctctccttaggagtgactctaaagatctttgttccaaatctaacgcagtcacttcagttattttttgccaacattggttctattaaacatgcatgtatttctcaaagtatttttttttccctaaaagtacattcctgccccaaggacatagtgatctgcccggtttcctaagtaacactgcagttttaacaactcacctgatctttcagttacctgcagtaaaaaagaaaatagaaatgttgtgtttatgcttggatagaaagaatcctctttccattaattgttaatttcagcattcaccttcacacttgtaataacaatttaatgactttttctgagataagaattttttttaaattcttatttaaaaataaaaattttttgcttttagtgctcattcttccaactctgccctggcaaataccaccacagtggggaaactatgacactcttaggggaagtactgatcccacacttacactatgaaagaagcgtataccccaggtttcgctggcctgagtgaagattgtccctgaggccctgatcagatgaaacagaacaggcatagcctgtcttttctctaattgcatatatactggggaacagtatttttatctaaatttatattcatttaatcattctattattctttaggttgaatacttagatctctattattgactaggttggctctgggaatttggtagatttttcaactcagtaattttcgaagtaggtaggtgcttatcagaattacccagggaaaaatttcaaaataaatatgttactgattctgctcccactcctccccagcctactgaattaggatcttgatagggacatgtgtatttagtaaaagctccttatataattcggataaccatttgccactccagttgagaatgaagttttaacttggtggagactttaacttatacttagccttttatacaatgtgcctaattgaaagatcacttcccttaacgtattacatggtttgcaacccaagaacaacc

SEQ ID NO: 76961 - DNA, 1080 bp, Homo sapiens
tgataccctagtttctttgttattcatattctgtaacctgaaaagctgtgcagctgcagataggacttggctataagatccatcaaggcagagattgtctcttgtttatcactatatccctagtgtttagtacagtgcttggcaagagtaggtgctcagtaaaaatttagtgaacaatgaaagaagcaacaaaactgcttagtagaaaggaaatagtccacaaaagtatatacttttacaataaaataattcacttaacaagtttctttacttgatttccttagaaagtcttcagttctttcctgttataaccagaggaatttacaaaatctgaaggatttaagatattcaaggcaacagttagaggtaggaatggggtggtagaagtagaccatttaccacagagagaagtaatatgctggaggcatagcagtcaagggtcacttaatgtagagacaattgacctgaaggcttaacaatatcgcctagaggagcagggtggtggtggaaggaccacctgagccattgaacccacaatagcaccctaagatgttgtggtataataacctgtgtgcgtaataataggtaagtaatacttattctcagtttgctaaagtaaataagcatttccattaaaagttgttaaaaactttaacattttagtgtataaatggtttttttttttaaattccaaaatgacactgtcattcctcgaaagtgtgagataagtagtactgactagatccataaaagagttgataatatgggccttttcccatgttactgacatatatcaaacacgcaaaatggtgaaaatgatggatgggggcaaataaaaggcagtatttgtgtagttcagctcaagttgatactccaagaattagtatcttaatatacttcttgagtacttatgcttctcattttgcatctgtctcatgaaactcagcatattgtaaactgtgatcttgaagaagcaatgttttaaattaactttttattgaaggataaacatacagggaagagtacaaagaaatatacacttgataaacagtcacaaagttacagtcaagtaacaagcat

SEQ ID NO: 76962 - DNA, 1025 bp, Homo sapiens
taaagatttttattttacttcttaatttgcatacagtacaatacattcttggggaacagtggtgaactaaaatagcataccacgtagttcagtgttaatcccattgtctttcacagaatcgtttgcttttaaaataagctgagtattcagatgaaggaacatattgtcacataattaatatttttatttttttacctgtaaaataaaaagcataattaatatttttaaaagtcacagaaactaaacttacttaacttgtgatgtagacagtattaaaaattcagatttacatgacaggaggttgaacttcctattaaaattctatgcaaatatctgtgttcatgcagcattaaacttttcaatgtattacctcttgggagtaagtatttcattagtgagtttagagcaattgtggttatagtttttatgaaaaataattgtataaaaataagcatgtaatgcaacacatatttattgaaattaatcttgaatgtctgctacactgaaatcaggtaaaaagtttagaatgggtgtgtattgtggataaagagtgagttattattaattctgaataatgttgtcccaatgcttaatggcaaaagatggtgcccattttgtttatgtctgtaataggttaaggatttaatctgggctacatgtaatgtcttacaataagaattaaaaagttcaaaccatttttcttcttcttacatctgcagacaggcaaatgtacactggggaccaccatgttcacgtgacatcaagaggaagcggaaaccagtggccacagcatctttgtctagccccagtgcaggtgattacatgcagttatcatttattgagcatgtaccgtgtgccaggcactaaattatgtgttttgtataccttttcatgtaatgtttgtgatagtgtaggtcattttattcccactttacatgggaaaactgagactacaagaaataattagcctagttcttgctgactctgaagtctgtgctttttcactgttacatggctatctagag

SEQ ID NO: 76963 - DNA, 1102 bp, Homo sapiens
agtccttatcaatggaaactccagatttctttatcaaagggaggtgggtgggcatgaatctagttggaaaaggggacttgaagctaagtttacatggcactttaagactgagaacatatcaattgttcataatcaggaatatggtagagggagagcaggtgtagatgatgggacgggaaagtgctgaaaccagcccagcagacctgtgagtcgcctctggttctcacgcagcagtgtgtgtgtgctcacagggatgttccacccctggttctcatgcagtagtgtgggagagtgctgaagccggcccagcatgcctcttagttgcctctggttctcatgcagcagtgtgtgtgcttacaggagtggagatgatgggatgggagagtgctgaagctggcccagcatgcctctgagtcacccctggctctcatgcagcagtgtgtgtgcttacagggacttcccaggctgcacttcccttccctgtgggctgcacccgtagaagtatagaaaatgtaatgtctgttgaatataaaatcgtaccactgaattgttctagtgatgaggttagattttgttgtcatgtgcattgtcaccatagtgacccgtggcatatatttttaacatacttggttgggtttgagagaaatctgtggacgtaattttttgtttgtgtcaagctctatgactcatgcagtgattggtcccatgatcatggcctattagtgaaaacctccaaaggtcaggtggccaaggtgttcccacattttttctatataacttgtttcctaatagtctgcctttctacctatgattaaaaataatttttatatacaacattatttacatttcaaacatctctacgaagtcatgccattttaaggagatgaaaacagccacagagttgagtgacttgctccaaatcacataactaagccaggactagaatcccagactttcagattttctctgccctgggttataatctcttgtttttcagtgatagacctgagtcagtctgagatgcttatttatgaaacagtataccatgaatatttattatctttcttgggcatgcttttctacacattttgaatactttcaa

SEQ ID NO: 76964 - DNA, 1033 bp, Homo sapiens
tctgatgccttgatcttggacttcccagcctccagaactgtgaaaagtaaatctctcttctttgtaaacgacccagtctcaggtgttctgttatagcagcacaaaataaactaagagagttctgtttgtaaaagagagtgtacacggagctgtacacttatgattgtgcatttttctggaagtgtattgtattcaataaaacaaggcaaatgaaagcccaaaaaagtgtgtgagcatggagaggtgtttctgagtgtaaggggatgtctgagagctgagcggagggcatgtgcaatcccagctctgctttaagcccagggcctcagcaggaagtattgcacagggtgcctccctcctggactgtctgagagctccagccctcctgcaatttggggatccttgagggcccatggcattttcttttcaaataggctgtcaggccatgtatattctccacgttgtttgaaaagaaacttccacagcatcagatacactgggattctgaccctgagtcttctggccggcatctgttctgattaggatactcaccctcctacacgatatcactggtgtggtgtttctccctcttctcctaacctcaaaaggcctgagcccctgactggccagtgtggagtggaggaaagaccccaggctgcagggaaatgagaccagtggagtaccagagtccaggggggagggactcaggcaggaatgattgtgaccagccgatggggtagaacccaaagtatgaagttgattccttgtggagagacgaatccaggggtgtgcagcaacactgtgtaggatgtttgcaacccacagcttcagtggcagcatccttgcaggtcatttgtgaattgcgtaacacgaaatgaatcatgctcctgtgaagacatatgcttttcgtttaagatattaaacagtagctcctgtgagtaacacagatataatcctatacatttatgaatgcattggataaagtactacttacaagaactccataggattgatatccacactgcataggtatgta

SEQ ID NO: 76965 - DNA, 1022 bp, Homo sapiens
tccccttcctcagccctctgctgaatgccttgtttcttttgagcaaagatctgcctacttctgatgggccggaggaaggatgcgtgtgacagagagacattgagggagcatgtacattggggagggcggtggagttggccatgaatgcataggattcagaaggagacagaattcgaagacagtagacaagcaagaaacaggatgcttttggcctgactctgcagcgcccttctctagaacttgtctccccaagtcctttaagcgacttcttaaaaatgattaaaattctttttggttccaaatttaagggaagagatagcagatatttagaccataatgtcctccttcaaagtaaagcccacaccacaccttgactgcctccattctggtgttccccaacacctaccggccatcatcgagtctctgtccatttctttctgaagtgagaccctcgtaatgctcttcctgctgagcaggagctctgcccagaattagcgaggatgccgcacagctcccctgggagcttctgtcgtagagtctggtggctcttgactgaatgttactggggtggggagccccagcttgacttgaatgttcaacctctggggtcctccagtgacactacagcccctagaggtgctgccagtgcagggtctaaggaaggaccccaggaagccaggagagtacaaattaagaatgggctggaactagccaaatctggcccggaatcttcctgaacatcctgcctgtttgcccttgaaggctttcaccgatttctagagataaatcaaagacgtttttagcatgtatgcactggtgacccctgattggtctctgtctctggtgagtttccccttcctcagccccagcagccttagacctctggggacagtcacagacatggtcttccctcagaggagaggcccataggctttgggtggccctgatgtcccctgtcccctggcatgggtggggtgggattatatccttttagccccgtcagctggtatggcttcgtccct

SEQ ID NO: 76966 - DNA, 1838 bp, Homo sapiens
actagggttccaagcataggcggtgagatgaggggagggatttaaaaattggttttgcataaagtttagtgcttcttcatatcctcacccatacctgcagcccctatcaccacgcgcctcagataacaaacagaccacctgaaatttgtctgtaaacagcaggtctacacccttcttgtttttttcaccaaaacgtgagccagccagcggccatgaataaaggtattgatggctgaatcagaacaggggggccaattataggcattctgctttgggactttacccaactaatcatgctcagcacctctgaacagctcagccagccatacagacacacacacactcacactcaggcagaccacacacctacactccttcctccaaaacagtcaaggagggacaaaaggacaagggcaaactacagcaagctggaataaaaatagaggggaaaaaatgaagacaaaggaaaatgctaaattgtaaaacacgagagaaatctcatctaaaagatcacgcttcttcaccccttccatcctctcctatagcatttccttacacctgtatttccttgttctttgcccttcagaaaccaagaacacatcaaaaggccaatgattctcaaagaccctttatcaggcatcatttttaaagcataagccagatgaaaatgccaaaaaaaaaaccaataaaaatttcaaaatgaattaacaaaaagaataaaacataaaaactaatttatgaactcaagccaattcaagccattaaaaataaaagaaccaagttaaaaccacatttggtatttggggtttttaaactcatcgtttccttgatagaaaagattgaattcaatttgacacttcacattcgtacagttttaaatgcaggattttggtaaacaccaatggtcaggcacaaggctgactgcccctataattggtaggagaggtctctgatacgattttaaataaaaattgatcacatttgaaatcagaagataaaaacaaaggcttgttggagtttgtttaactgccttctgacctctgaatgaaatgacattgagaaatataataaaattttccagaaaaccattccctgaaaaggttcagtcccggggatgctgaatgacaatattgaatagagtattttaaagtcctaaggaacaaaggaaagacattttttttttaaaaaagaaactttcagaccaaaatgtgtataggtttaaaagcacagcaaaatgaaatgaaaaaattctatctctgagccccaggaaaacttttgttttagatttatacaattttaactcaaactcagacaattctgaatttaaaacatttggccaataatttttttccacctagtccaactccatagtgaacatcccatgggctgattaaccagtatgattttccttgatttaagaaaagagttgactctttaagccacaacctgtcaatggctatttccagggagagaaggggaagtcgggaacctggaacagaatggcccaaattctcctctgagtgtggccatctgttatcctggagaagggcaggacttccttctctccctctctggggtctgccccacccctacccaggccagaaaattgcagagaggctcttaagactgaaatcctctgggcaaaccagagggacagccacctagcaggtgcccctgcagtcccctttgcaccatggacgaaccaatcccaaggcacggcagcccctgctggaatgtggtcacagccagacctcagcccagccaaggggtatagcagtcagcaggaacatgtttaaatagcagagacccctgtccactgtcaccccatcttaaagggg

SEQ ID NO: 76967 - DNA, 1005 bp, Homo sapiens
taaaaaccccaaataccaaatgtggttttaacttggttcttttatttttaatggcttgaattggcttgagttcataaattagtttttatgttttattctttttgttaattcattttgaaatttttattggttttttttttggcattttcatctggcttatgctttaaaaatgatgcctgataaagggtctttgagaatcattggccttttgatgtgttcttggtttctgaagggcaaagaacaaggaaatacaggtgtaaggaaatgctataggagaggatggaaggggtgaagaagcgtgatcttttagatgagatttctctcgtgttttacaatttagcattttcctttgtcttcattttttcccctctatttttattccagcttgctgtagtttgcccttgtccttttgtccctccttgactgttttggaggaaggagtgtaggtgtgtggtctgcctgagtgtgagtgtgtgtgtgtctgtatggctggctgagctgttcagaggtgctgagcatgattagttgggtaaagtcccaaagcagaatgcctataattggcccccctgttctgattcagccatcaatacctttattcatggccgctggctggctcacgttttggtgaaaaaaacaagaagggtgtagacctgctgtttacagacaaatttcaggtggtctgtttgttatctgaggcgcgtggtgataggggctgcaggtatgggtgaggatatgaagaagcactaaactttatgcaaaaccaatttttaaatccctcccctcatctcaccgcctatgcttggaaccctagtttgggatcttggtgatgcacagtaaatgagctgttgtatgcttttgtttttgtcttcctaatcgatcagcagaaaacatttccttttgatggtgaaacaggacttcagcatgcagagcgcagtatttatcctcttacttttagcttcactctttgtcatttgtctcttgggtttgttgacattgtctacctaa

SEQ ID NO: 76968 - DNA, 1059 bp, Homo sapiens
gtaaatttctggtcaattacttcctgagaaagaaaggggagggaaaccaagaaggactccatcccatcaacaaatgggcttattcataatgcaaaggccaggtcagttgctatttggttatatgccacttacacaggaaactgtcttaatttcagtgaattatcactggcttggagtacgggatggtgggagagcagtgggtaggaaccccgtaacagtcagcagtaagctggccttaacaactgaggaagatgtgttatactcaggataatcaacagctcatttgccatgaataaaggcatcgctcaagccacccccaaacactcggtgacagtgacacacagattccaaatgttctctgtaagaaaaaacaccctttctcctaatccttcttaaactcaacaagactgattggtttttattattcatgaattaattttttactcagggtccaacaagggaattgaagatataaaatttctcaccgattgagggggaaagcagatctcaacctaagcagcacagccagagtcttgcttgcattccttgggggtggaatgatttgtttgtaaaatcagttaataatcaattaataatccaaagctttgaggtttggttgtttttttttttttttcctgaggaaaagaaactatgagtaagaacatgaataagaatattgagatggaaaaaaaatacagacagctatgggaccctggaatattaggtgaagcagagctgcttcttcgttccacgatacatatacaaaaaaggaaatgagagaggaaataacagaagcattgatggattctaaagtaacgcacagatgagcatggtctgtaggtgagcaggcttcaggtctgggagtcgccatgaagcatcacaagaagggacatggaaattcagagaggtcagttccctgatgacctccctctaatcacctccatagtgcaggttgaggtactcaggagcagggacaacggcctcatagaagccaaatggccaagaaggcgatcaagggtggagagatgactttgcctctctcttcacacagttcttctc

SEQ ID NO: 76969 - DNA, 1557 bp, Homo sapiens
tcacgcctgtaatcccagcactttgggaggctgaggcagatggatcacgaggtcaggagatcagaaccatcctggctaacaggatgaacagtgaagccccttctctactaaaaatacaaaaaattagccaggcatggtggcaggcgcctatagtcccagctacttgggaggccgaggcaggagaacggcgtgaacctgggaggcagagcgcgcagtgagccgagattgcgccactgcactccagcctgggccacagagtgagactccatctcaaaaaaaaaaaaaaaaaaaaagaatgaaagaaagctgaaattctagatgcaatgagcgacacataacatcggggtgaggagtgcaggcacacacccagacagcctctgtgcaaatcccagctttgtcagctgtgtgaccttgggcaaatgacttaacgtctctgtacctcagtttctttacctgtgaaatgggggatgataataatacctacttcctaggattgttgtgaggaagtgatgatttcatacatgaaatattcttaggacaaagcctgacacacagtaaatgctcaataaatgtcaattactacaactattactattacaatcgcccatctctggccttacactttatatttagctctcctatcccccctcagacacttttcttacatcaaatcctaaaatgattccccagagaattaggtggcttggagaagagcatctgaacaccagtatctggctctgaaaatggtgctggctgcacggcttctgcatattcagcagctggaggtcattcctcaaactgaatcagacctgagcactttccagcccgtctggaggtcaggcaagccacggaggcagtgagtgtgtggtgtgtaggtgtgcatgcatgcatggtggggcttgggaggaataccacactacaaggcagctgcagtgctaaattgcatggagcagggctcggaaaggtgaaaaccagagctgctttctaaagccagggtcctgagctcacccctgagcttctgaaggctcaccccctgggattctccatacaccccaccaagggaaggctctgttgcagaactgtcacccatggggtgcagtgccagtgagtgcctgtagggggctctagagctcttccattccccgtacccggggctgtgagggcatcaggcttaaaacaatggttgtgtttaccaaggctgtgcgactgtgctgttctgagaggtgaatgaggggaagctggggtccgctggtaccctgttggcgagacccggttcatccatgctctcaactagctctgcttcaggtttggagtcctaaccctccctgatccaccacctaacactgatttgggctgcttcccctcagcctcctgggagaccctcacaagggtcagcctcctgtccttgtgtggggaggtagggagagctgctgctttggcctccagggtggggcaagggtaacttccagtttctggggtctcaggttctggcagtccagcaccccaacccgtttgtcagggaaacatcaggcacagacaggttcccaaaaagacttg

SEQ ID NO: 76970 - DNA, 1036 bp, Homo sapiens
atctgcccacctcagcctcccaaagtgctgggattacaggcgtgagccaccgcactcagccatgtttatcaacttttaatctttacagcaatctaacgtggaagatcacagcagaagaggaatctgagatacagagagattgagtcatttatctggggtcacagagctgggatgtgacggagccagtgcagtggtgtggtaataaatgtttaatggccagctgggggacggcggatctgtagcatttgccaatttccgtggtgtaaatactcccatcatggctgttctcaaactaccagtgtgtcatcatggaatgcaggcttgggaagagacaggcagcagctcagcatcgcatggtttttccaccatacattaggtgtaaattgatggcaagaacgtaaagtgaaatgtactaagatatgaggaagtgaggagtggtatctattacctttgtttttaatacaatgtatttaattataagtttataccatttaatttttaataatgattgtgtttgaccatcagcccacaaaactgctgaatatttaacagtgagctctcctgagctggtttgagctggttccagcacaccattgggaccaggatttcaattcagttagtctggagctagggttttccctcttaaccccaacactgcattgcctcccagaaggatataatgctccccaagccagagctgcctccatggctcaaccagggcaaaaatgtggcagaaccagtgctctcctggttacctcttcccaggcccttctttctgcctcttttcccccaagggctcccctttaactacttccaatcccctcaggttagctcaaccaacatttattaaacacccactctgtgtcactggggacacagagatgaccttggactctaggacctcatgatctaggagaaaaaataagcaaatattcaaatccaacagattgtaaaccagtcaggggcatgagacagagaacagctgcaaggagaaagactaattcccccagggagaagtcagggatgcctccacaca

SEQ ID NO: 76971 - DNA, 1025 bp, Homo sapiens
cgctacattgcccaggctggtctcgaactcctggtctcaaacaatcctcctgccttggcctctcaaagtgctgggattagaagcacgagccaccatgcctggcctgccccaaattattttgtctcaatttttgcccaaattttgtccaataaatctattttggaattactttaaagccagcaagcccagcctccgtaaagaaaatatgactctgtgactgaagctgggattcccagggtaaggtcaaactccacacattactgacaccctggatggggtacctggcgctttggctgttttgcgtgggtagcatcagagggcagagaaggaaagtcagagcggtcactccaggaggttctgctgcccagactggccctgggggactggcctgctgggtgccgttgactggggtcttggccgctagggggtcctgggtcacctctacaagccccctcctgaggcatctgtaagatggggggctcaggccccacaggcagcctctggaggtgcaagtctatctgtgacctgaatccgaaggccctgccaaaggaataacaatgagaaatgtcaccaggcgcactctctttgatgtgtcccgactaggggaattggtgtcagaagacacacagaaaagccagatggtattttccagggtcatggtccaccatggaatgaagcccagggcccctttcatgtcctttcccgagtcagtccgtgcccgggcggctggcgtgggaggagaggccgcagagacacaagattaatggcttcctgggcaggtgagcaaccacccactcgggtagtcacgatcctccagcgactccctcggcctggctccatgaggcgtgaagtggagagagaatctagtggtgaggccaacccttgccaacccaggccgagcctggctgctgcatctaccgccagcgctggctccgggagttgagcctccggaagttgagcctccgggctaagcctctgtctgggtttgtcctgctgcaggcagaggcacaggcttggtagcatgt

SEQ ID NO: 76972 - DNA, 1045 bp, Homo sapiens
aatcagggacagacttcaatggaagcggttccttttggaaggcttccggctcttgtcatttccctcattttgttcaaatctgcaacggtcttcagatggaagtccatctgccactattcagagttctctgccctgtgctctttctccccagattatgttctcagcttgctattttcttattcaaaacttctaaatctctacctttcccagaatggcttctctagaagttttcccagaaggaaaatgtcaaaggacggcagtacacgaagtacccagttgaagggctcccactgccaggctaattctcaagagcagatgaggtaccaggagcaggagggggtgtgtatccttcctcccttctgcccccagctagactcttgcaagctctggctcattcggccctcccagccaaagcagcatgggttctgttgggtaatttgcaggtttggctggtaagatgagaaaggtataggcatcttgctgggccattatttattccgcatggatcagggactgagcctgacctgagacggccacaattaccccagttccactggacacctatatgacctcccaccgagtttgctccttgaaacggcagcatctggtcaggagcagcagggtgtgactgtgaagtcaggagaccaattgtgaccaaccggtatttatacaccctagtgagcgctgtccccttcctcatggtcaccctgggcatctcttcccaattcccagtgatgctggctttcgtcaaagcatttttggagttcctcttgggagctgcctttcagcccagattatctgagaaatagagtcacatcctcactttctttgtaatcaaaaatctctttgctcagctctgtcacccaactaattccctagacttgcctccaaatgaccttggctgcattaaacattaaatccacccggaatggaaggagacttgccatcagcgagcatattcaaaggggatgatgtgggctctgagggcataacgaggaggaatgagcggcggggacattgctaggaagcctcctggagtgcacat

SEQ ID NO: 76973 - DNA, 1027 bp, Homo sapiens
tacatttgtgtcccgctcagcaaaatgactaaaaagtgacagctagttgtcagcaaagtctcctcccagcataggctgatgaccagcagcatcagtatcacccaaagagtttgttaaattcagatcgctggtctctgcccccaaccgactgactcagaatttctgaggatgagcttctgcctgcattttaaggactcctagaaagagaaaatgtgctgtgactcctggggccgacggcacatcagcttatcctttgaagactgcattttctctcacctgattctcccaacagccactggaggcagggagggccaagattcatttattcatttgttcattcattgtgccaacaaccacgcatttattgtggagcctttaggtgccagacactggtgaatacaacacattccctgcccgcaggaggcggatcaagacagagcacgcacaagtaaacagactaatcaataacagaggactctccctacccaattagtctgtttatttgtccacatggcattaatggcttcttagcactacatcttgtgttagacaaggatgggcaaggatggggcactggttttttgtttgtttgtttgtttgttttttgacgaagtcttgctcttgttgcccaggctggagtgcaatggcatgatcttggctcaccgcaacctctgcctctgggttcaagcaattctcctgcttcagcctcccaagtagctgggattacaggtgcctgccatcatacctggctagttttttgtatttttagtagagacggggtttcactatgttgtctaggctggtctctaactcctgacctcgtgatccacctgcctcagtctcccaaagtgctgggattacaggtgtgagccactgcacccagccggggcactgttttaaccaatgtgacatttgagtagaatctttaatgaagagaggaagggagctaatgggtatctggagagttaggggaagagctccccaggcaatggggattaaatgaactagatatcagaaaaccattgag

SEQ ID NO: 76974 - DNA, 1037 bp, Homo sapiens
tgatctgcctgccttggccttccatagtgctgggattgattacaggcgtgagccaccatgcccagccttgcatcctgtttttaggatgcttgggtataagtggacaaaacgatagcatatggatggacccaagaagaaatgaatgggccaggcgcggtggctcttgcctgtaatcccagcactttgggaggctgaagcaggcagatcacctgagatcaggagttcaagaccagactggtcaacaaggcaaaaccccgtctctgcgaaaaatacaaaaattagccgggcttggtggcacttgcctgtaatctcagctactcgggaggctgaggcacaagaatcacttgaacccagaagggggaggttgcagtgagctgagattgcaccactgccctccagtctgggtgacagagagagactctgtctcaaaaaataaaaaaataaaaaaaaataagaagaaaagagttggagaagtaaaaactcaaatatttgctgtgtttatagctctgaacagccccctctctttctgggaaaggcacataagagagcatatgatttcacagaaagaccccaggatataaagccagaccaccagatcattcacaatttggatcctggcccttcaccagtgggcacttaaccaacctgtgcctccattctccatctgtaaaatgggaacaccaagtttcctctgcaggtttcttggagggattaagaaagctgtgtatgagtgcacatggacaatttttgaaaatattgtaaggttcacagaaaacttggtaactgtggctacttttagggattctgtctaggggaccaaggattaggggaggaaaaataccctaccagtcactgcctgcactctcatagtgtttgacatttttgttacacatgtgaatgtattacttttttttaaaagactgaaaaaatgaaacaaaatgtatatataatggctcaaaaatggtaagcaatacaccaagtctttgtttgtttgtttgtttgttttgagacctgtcttgctctgtcgcccaggctgg

SEQ ID NO: 76975 - DNA, 1055 bp, Homo sapiens
agttagtttggaggccaaggtgggcggatcacttgaggccaggagtttgagaccagcctggccaacatggcaaaacactgtttctactaaaaatagaaaaattagccaggcatggtggcaggcacccgtaatcctagctactagggaggctgaggcacgagaatcacttgaacccaggaggtgggaggttatagtgagccgagatcgctccactgcactccagcctgggcaacagagcaagactccatctcaaaacaagcaaacaaacaatcaaacaaaaactgtcaaggttatgaaaattatggaaagtctgagaaactgtcacagacaaggggagactaaacagacatgacaattaaatgcagtgtgggattctgcatgggatcctggaagagaaaaaggacatcaatggaaaaataaatgaaatctcaataaagtatggaggttagttcatagtaatgtaccaaggtaagtttcttagttgtgacaaatctatcatggtaacataggaagctaacaaaagtgaaaaccagataagggttatacaggagtcctctgcactatcttggcaatttttctgtaaagccaaaaaacaatttcattaaaaagctttttcaaaagtggaaaaaggtcaggcgcagtggctcacgcctgtaatctcagcactttgggaggttgaggtgggtggatcacctgaggtcaggggttcaagaccagcctgacaaacatggtgaaaccctgtcttactaaaaatacaaaaattagccacgcatggtggcgggcgtctgtaatcccagctaatcaggaagctgaggcaggagaatcacttgaacctgggaggcagaggttgcagtgggccaagattgtgtctctgcactccagcctgggtgacagagccagactccatcccccaccaaaaaaaaaaaaaaaaaaaaaaaagtatgtaaaagccccacctggctctgcctcttggaggagagaggaggcgctcacttggcccaccgcccacctgtcctcacgaggcacctgcttctccagtggctcctcccttatgg

SEQ ID NO: 76976 - DNA, 1568 bp, Homo sapiens
agaagacctattagctcatgcacttagaactgtggcctcccaactctcccattaatgtcggaactgcaactttgtagtttacatttcaagttttaaaatataataaatagcacgagtgtcttctgagttcttattatgtttggtagaaagagcccagtgactaactgatatggtgtctgctctgaagctgtgtgtcctagagacagccacttgccctgtctggcttcagtcattctttgtcccttcctggaaagcagagagccctcaccatctgctgggggggcctgaagatacatgaaacaggaggtaagacagttggctctctggcaggaagctggaccattggtcctgagatttacctgggaagctgcccgctagtcatgagccttttgctcatttgctcatgctggtttcacaggtaactcaagggttaaaaatgaaattacctagagaaaaaaagtctacattacaaaatgaaacactcactgtaatgcaatggcctgagaccaatatggtgtgtaaagactgagaatccataactctagcctcttgccccgtgagtcagacccctagccgaaccccagtcctcctgacccatgagacagaccctctccatcccaggatccagggctctgggctttcctgcccacatccaccccagagctgcctgccccctctgccgggcagctcaggccagcctaaactggaaggggcacagggtctcatggcccatgtgcaagtcttgactttgcccttctttcctccatgaccttcagcaggttcttgaccttctatgagcctacagtaacccattttactaccataactcatggagttattgtgaggatcaatatagaatacgaccttcaaagtgcttcctgccaagttgtcacaacctccccgccatcctcactctggcatttcacagccccagctcctgtgagaggaagtgaatgtcttcagggtaatcagtctcaccaggggcttacccagcaatgaaactgagaaggaaccccaagttcatgagaatttccatgtcttatcccagctaaccctcatgaggctcgggggtgaatattctcacccccaggataagaatgaagcatggaagatttccttgttcaatgtcacttagtgggtagggggcaaggccaggactgaacccagcaccgtgtcccccacccttgattcctgagttcgaagctcgatctcaacattttgcagactctcagccgtgtgcggtggctcactcctgtaatcccagcagtttgggagaccgaggcaggaagatcacctgaggtcaggagttcgagatcagcctggccaacatggcgaaaccccatctctactaaaaatgtaaaaattagccaggcacagtggcacatgcccatagtcccagctactcaggaggctgacacaggagaatcgtttgaacctgagaggcgaaggttgtagtgagccgagatcgtgccatcgcactccaggcagggtgacagagtgaaacctcgtctcaaaaaaaaaaaaaagtttacaggctctcaacatcatgattccagataaaaatagat

SEQ ID NO: 76977 - DNA, 1123 bp, Homo sapiens
tttaccatcttggcaatcagaattcacctgaaatcaatggcatgtcttagtttaatttaattagtggttccagaaatcatggtgtcccttgcaatagatgatgtcataaattcaatgacatgtgataaataagtgtagctgagactgctaggagttcaccaaaagttaattaattttcttgctagacaccaggaggactacatttcccagtcaccctggcagttggctatggccatatgactgggtcttggccaatgggatgtgggcaaagtaatataagccactcccttatctggcccataaaaatctcccacagactcctgccctccttccccactccactccctcccctcctgtctcctattcctctctcttcccccatcttcaggccagggggctccaagaccctgggggatagcagagccacaaattagcaggagcctgggcccctgaacaccttgtgaaaggccacctgccaaacgccctcaccaaaatgtcctctgggcaagacctgcttctgccgtgttaagcaactgaagcactgggattgtatgaaataatgacaagtgtcatcccccctaacatgataagtaaacagccaaatagtatcaatgcagttagtggtgagtgctatgagaaacagcagggagggctgggtgtggtggctcacacctgtaatcccagcactttgggaggctgaggctcccaaaattagctgggcgtggtggtgggcacctgtaatcccagctactcaggaggctgaggtaggagaatcacttgaacccaggtggtagaggttgcagtgagctgaggcggaggttgcagagatcacaccactgcactccagcctgggcaacagagtgagaccctgtctcaaaaaacaaacaaaaaaccagcagggaggacacagcgtggtgggtcaggggagtgtccagatagagctgccagagagggcttctctgaggaagtgacatttaagcagatacctgaagaaaagagggaggggccgcacagggaaagctctatgttggagggacagcagggaaatctgttgctggaagggaggaggagggggaggaaggaggtgaggagggaggggcaggcagaacccccacacagccag

SEQ ID NO: 76978 - DNA, 1813 bp, Homo sapiens
ctctagtatccttcttttcagtagctattggagttctgacatctgtaaatttagcttaacttttcttaaatctgtttttattttcactctatatcaagcagtgatgtggcataaatatcctacctcatggctgggtgcagtggctcacacctgtaatcccagcgctttgggaggccaaggtgggcggatcacctgaggtcgggagttcgagaccagcctgaccaacatggagaaaccccgtctctacgaaaaatacaaaattagccaggcatggtggtgcatgcctgtaatcctggctactccagaggctgaggaaggagaatcacttgaacccaggaggcagaggttgtggtgagccaagattgcgccattgcactccagcctgggcaacaggatcaaaactccatctcaaacatatatataacccaattactgtcattgaacacactcagtagcctccagatggctttaatcctcatagtagccatggcgctgggccagagagctttgtggttagagctggactgtttgggtttgaatcctagctctgccccttatgaatggggttatttaacctctagatgcttcagttttgtcatctgtaaaatggggatgtgaattatagtattcatcgtagtattcatctcacaagatggtcttgggaattagtgagttaatgcagaaaagagcttagaacaatgcctggcatacaggaagtacttaataaatattaagagttgtttttagcatccctatttggtaatgaggagacagcttccatttagattctttaaaatgtttaatgctaaagcaagtaagactgtcttgctccctctctccttctgtcattcatccatccatgcatcttcccacccacccatttcattatgtatttgcatgcctgttactttcactgacacagtcccttttcaggcaaaggggtcccatattcaggcactgctagaactgactgccaagcactagcttctctcctgtgaaggacgtctgaccccaacatacattgcctgtctttctgtgcacatgcatgtacacgtacacacacatacacacacacacacacacacacacagctcctgcagaaattgccatattcttagagacatcctatatctgccttcctggctcagcttattgacccagggtgtgctcctgatccaagctgggccagtgagtctctcccattagatttttggtgtcagggctgcctctccagggacagaggcagtaagatggacagctcaagagctgagcaaggtcattcttccctcccatgtgcagtgagagagaagaatatcgaagctggcagcagagagaaggaacggttgaggcagagagtcctagaagccccagttactgttggcaattcctcccatgcccctgcagcatctctgttcaggtgaacgagcatggcctgattccctgacactgtagtttactcaagggggcttctcgcacttaaacaaaagagtagctcacacactgtcactcattcaactaccattgtctttaaacaatttttttgtttgtttgtttttttgtagcgacatggtctccccatgttgcccagactggtcttgaactcctgggcttagaaaatcctcccacttcagcctcccaaattgctgggattacaggtgtgatccagtgtgcctggcctcaactattgttctctgaatatctactgcatgcttgacactcttgcagctctgggaatatgttggtgagcaaggtgaatgggtccctgtcctcaaggagagacaataccatagttcattgactccgagctgtacca

SEQ ID NO: 76979 - DNA, 1043 bp, Homo sapiens
caggcagaggaatggactggcctgataagcgtccagcttgctttcctctatggggtagaatctacccaccacacccaagaatctgggtcaggctgaaggacggcccccagagcctcatccctgctggggccatgcatttaagaactggaacaagcagctgggccacttaatggctacaagcctgcatgctggtagcagacgtgccagttctatccctaattgctgctggctttgagtaatcaggtcatcctctctggacctcagggtcctcatctgtaaaatgggctcaatcacagcacctccttcacagagttgagcaagagccaatgaaggcacaatgcttagaacagcgcaggtgacaagcaggcactcagtggatgttgcctgaggctgtgattcttctgagaaagtccagcagtgggcaggcctgtggttaaacccagcaaaccccttccctcatccaaggcccccagacctagaattgaggatgattcttcaaggaacttgccatagaccaggagggaaagaagctggctgggcaaattaagaggataaacaaaactgacatgggaatccactccacagaagaaaaatggtttctgaacacttgagagattcttatgtacatttcaataattaatttgctaaccaggggccatcaagagctatccattaaagcagatcctcagaccctccagcaaggctttatgagtcacaaatcagcccctcaggcacctagaactactatactgtaactaaatttcctttaaaatagtattaaagattgcagaatgcccctaacaggagggtaggatggggaggaccatgtggctagatgcgaattactgtcaaggttccagttttcctgttgaatatggattcatgggcacttattacatgggagggagggtagggaaggaagaaaggaaggaagggaggcagacaggaaggcaggaaggcaggaaggcaggcaggaaggaaggaaggaaggggcaagtaggccaatggttaagtgttacgaaccagcgataatgaagaatcca

SEQ ID NO: 76980 - DNA, 1609 bp, Homo sapiens
tacagccttaaactcctgggctcaagcaatcctccctcctcagctcctgagtagctgggactacaggcatacaccatcatgccaggctaattttttttttttttaacagatggggtctccctatgttgcccaggctggtctcaaactcctggcttcaagcgatgatcctccccgctcagcctctcaaagtgctgggatttacaggtgtgagccaccacacctggtccgctgaagtttattgatcaaaataaagtttctttgaggcctccgaaggttttggaggtaatgccagaaacttgctcccggctgcgccgaggggagaccagctgaccttctccaccgttgttttatcgcaccaaagccttagcatagagcccttcccagccaccctacctgcggggctggacccgcccaccacacccacagcaccttgctggggctgacttcccgatttgtgtccacaggctgctgaacaggatgtcctcggacgacaggcacctgggctccagctgcggctccttcatcaagactgagccgtccagcccgtcctcgggcatcgatgccctcagccaccacagccccagtggctcgtccgacgccagcggcggctttggcctggccctgggcacccacgccaacggtctggactcgccacccatgtttgcaggcgccgggctgggaggcaccccatgccgcaagagctacgaggactgtgccagcggcatcatggaggactcggccatcaagtgcgagtacatgctcaacgccatccccaagcgcctgtgcctcgtgtgcggggacattgcctctggctaccactacggcgtggcctcctgcgaggcttgcaaggccttcttcaagaggactatccaaggtgcgtggtgggcctcaaggagcctgggcgcagggttgggggtggcagccgtgcctgcgggtctggcagaagccctaggaattcccagagactgccaattctgggcgctgttggagcggtacttctgtggggcgccttttcccttgctcagggcttctcattctggcactggacagctgcaagactgttgttgagatgacacgcgttccccaccccctcagctcccccatgcacagccccagaaaaccaaaagaaaatccacaggaatgccaaaccctgggtgcttctcactggtatggagtacactgtcaaatgtgtgtccctcaaaaagtttattttgtgcgggggaaaaatataatttgccctgcaattccagacttacgggacatagaaagcgtccctcaccttgtttttgtcttacttatacaagtaaaacgccagatgtggtgactcatgcctgtaatcccagcactttgggaggccaaggccagaggataggtcaagccaggagttgagaccagcctggacaacacagtaagaccccatcattattattattatttttaaattaatgcatggtggcacacacctctagtcccagctacttgggatgctgaggctgcagtgacctgtgatggcaccactgccttccagcctggaagacagagcaagaccctgtctcaaaataataataataatatatgagtattttctcactgtagaagactcagacct

SEQ ID NO: 76981 - DNA, 1062 bp, Homo sapiens
atccacttgggcccactttggcctcccaaagtgctgggattacaggcctgagccaccgtgcctcgccgatagctgtgactgttaattgcgtcaggccctgggtagagcactttcattcagttagtcaagtatctgttgagcacctacaaagcaccaagccaggctgtaggtgctggtgataggatagacaaaatctctactcatgcaggtcactgcgatgagctggtgccatccaactggcacagaaactgcagaccagacaggagaacacccaggaaccacccatcctgcccctgcatcagatccctttccagggccctgcctcactgtccccagaatgtacctaccccattcatttcccttttagaagaggcaggctaagcttccccgggatgattctgtttattcaacaaatatttatgtgtttaagtttcttcagatggcaatctatttatgaaaccaattgaagacattaagattggatatatttccacttccacatatgagttgagatggtgtggtgcattggctaaccatcagggctcctggtcagagagttccatcgtccccttatagctgcaccttggacatgctccctgtttctctctgtgcttcagttacttcatctaaaaagtgagatatcagctgggcgtggtggctcacgcctgtaatcccagcatttcaggaagccgaggagggtggattgcctgagctcaggagttggagaccagcctggccaacatggtgaaaccctgtctctactaaaaatacaagaattatccaggcatggtggcaggtgcctgtaatcccagctgcttgggaggctgaggcaggagaatcccttaaacccaggaggcagagggtgcagtgagccgagatggcaccactgcattccagcctgggcaacagagcaagatcccgtctcaaaaaaaaataataaaactttaaaaaataaaaataaaaagtgagatattgttcctaccttatagagctgttaagaagcttacgtgagttaatatatataaagcacttagaatattgcctagcacctagtaagtgcca

SEQ ID NO: 76982 - DNA, 1365 bp, Homo sapiens
tgatttatttcttaaatgagcccttttaaaaaaataaacatgataaaaaaaattctagcagtgcaaaacagtagagcacgttttcctgaaaccccagacctcagttttcttaactatcccagaaggacccctttaccatctttgtcaagcaaatattttttgagcatcgtctttatcaggcactgtgctggcctccaggacataaaaatgaatgcaccctggtctctgcccgctttatacaccctgagtctgagtctgggggaaggccctgggatctctgtatttgaaaagcactgcatggtgatgctgtctcttgcctcagccaagaatgagaacctccagtatgatggtttttacacaaatcatcagatatttgacaaacacaaaatgtttaagtcaactgaagttaccaagataacaacatttttctttctaaattggaaggttgtcttggagaggttgccattattttagactctttgaggtcagtttttgaagaattgcttgttagaagacagtcacattttcttctcaccatgttgttcttagatgggctggagagttttgaatcacattttttgaaagcagaggttaatgtgtgtaaactcagaaatcctactgcatgcttgacagaggcccaggtgtctgcgaatgttctcagcaagtcaggagtccacatgaaagattcgtaaatagtcttaattatttgctaccgcgaataggataatgatctcttcgtagaagtcaaaagacaaacagcagcatttgtgcagttggaactgaactgctgcagcctcttctctttccacaaggagagtttcaagttcgtaaccagaaagaggtttatattcaggacagggaaaagtaaactcaaggctgacagattgctgtggttattttattaactctttggttttgttctaacaaagatttaggttttgttgttgtttttttttttgagacagagtctcgctctgttgcccaggctggagtgcagtgatctcactgcaacctccacctcccagctcagcttcccaagaagctgggattacaagcctgtgccaccacacccgactaatttttgtatttttagtagagacggggtttcgtcatgttggccaggctggtctcgaattcctgacctcaagtgatcctcccaccttggcctcccaaagtgctgggattataggcgtgagccaccatacccagccagattttgttgtttctaaacgtagcaactgtagaacatctggaaaactaggaaaagtacagacaggagaaaaatgacctagaattggacaaccacagagacaaactcagaactcagtgagcattctttgagtccctctctgagtaaggtgcaga

SEQ ID NO: 76983 - DNA, 1629 bp, Homo sapiens
gctctgaaaatcatgttaatcgtgttacctcacaccctgcctcttccttagatcacttccttctgcgcaatccaatggttgtactaatatgggaagaaattttgcagaaacaaagatgtcatgatagatttagggagaaagactaagaccgagtcattccttctccaccaatcttttttttttttttttttgagacagagtctcgctctgtcacccaggctggagttcagtggagcgatcctggctcacttcaacctcggcctcccaggcttaagcaattctcctgccacagcctcccaagatagctgggattacaggcgtgtaccaccacacccggctaatttttgtattttcagtagagacagggtttcaccatgttggccaggctggtctccaactcttgatctcaagtgatccacccacctcagcctcccaaagtgttggaattacaggcgtgagccactgcgtccaatccaccaatctttattgagccctcactatgtgcttggctggtagtacaatggcgggggagggaagagggggaagatgggcaaactacggcctgtaagccagccacccttggttgtataaatcaagttttgttggaatacagccacacctatttgtttgtatattgtctatggctgcttgagcgttacaacagcagagctgagtagttgcaatagtgacggcctgatccacaaaacctgaaacactcctctgcactacattgaactaggcagattcagtctcctggctctcagagacctataatcaactcctagtagtgcatgttagtgtttattccaaccctgcccaattctatgctatgaaagggaggtttttttctgttgttcgttttttttttttgttttgtttttgtttttgtcgctgggggctgtgatgacactcactgagaatagatgagctcatagacagatgaaggcaccttcctgaaggaacagaatggctccaagtcagaagagatagacctcaacctgattgcatttactcgcatatctaaagaaaaaaaaatgccaattaacaaggattggctagccctggaggcatagaaaaaacagacatacttaggcaaagccaccactcctaggaaaagggagtcttagcctagggacagcctgatgtgattaaacattccgtttatctgattaatatctttctggttaggatctagttcccctgcaggtcttctgcaaggagtgaatttgcaggtcaggcagacagatcaatttctccttgtatgtgtgctctctttgcatggcatccctgagcttatacatcaggttcctgaatttaggcaagaggagtgcctctgagagatggagccactttctgtggctggaaaagtcagctgcttctgggacttagggctgagtgacactgactccaccgtaatgaaaacctttgtaataaccttgaccctgtcaccctgtgtctctctcagcaatgactctgcctcctgttttattgagaaactagaactccctcagcttcctgccgccaaaccgatgcactctcttccatgttcgcagctgcttccgttcactgattccgcagctatttcttgcaactcactcactgctggaagagatgtctcctaccccaggc

SEQ ID NO: 76984 - DNA, 1022 bp, Homo sapiens
atgtagaaggttctcagtgtgtccaaatgcaatgcaatccccaaacaaagtgatctcccatttcccagggaggacaaactgaagaagttgggccagtttgcatatgtgtaaactttaagggatctaggtaaaatagtcagatgtctgcttataacaatatattatttagttacgcttgtatattttaaattaccttatggaaaacaatatattatttttgaaaagttgtttttctacacatattttgtgaaggaagtcttatcaaatgaatctttgatacaaatgtctttgttttccttctctagagttttttgagtcatttaacagtgtttcagtgtgctgccttcatttccatcagttaattgaaattttatgagaatgtatgcgctgctatccctaaagtttttttattttaagccataagtatacgtcctacaccataaggggagttctttttttatttgtgttgacttatgatcaggatatccacaatgtatcaggtacatactgcttttgacacccaacacttgtaagattattttcctgggaataactaaatttgtgttaaatttctttactcccaggccaggcatggtggctcatgcctgtaattccagcactttgggaggccgaggcgggtggatcacttgaggccaggagttgaagaccagctggccaacatggcgaaaccccatctctactaaaaacacaaaacttagcttggcatggtggcacatgcctgtaatcccagctacttgggaggctgaggtacaagaattgtttgaacccgggaggcggaagttgcagtgagccaagatcacacactgcactccagcctgggtgacggagcaagactcagtctcaaaaaaaaaaagaaaaaaaagtttgtttttatttactccctttgtagtgattcactcaggcaaggagcattgattgcggtcttcttaggaccatgtgtcttcccaaattttagattgttgttcagtacaaagtgattgacttaatagcacctctgatgt

SEQ ID NO: 76985 - DNA, 1774 bp, Homo sapiens
ctctctttttttctttcctttttttttttttttttggtccttgggacagggtcttgctctgttgcccaggctcagtgcagagacatgatcatggcttactgtagcctcaaactcctgggcttctgcctcagccttctgaggagctggaattacaggcatgcaccaccatgcccggctaatttattttttaaaaaaattgtaaagcggagtctctctatgttgcctacactggtcttgaattcctgggctcaagcattcctatggcccccaccctagtgggcttgcattgtagggggaaagctgacaataaatatgataaataatgaagcatggtgacagactgagacaggtgttatgaaggagaaaaaacaatgatgagaccagagagtgactgagaaagggggggggtctcatttagaaggaggattagggaaggttgtgctaataaggtgacttttaaaggaagctgaagctcatcaaggaatcctgggaccagcgttccaggcagaggaaaaagccagtgtgtttcaggacagcaggagggccaacatggctagtgtcagtgagcaaaggcaaagtggaaggggctggagaggatgggcaaagtctaggggccatggtgaggggtgcacttggatttttttccaggtagagtagcagccgttgactaacatgtgatacatggccatgaggggctgtacggttaggtaaagccagtctgcactcctccttgagttcccagggtagatggccaactttgcacaggccactgggagtcttttgagcaattcctgggtctctaacttaaaacaagaaggaacaagtaagaaagaggcctggcacagtgcttcctccattcacctggggcccagatgcaggcttggaagaaaactcccctaggagaggggaagggggatgattgatgggttattccaccttgggtcgcctccaggtcttttgtcctggagaatgcagctggcggatctggatcctggatcccgggaggcacaagacaggggtgcagagacaagagcaggagagggcaggagtcaggagctaggtgctggtcccggcccagtcactagccaactggctgaccttgggcaagcaaggactgagttcctctggcctcagtttcctcatctctacaagaagagtccattaaacccacaaaatgttagctatctgtagggcactggcaaatgacagaacaaatcacaattcctctttttggagacacagccaggatgccagtcagaatgtggtcagcctgtgacttaggtgacacatagagtccagagaaggtttataccttctggagggcagggagggcttcctggaagaagggacactttctcagaagtggaaggtaaacatgcttggcagcaagagaggagggggctcagtggtggatgatgggctgggaaaacagcatggcactggagtgcaccaggcttcacaggtcatggtaaggaacagttaagtaaggagtcatatttaagatttgagggctatttaaccaggcttagaatctcagcttcacgatttcttagttgtatcaccttgggcaagtgacttagttttcctgagccttaatgtccgtatcagtaaaatgttaatagttcctgcccctacagtgttattgcaaaaatgaaatgagacatgcatgtgagggtgtaactaagtgcctggcacatgaaataaatagtatttgttttgttagttgtgcttggcaatgggaagtcattgaaggcttctgagcagggaattaatc

SEQ ID NO: 76986 - DNA, 1134 bp, Homo sapiens
ccaagatcagggcaaaagggctagaaggagaagttaggcttgaggaactttcaaaagtggattcaggctgggcacagtagctcacacttgtaatcccagcactatgggaggcagaggcgggtagattacttgaggtcaggagtttgagaccagcctgaccaacatgatgaaaccccgtctatactaaaaatacaaaaattagccaggcgtggtggctataatcccagctacttgggaggctgaggctggagaatcgctggaacctgggaggcagaggttgtagtgagccgagatcaggccattgcactccagcctgggcaacagagtgagactctgtctccaaaaaaaaaaacaaaacaaaaacaaaacaaaacaaaaaaaaaggtggattcattattaaaaggatagtgactggattgtggatgctaagggaaggaggactcttagatttctaatttaggctactagggagatggcaaggccattagggggaaaacataaatacccagaaggaacaatttcgtcagctgggagagtcagggtgggaaggagcatgagataatggataaagttttggacatattgagtttgatcagttcacagagaccctggagagtttggaattacagcccagaagcaaaatcttgagtggggttttaagtctaaggagagcctctaagactgtggttctcaaagtgtggccctcaggccagcagcaaaggctacacctgggagcttgttagaaatgcaaattttgggccccaccccagacctactgaatctgagactggggggcaaggcccagcaatctgatttagcctttcaggtgagcttcattcaagctcaaatttgagaactggtgttcgagagaaagctctttagaaggagaagggttgagggaccctgcggaacagaaggagcataggaggggccttgaaaggagattgaggagtgccatatttcatcagttctaagatgcacattttctccaagtaacatctctgaattgggctgcctgtcacagttaccattgaccaggtgacagccgttccctggttgtcactgcactcaaacgcacctcaaaagttgcagagtaggggccagtggcctgagacaacagtgaacactttctta

SEQ ID NO: 76987 - DNA, 1053 bp, Homo sapiens
aagagtccctgcagagagaagggagatgaaatctaacaaaatagcctgttttaagagggtggcaatgggtgtctgctgcttcaggaaggaccaggaggagaaagaccaagaggagacaattgcatttggtagctgaaaggtcactgttgtggaattctaggattctctgggtgggggctcttgctttcaattcgtttgcattcattatctattcaacagatattaatcgatttccaggattgagatactgtacttgagatacagaaatgaaaaacataataatctccattcccaaaaagcacacagttcagaagggaggcccacaggtacacctgtgattatgaaacactaaggtagctgctttgagtgtggggatggggtggtggcgagaaacatgcgagcctatctggggcagaagggaagaaagtgtcaccaaggaggccatgtgagagctgtggctccaaggatgtggaggagctggccaggaggaccaaatgaggagtttcaggtagagggaggtatgggagggccgggggctccatgagatccatgaactattatacttactgacagttcagatctgctggagcctacaaactggaggcctcagtgagaggggattagggtggacaatttggaaatggtcagatcataaaaggcctggtaggctttgccctggagtttagattttgttctctgctctgggtggcaagagttggagaatttcttaaatttatactttaaatttatttctaattcttttcaaaataaggtatacaaatagtttaaagagtataaaagaaacataacttttaggccaggcacagtggctcatgcctataatcccagcaatttgggaggccaaggcaggcagatcaccaggagttcaagaccagcctggccaacatggtgaggagtttgagaccagcctggccaacacggtgaggagtttgagaccagcctggccaacatggtgaaaccccgtctctactaaaaatacaaaaattagccaggtgtggtggcgggtgcctgtaatcccagctacttgggagg

SEQ ID NO: 76988 - DNA, 1062 bp, Homo sapiens
aaactcctgacctcaagtgatcctactgcctcggccacccaaagtgatgggattagaagtgtgagccactgcgcctggcctgaatctggggaacttttagataagaactttatgagatgggggctgtacccattttacagattaggaaactgaggctcagagaagttaggtgatgtgcccaaagtggagtctgcacctgtctatactgaatacactcccaggttagaacctggaatttatgctaaccattggccatgtccctgtcctgagagaactcatccccaaaactgccacacctcagctgcacgtgtgtgtgctgccaatgtcctatccctgttcctacacgctcctaggcccgcctcaagagaccacaggaattctgatgaattaatctcatcactttatcgaggaggcacttaaaaaaattacaaagcaaggccgccagcctggctttgctggcagctagccgctggggccataaaataaattgaaaggaaccaaaataaacaaataattaggtctctctctctgacacacacacacacacacacacacacacacacacacacacacacaaacacacacacatgcatgcaggccaacccctaaagggtgaagagcctggttggggacttgctgttagcacttggtcctcttgtcctgggagagcaccagttccagctctgcacacacacttcctgactccttgctctgagcagcagcctgtggccttatccttcctcaaaaagtgacaggttggctgagcagctgagagcaaagcatgggaaaagtgaagagtgtgcaaagggtgtcccaggcagctggaggtgtgaagcccatggagagccctgtgagctcctggcacagtggctcagagcaggctggagctgacgggctgggtcccagtccttactgtcccataccctggattctgttcaccctctccttttttttttttttttttttttgagacagagtctcgctctgtcacccaggctggagtgcagtggcgcgatctcggctcactgctccctctggctcctgggttcaagcaatccttct

SEQ ID NO: 76989 - DNA, 1292 bp, Homo sapiens
tttgttttgttttgttttgttttgttttgttttgttttgtttgagacagagtctcggtctgtcacccatgctggagtgaagtggcgtgatctcggctcactgcaacctctacctcccgggttcaagcaattctcctatctcagcctcccgagtagctgggattacaggcacatgccaccacacctggctaatttttttgtatttttagtagagacggcatttcaccatattggtcaggctggtctcgaactcctgacctcaggtgatccaccaacctcggcttcccaaagtgctgggattacaggcatgagccactgtacccggcctggtagccattcttataacccatgaaaggagtggcctgaaaaatttatcacagattccctccgctgaatgaactctgctcataaaatgaccccctcgcattgaatagtgtttaaagcagttgtccatatgtggtcttggttaattcttcatttagtagattatctcactgttttgaagatgaagaaatttcaacttggtcagaggaaagtatatcctcaaggttagcaaagccaggtggcctgggcccctccagtgggatgcagaacccgggccttgatcctggtggacgcagagtttccaggaggcttttcccacatgttggggtcccaggctggaggctggaggagcctgtggtggtggtggtggtggtggtggtagtggtggtctgcactaatgttctggtcagcatagggggcgttctcctcctggagtaaaaggccagcttagtgagttttgatgtccctgcccagaagtggcttcaacactgtgggtggccatcctctggagagtgtttccccaagtagctgcctggtccacccagacctgccacctggagtctccatatggaagagttcaaaatgttctgacaagcacctcagagcacctgctttgagaacactaggggggagtggcagctctggcaaattaaaatccccatccagccagccctgcgctggcaggtgggggccctgggcggccagcacccggcaaccctctctgtgtctggttgcagggaacattgagtacagctgcccggccaccaacgagtgcgagatcaccaaacggaggcgcaagtcctgccaggcctgccgcttcatgaaatgcctcaaagtggggatgctgaaggaaggtaagagaccccaccgagtcggggttcactgtgaggctctgcttgctggggagtttttgtcccctgtgagacacccacaagctgtggacctgtgtcccagggtgagacccagtct

SEQ ID NO: 76990 - DNA, 3803 bp, Homo sapiens
tccaaacagaggtgtgctgagtgtacaacacatgcctgctttagaggacttaataggaccataaaaggcagtgtaaagtctggtggtgatccttttaaaaatgtgattgcatgcagaaaggctaatcttctggacatgttaaataaaacatattgtgaaattagcatcacatgcttctttgttttttttttttttttttggagacggagtcttgctctgtcacccaggctggagtgcagtggcgcaatctcggctcactgcaagctctgcctcctgggttcacgccattctcatgcctcagcctcccgagtagctgggactacaggcgcccgccacctcgcccggctaatttttttgtatttttagtagagacggggtttcacggtgttagccaggatggtctcgatttcctgacctcgtgatctgcccgtctcagcctcccaaagtgctgggattacaggtgtaagccaccgcacccggcctctttttatctattcgttaatgtgactactagaaaatttgaaatgacacgtagctctcattgggacaactgctccaggtctcctcttcctcactttctctactgatttgctcctttttttatattaaaatattattgatagaggcaaggtcttgccatgttgctcaggttggtctccaactcctgggctcaggcagtcctcccacctcagcctcctaaagtgctgggattacaggcatgagccactatgcccagccgatgttttcagtttgaggaaccttgttcagtaccattttggggatgggtcgtgagtgtatgtgtttccctgcttctccagcttccaaggggagccagtgaaaattcttagagatcaacttttaagctccgggcctggaatccttctagaagtgggaggaaacaggaaaagaggtgtgtgggggtgatcagaaggggctacagagagaacgaagggacaggtttggaatccagacccttcctggagggggaaggctaggagtgggcttctggaagcccagcccagccttgggagccccagggcactcctgctaccccctctcccagggccctctgaagataagggcccagacctaagacgctttgtcaatacaacttggaccatcatgtgctatagaaattggaccttccacttccgtttaccatttccaggtcccccacttcacctcagctcagcccagcacctgtatccataaaacagaagctcttgaagcaggccctcggcggcctttgtgtcgacatggcacactggcttttaaaatgctcctcattcggggcttcatttaacccctttgtgatggagtggaccactcagctcttagacaggccagctgcttcgttaggggctcaaccgaaaaaacagtctcctttccagattaaaaatgggctacatcgagcccgcagaaaggctgtctgttggttcatttttgactctatataattttggtcttgctcctggataggatgacccaaactagtggctgaactgggtcccctgactcctatgttgggccctttctgctccttcagagcctcctggtattcacagatgggaaaattgaggcaaaaggcccatagaagcatgcctgagtgctggtctcttgactttctctccgtgtggtgctgggaatctgagggtttctaagctttggagactcattcattcctcttaagcccaagagacagagctgcttgacctgttgttctcacatacagagctggatgtgagaacagcaggtcaagcagggggccaggggccacttggtcacagcgtgcagcctccctgcctacttgacagtatccgcggcacttagagcagccagaagcctcattgttttcaatatagccctgaattttacaggtgacaaaatggagccctacaggggctggggtgagatgactcctaccctcagtcacacattcatctgaggggagctgggcccagaggctggaactttccttgccctgttcagtgcctgctccccatggcacagcacagggatgggggaggtcgagagggaacctcccactcaattcctggaccatcttgtaacactgagcagagtctctttaggggctatgcagtgctgggaagagagaagggcactttctagtggcttcccagaaagcaggagatggtgaaggggtgcactgatggcagggagggaggtggtgaggcccacaattgaccggtggccactcagacatccagactggcacttgtcagagaaacgaggtggacactgtgtgtcccaggatgatggtatcgggggtgctgggaggacaggggcatgagacccctgctgcctcaagtggggaggatgttcaggggaagcctcagtgttgacacccctgccccgctgcaaatatagccctttggttgatggtctttacccagggtggcagctggggcctcccaggcagacatgctcggctcgaaaaggccctttaaggagttctgcctgaaggaggaagggacagccactagaacgctccctcccccactccccgccagtgctggcaggtccagatccaagagcggggagatgacacaaaggctcctgagtacggacaaagcagggagccacgtttagtttctgtcccctgcagggccttggagagatcctgggatctgaagctccgtggggaccgacccccttgggaggagcatcctccttcaacagcctgggcccctgccaggtgggggctcttggcagctgcctggcttggcttttgtttgggtgtccctcctggctctgcaggcaaggcccaggccccccaagaccagcgtgggctcatcgcccacctcagactctgacgggactctaaaaggcaaacttcaccttccccagggctgctctccgctttagggtcccatagtgggcctctgttgcttggggggctttgggggtccaggggcttggggagggctgcagacggagagatgtgggtgcctccgccctctctgctcccctcgcctgcacgtctgaacaccaccctcccgccctcatccagccacattctccttgtgttttatgatttttcctttcttaggtaaaataatcagagatcgtttcccagtttgggggcccagcaacagccacagaagaaatcagacttggggcttcctctggctctccctctctcttaagactgtggccagctcagggatctaagcttttcagattcctcacgtggctggggacagatcctatggccacgtccctgtgactttctccctggaacatccagagcagaccatggaaaacaggagctgtccaaaggcctatcttgctttaagcaaatctagtacataaaaatctgtattttcagagaaaaggtaatttttctcttttaaaaactgaacacaaaatctgggttaggagttgatggcctgtgttctgcccctggttattaggtatttttgcccgtgtaattttttttttttcttttgagaaagacaaaaaaaagcctcactctgtcgccaggctggagtgcagtggcgcgatctaggctcaccacaccctccacctcccgggttcaagcaattctcctgcttcagtctcctgggtagctgagactacaagtgtgcaacaccacgcccagctaatttttgtatttttagtagagatggggtttcaccatgttggccaggatggtctcagtctcaaccttgtgatctgcccgcctcagcctcccaaagtgctgggattacaggcgtgagccactgcccccagctgctgtttaatattattactcacgcccacctgcttccatttcttcactg

SEQ ID NO: 76991 - DNA, 1069 bp, Homo sapiens
ttgctttgtgcttgttgggaaggtggagggctcctccggggattctgggtaattgtgttagtggccagctcatgtcaggaaattaaaaggaggccctgatcaggttcccactgcatgggatttaatggccttgtatttatagagtattctgcctctagcccatgccagaaatatcactttttttctggccctgtgaatgaagaaagagcaagagagatgacttgcctttaaaaattctttttcttttccaaaatatattagtgttttgaaacaaaccaactctttaccactttatagaatggtattgagctacagcctgagaatgccaatgtgtgttgcatccctttcgagccactttacattctacacacactgccccccccccaacaccaccaccccccaaacacgcacacacacacatacctgacagctcacaggatcttcccaggcaccctgaagcctttgggccactcagccacaatgacctctggttggagaagtgttgattgaatgaagacgaaggagatgatcttgtctgtgctaaatcgttcttactgttccctgcaggcttttggataacggtacggtggtcacgtaggcctggttaaacctcatcttcaccacttatcgactccttgggccagttacttaaacccctgtaagcctccctttcctcctccataaaatgggaatcataatagtgcctatcttcatcttgctcccaatcttcagggaaagctcctagagttatactgtgaagtctgattgttgattggagatagatattcttcatgtacaaaatggatattcttctgtgatccagaggcaattttgaatctcctgtagcctcactccctactcttgtaatcttgcttcacattttcatgaaaaaatagaaagtcaaatgggacacatcttaccctcctaccattgaatccacaaacctaccagtttgtgcacctgttttctgccttcttcttggtagaatagaggtattcccaatcctgacaaacgctggtccccctcctgcccttctgtgctctgaatcgctctcttctttaccaaggac

SEQ ID NO: 76992 - DNA, 3618 bp, Homo sapiens
agcctcccaaattcttccctagatattttagacctgaatatctaaccacactattggcattgccacttgtgtcctttatgagacatcacagattaaacatgtctagagaggaactctaggtttgaaccattcctccttctattgcttccagtctttcccatctcaggaatggtgatgctagtcacctattgctcaaaagaaacctggaggtcatccttgactcctcccaggtcaatgtccaaaatgtatttcagattctcctacttttcttcatctccatggtcatgaccctggtccaaggaagcattgttttttcctggaccactgtggcagtttcctaactggacttctgattccactcttagtcctgtttaatccccctagcagtgatcttgttaaagcactggtaagattctgtcattttgctttacatcactcagtggctctccatagcacttaaaatacaatccaaacactttgctttggtcttcaagaccttgcatggtctacccactccctacctcttcagtatcatctcataccattcctttcctgtctgttcactcctacccactctgctccagcctccctggcttatttttgaccctcaagcatgacaaactgtttcccatcttaggactttcagggccttccctctgcctggaatcctctccccaaagctggctccttcttatccttccgacctcaagttaaatgttatcttctcagaaaggcctccctatccactctattacttgctgtcatatccccttgtatgcttcttcattgaacttctttcagtctgacattatcttatttatttatttatttgcagacgtgtttgcactggctgcctctaacacagttgttcttaattcaggctccaggatggcaagttgcctttagttgcactcagctggagtgcatgattgaaaggcttcttaggcagtgtctgggatcagcaggtaagagtgccatgattgattagcaatgtctgccacagactaagaaatggaaggcaggggcacaggtgataagtctttgccatgcctgatctggtcaactgagtttcagcgatttgaccaaggccagacagctagttaatgacagagctgggtggaatctagtctccttggctatgtggaattccttctaagaagcctattcgaacctcacggttgatgccttggccagtagtgaagcctgtagccctttctcaaaggggaaaaaagaaaggaacggaaagggaagctgggctgaaataacttctctgtgtcaggcgtacagttttggagacttcttggcagttgggaatgcaggcgtaacacagttttgtcaaaatgcccttggggacatggtggcatggtaagaagtgtctagaggagcccagcatgatagcagacactcctttaataggcagaattctgagagctcatcactcactaacacttatccaccacagtgcccggagcccacagagcagctggcaaaagccctggaatattaggtgtcatgtatgtctgtttagctacaaggctctctctcttagcttttaggaagtcaggtgtgaggcactctgcctttacggtgtgtcactggggtaagaggcagcccaaatgagccattgtgtctgaggcagcaaggcaagcttgcctgtcacccagaaacccgcacaggacaggtggctgaaggaagtccagtgtatacaagggttgtggctgagagttcagggcattgcactgggctggaatgcccatcagcatgcccacacaacttccagaacctcaggggctcatgatacccacatcaccttctgggtggttttctcctcctcctggagatgggtcagctatagtttggtagaacctacaggcagggagttcacccccaagtttcctgggaagaacactggccacataaaagtattgaaaaaacgggtttagcacagtgctccccagacctggcacataattagaattagtagaggagctttggaaaaatactcattcctcgacatctccctagacctactgactcagagcctctaaatgagtaagtcctcaaagtctgtgccgttcaaaggcttcctagggcattctgaggttatatgggactggcgtcacaagtttagggcaaagaagataggacttggagatctgaaaatcaaggttcaaaatttccctgtgacgtttcttggatgtgtgatcctgaacgagtcgcctgacctttctgagcttcagatcttgcatggaactaatcataatcatgtatattcttcctcctcaacattgttgggcagcttaaatgagatacgggtatgaaatagatttgtaaaccatgaagctgcttatttcgttaataaaccagggatgttgaatttggtgatgggggaaagttctggataaggggaagagaagggtgttggtcatgaaaaccttgcaatgccagtggggatcttgacctcagacctggatagtagctgatgggagggcagaggcctttccctcgcctgccctgtctgaacctttcctgttggaagagaaatatgatgtgggaagcgcctgggacaggcttagggccaggtgcagggccacgctttgcagagctttagccggctatttttagtgcccgggtgtaaaagaaagaagcttaaagtggccccgctgcggctgaccctgcacactcggctatttttacttccgaaagactgggatcttgtccagcttaggcagggaagatgagaagaaaggagggaggtggagggaagaaggaattattttacttccattaagaaaaatgtcagaaacctgatcttatcaagtcagcaagtgggtatccaatcccggatgtgtaaggtgccggctgtggacgctgtgacgtgcctgcagtggattggagaggccagcagagggggagccccgctcccctcctctcaaggagtttctgtcccagagtggccccgaagcttctttgctattttttgtgccctgagctgggaagtgggcttggcccccacaggcacgaggggcaccagcctggtgacgaggccggtggaggtgggagcagttatgactgcagccaagggtggaacctctgttctcaagttggacaaaggcagccatcagacccactggcatattccagagagtcccagtgttggggctgtgtgccctgggcacaatatttaacctctctgaaccttaatttcttcagggattttgtttaatacatctgactgacagtagttacaactgtggggatgtgtttctctcttccatgaggaaggcagttcaagccagactctatgaccttcaacaggcagatgaaaggcaagaagttactactgagtgcctactgtgtaccaagcactctgttacgtttcaatattttatgttgttaattccactaacctgagaaaggatacatatttttaaaaaattttaacagctttattgaaatatagttcacccatttaaagtatacagtttgatagcgttttgtattcctatatttgtaaattgtggcaaaatatacgtcaagtacaacttggcattttagaaattaagtgtacaattcagtgacatcaaacacattcacaatattatgcaatcaccggcc

SEQ ID NO: 76993 - DNA, 1106 bp, Homo sapiens
aagcattaataatgctcaaatgtaaagtgtcacatatttccaaatactgcaataaatacagatcctttgttttaaccaccattaacaccgtttaatcccttaatgtgtacaggtcaaaattttaatatttctgagtgctccatgaatagaaaaaaattgataatccctggaatacatgaccctgtgcagacggagatcttgagttgagatcacaccatttcactccagcctgggcaacagagtgagactccatctaaaaaaaaaattaataaaaaaaaaaacccacttcactcttaaagattttctgcatcttgaccatatcaatgtcaattgactgtatcaatgtcaatatcctggttgtgatattgtactgtagttttttaagatgttaccattaggggaaactgggtaagcgatgcatggcatctctctgtattatttcttacaactgcatgtgaatctgcaattatctcaaaataagaagtttaattaaaaacttaaaaaacaatgctgctggaaaagtaaaatggtgtaaccatgtagaacatagtttgatggttcctcaaaaagctagacagaattaccatatgattcagcaatcccactcttaggtatacacccccaaaaaaactgaaaagagaaatctgaacatacatctgtgtagtgtggggaaaagaagcaaatttttaaaaaataaaaagaaggaatttgaacagacgcctgtaggacaatgttcactgcagcataatcacaatggccaaaaggtggaaacaacccaagtgtccgtggatagatgagtggagaagcaaatgtggtatatacatgaaatgttacttagtcatagaaaggaataaagttctgatatatgctataacatgaatgcactttaaaaacactacgctaaggaaaataaaccaaaaggacaccaaaggacaaatattatgtgattccactttttctttctttcttttttttttttttcgaggcaaggtcttcctctgttgcccaggctgcagtgcagtgagtccatcacagctcgctgcaacctcaaactactgggctccagtgatcctcctgcctcagcctctccaggagctgggactaca

SEQ ID NO: 76994 - DNA, 1040 bp, Homo sapiens
acaatatcacaaccaggatattgacattgatacagtcaattgacattgatatggtcaagatgcagaaaatctttaagagtgaagtgggtttttttttttattaattttttttttagatggagtctcactctgttgcccaggctggagtgaaatggtgtgatctcaactcaagatctccgtctgcacagggtcatgtattccagggattatcaatttttttctattcatggagcactcagaaatattaaaattttgacctgtacacattaagggattaaacggtgttaatggtggttaaaacaaaggatctgtatttattgcagtatttggaaatatgtgacactttacatttgagcattattaatgcttttttgcattcagaaaattatcaataagatgataaaatctaataatcctagacagtaattgtaagttaattagtattttaatgtgtttcctgagtctacttttagatattttactaatgtaaggacacaaacaataaggcaactctcatttcaagttcaagtcttcttgtttatttccagttagtgtttgtaagtcttaagcatcctaattttaaaagtaattgcccattgtatcagtcagtgaaaattgctttctgctgcaagttacggagaacctgatagctagcagcgtaagcatggataaatgaagttggtttttccaccttacaagaagcctggagatgcgcagctgctgtattgcacaaagttctcagccatggcggcaggggcgctccagctctttctttcttctctggtgttctttggtgtcctcagacagccatgtcatggctgcaaggtcgttgccacacctgtaggcttcaccttccaggctggggcaagagaaaggcaaaagagctgcactgaacatggctgtcccttttctcagaaaagcaaaaccgttccagaagtcctgccatggacttaacctgacatcccattgccgtggtggcacgcacctgtggtcccagctactcgagaggctgaggcatgagaatggcttgaacctgggag

SEQ ID NO: 76995 - DNA, 1047 bp, Homo sapiens
cagacctgaagatgcagctgaagcccacttgtccaaggccaaataacctgaaataacccgtaagggacagagatgggcatgggaccttcattatcgagcccatgggctgcagtgattgtgggctgtgcttagggcaggctcagaagagcagacaggaagcaaggggaacagacacatttcacatcaggtgtcagtttgtgcataattaaacccaacaggctactgtttttttaacagcgtaatctgataattgatacacgtattgattggagccattgaccactatgctgtaaagatcaggaggagaaaatttagaggagaatttaacatttgctgtgcgctgggaggtcataccatggaatggcaaaaagcttgggtcttttattggggaaatcactgaatctctctgagcctcagtttttcttatttgtaaaatgaggataatagcacctgccttatatttttgtgggttaagtagggtaatacatacagagagtcctttacaaattatgctgttatcattatcattattcatgtgatttaccaaaaacttggatgcaatgctggggaacagtaataataaggatgatgataataaccataataatcccattttctaagcacatgctgcatcttgggtaccatgacagactttggggcaggactgtgagccgcccctggccttaacgggtgcctagtcagtaggggaagcccagtgtgctctgggagcccatgaagaagcccccagcctggcatggggatgaggaggacagaggtacatccacccctgtattcatcaagtctttcctgaacatccatgaaaggtcaggccctatatcaggacacagaacatcccagatggagacatcggcagaggtggcagctgcccatctccttgccttgccgagggacagacacctctttttattttgtgttgagcatgcctcactctgattgacagctgcttgccgggaagcaggctggatgggaagcgagagttcattccagtggtatctaggagagaaggtcagtaaagtggggaagggg

SEQ ID NO: 76996 - DNA, 1442 bp, Homo sapiens
agggtttggtttggcctgggtatagtgaacagaggaggcttctatgtagacatgtcacaggatagagtcagaaagcttttctagacagggaacttttcccaaaagacttttacaggaagaatcatccttcctgtgtttgtgtctgctccttatgctgtcactgaaggggcttgcagggggtgagggagcaaatgtgagccaaagtgctagcagcacataggttcaggtctggagctggatggcatctagctgtccctttagggtccaaggtacaggcagaagttgatggtacagctgcgtttgctaggatgccttagtgcagtgctcctcaaactctgttgtccgtgcaaatcaccttgtctgattcctctgtggccaggcctgagattttgaggcatctaacaagcctcaaatgatggtgatgatgctggcctgcagaccacacttgaggaggaagacagcggagactgctcctgcccacacctactcagcactgtctgtttgtgtgtgtgtgtgtgtacgtgtgcatgcgtgcgtgtgtgtgtgtgtgctgatctgacgcctaggctttctttggccaccagagtctgctcagcctggacctgggaggcaggcaagaagcgccaaagcagccggtagctgggagcctcagttgcccacagcagtactgtcctcaggaacacatttgttattggctttcttccctccttggaaactgctcgcatgcacagccttgtctcagattctgctcctggagaagtcaacaacaaatgtcagttacaaaacctgaccttctaggcagaaggggagtttattggaagcctatcaggaggttcaaagagtacatttagaaaccagacaagaaccaggagaatccctggagagcccaggagcaggaaacccagtagccaggacatactggccaggggctgcctacactctgctggggaggcgctgctggtctgatcagtcctcaccttcgctctgtccttgtgcctccgtttgatggtgcacttggctgagcctgtgtcacgggtccatgccttgacctccagagagcagagagaaggagaacatgtacttctcagatatccattgaggggtgggacacagacttccaacagtttccgtattcccaataggggaattacattttttaaattttcttttgagatggagtctcactctgttactcaggctggagtgcagtggtgcaatctcagctcactgcaacctccacctcctgggttcaagcgatccttgtgcctcagccacccgagtagctggaattacaggcacgtgccaccacacctggctaatttttgtatttttggtagagatggggtttcgccatggtagctaggctgatcttgaactcctgacctcaagggctacggcctcccaaagtgctgggattacaggggtgagccaccgcacctgac

SEQ ID NO: 76997 - DNA, 4431 bp, Homo sapiens
gcagcaggagctgtgggtgaggcaggcttccggaaggcaagttggattcagtgacaatgacagatctctccagggtaaactctcactcctggaagtggctgtctacgtggagtagccacagctgcttttgaacctactttcaagatatttccaggcactgattttccagtccagaggtggccagcccaactgttgcattcccatcccctggggacttgtgtaaagacagactctagagctttatgctagaacctcagagagtggggtctagaaattgacatttgtaatgagcgcctcctcagatgcttcttgtgtgaaaagtctgaaaacccttgaagtgcctgtgaatgaccgggattcctttcttttgttggcaagttaaccctccctggattcaaagcagatctaacataatgtgacttcttccgccaacacttggtagagtgcctttgttgacataaggagaaccaagggctgagggttgcttgggatgaatttcagaaggatgctgaatccagagagacaggaccaggcctggggcaacgggatgcgccattactgttagacaattattttaggattgtccagccacctggcctgaggctggccgtggggcagctgtcgaaggtcatccgagcaaggccctgaaggacccagccagtgctgaaattccaaagtcagtgcttctaccctggtgatgttgaacaactgctgagatcttttccctttcctccccaataggtgtgcgccttgatcgagtgcgtggaggccgtcagaaatacaagcgacggctggactcagagagcagcccatacctgagcttacaaatttctccacctgctaaaaagccatgtgagtgtcagggcagtccctgccccttttgccagcatctgtacctggaacatcaggcatcccttagggaaacatcatcttcccaccactgggtcatgagacaatgtggatcttggggaggtgacatcagtgcctggcacatttagaatgtggctccaaatgaagcatggtcctgacaagccacgggccccaatgtccagaacatgctccccttgccacccacccaaagttgctctgcaggttcctcctggagaattcgtcaggcaacttcccttggagggatatttctcaacagcccagatcaccactaccagcaacttcatggagccagaacaggaggggagattatagccgctttgaccttcctggagctcttaggaacccaactttgcttcctgacccatctgagcctccaccccggcccctttcctcttttcccagcatttacctttccctctttggttgttgcagtgaccaagattgtctcatacctactggtggctgagccggacaagctctatgccatgcctccccctggtatgcctgagggggacatcaaggccctgaccactctctgtgacctggcagaccgagagcttgtggtcatcattggctgggccaagcacatcccaggtgagcatgtgggaccaggggagagtgtggccagggactctcagccggtatctccgcagcctacccaatggctgtgcttctgatgcccggatcctggaccccagaaggcctgtgaaatcctggcaggcctgtttctctgagctcctcttctctccttgtagcattggagaggaacaggtagttagaagacccagtgaggcttatacactgctgcaggctcttcagaattagttatcattcgaggcggggccatgtttggatctacaatcagtgtaatattcaaagaacaagttccttgagcccttaaagggcaaagagtagggttttcttgtagaccttattggaaggatgccagaaaacaacagaagaaagactgaccctctcttcctattggaggcagcagaatggagcagtgaagagcatggccttgggaatcagatcgggattccaattctgggtctgcagcttactagctgagtaaccctaggtaggccacctgacctctctgtcaaatgggaatacaagagtcccccactttgtgagctttgatgtgagcatgaaatgagatcctgtgtgtgaagtgttcggcacagtgtctggcatgtgctggcatcagttgcatgcccactattgccattcgcctgatctctaagggaggcctgtctctggattggcttctgagattttaagggcctttctggtgcggaaagtgtgtgttccatgtttcaggctgtgtggacttctcttcgctgtgtgtggacccaaaccctgctttcaccctctctaggtctgggcagatggcgggagcttttttatttttgtagacaccaacacccatgtattctacattacatacacattgggggcctttctctgtgcaatttattcctcaactcctttaagactctaataagttgactcagagtgtggtagaaacatccttttatccttctggtaatgacccaccatgaacatgggacaagtcagcttcctgtctgtagatccgtttttggtttgtcatggctctgaaaggtgattacagcagacgatacagcaaaggtgacctagactttagataccaagacccacagttgtttgtttgtttgttttttgagacagagtcttgctctgttacccaggctggagtgtaatggcgcgatctcggctcactgcaaccttcgccccccaggttcaagtgattctcgggcctcagcctccccagtagctgggattacaggtgcctgccaccacacccagctaatttttttgtatttttagtagagacggggttttgccatgttggccaagctggtctcgaactcctgccctcaagtgatttgcgcacctcagcctcccaaagtgctgggattataggcaagagccaccatgtctggcccaaggcccacagttgattgagagaataaaaaatgtccttccatgtgagaccttacatgcccaagttgcaggaaggagccttcctgtggacagggacgcacagagacatcagatggcccagaggctctgctggcagggactgcctggtggcccctgggcattctgaccagggatctgggctggtacgcccttactaaggagctcaacctctcggggattacacactcagtagtttttgaatctgcccagtgctggttcagcacagatgtggggtcaggccactgcttaagacacttcagcctggattgctccactaacccagggccaaattgggtacaggtacccctgcccccgccccacactcctgttccaggttgaacagatcctgcatcctagcaatggctcacgagtggcgcctggtggtcccctgggtcaatgcttccttcttccacaaccccacccctgcaacaccacggaggaagtagataagaccaggagaccctgtctcccctgcactcatttttctctgtgcctttccacctcccagctccatctcccatctgtgaccaaccaagagggcatggctagagcagagtgagtgctaaaggcatagactttggaatcaggcagcctgggctttcatctcagctctgtccttactggccttatgcaagatactgaatttttcggagcttcagtgtccttgtctgtaaaatgggaatcacgatagagccccttcacgggattgctgtgaggatgtagcgcgcttagtgtgtacaccgggtgaatggcagagacgcttaccagcgctgttgtagttgctaatagtaataaaagcctcctttcatggcttcatttatccttgtccaaagccggattctttttggtaaaaaaataaaataaaataaaaacgggctcagttgtccatcttaaatgctaatttgcctattttgcataaatctgcatgctgaattctttgcctcctgaccttccagtgtttaaggtaaaattaattagtggagtctcctgccactgcatgtaaactcatactaagggcaatgacacaatcaaatgcctgattttttttttttttttttttttttgagatggagtctccgctctcttgcctaggctggagtgcagtggtgcgatctcggctcactgcaatctcctcccaggttcaagcgattctcttgcctcagcctcccaagtagctgggactacaggcacgtgccaccacccctggctaatttttttttctatctttagtaaagatggggtttcaccatgttggccaggctggtctcaaactcctgacctcaagggatccacccacctcagcctcccaaagtgctgggattataggcgtgagccaccgtgcctggccaggtgcctgatatttttaaactaatcaacttaatcccatctcagattagatggaaaatgcatctgaagatgggctccctatccctgagagagagagagagagagagagagagagagagaaagaaagagagagagagagagagctggttgagtagggaggataaa

SEQ ID NO: 76998 - DNA, 2028 bp, Homo sapiens
ccagtgtccttaaacgcaaggtaccgcatctcacgagagggcattgcacacttagctttgcatgcacatattgagaagtcactacacatgaggtcccctgataggagttgtggctgagacaaggaatttattttgccccaaggatcccatttggaacaaggctgacatccagggggagcttggttcactcagaatcccagccattgttcaagtcagtctgacattgtcctaccccaaatgcaggttttttaccttgagttgaatgttccaagtattgggttccccatagggcaagcccaagtcttcagagtgtccatttcttattccatgagatcaagagctagctgactttaataggcagtggggaatcacttgatgaattgcagcctcctccaaatgacccgagcctgccatcctgcctccctcggcagcctcatgcctgtgccagccaggaaagcctgcccagggagtttccaccaccctgccctgcccaggctcccatgtgcagggcatccccagaggcctcctcacaaaagtccctcagcggcactgctcccaggtagcccccatctgactcaatgaaatatgagctgccgagtgacagcagctgtgtctgaagtggccccagatcctataattacatctccctttattacctctgctaatggccctccaggtcgacagaaacgatcataaattaacagattatgaactccacttgccacaaattacgtgctttttttttttcccccttcaattctaggagcttgtggtgccaaatcacggatggggggatggggagcttggggagagcctgaatgttattagatgagttggtgcagataaaacaattttcctggggcagcagagctccaagtgggagcatgaggagccagaagctctgggcaggcccgagagccttgatgaggcagtgctgcctgcagtgagcccggcacagggacacccctgcactcccaggggcacggggcacccccagaccctcccggtagcctcttcaggggcctcttggtcccagagttactaataacttgagaatgagacccagcccagctgagagaggcaggggtggaagcgctttactgaagggcagggaggagtgcctgggctccttctgggttttaaataaaagaatctgtggttttagtaaagatatcagatgggacagatgggtcgaaattaagagttccaaattccccatcctaaccttccttctgggaatttcctgggcagatacaaccactgtgtgaggtgtgtgtgtgggtgggggttgtgtatgtcccccagtccatgggcttataccataacactgctttacacctgctttttccatttaattatacaaaatagtagcacttacctggcaaagcagggttctaagtgttccacatgtcagctcatgtaatctgaacaaccccatgaggtgagtgctgttatgatttccattttacagaagaggaaaccgaggcactgagaggcagacttgccagggtcacagctagtgaacagcagagttaggaagctgatctctgtgctcatacgattacaccctttttgcccccttggctgtctttccacgtccacacagagttctaacttatttggcacattcatttaactaaaaattacatctatgtaataatcacatgtattacattagttacctttttttttttctattttgaatcatttcaagcagtgatctaatacccttttacatttatctctatgtctttattcatacttttctttctaggataaatttctttttttttctttttgagccaggatctcgctttgtcacccaggctggaatgcagtggcatgatcttggctcactggagctttgaccacctgggttcaagcgatcctcctgctgtagcctcccaagtagcagagatcacaggcatgcaccaccatgtccggctaatttttaaattatttgtagagatggtgttttgccatgttgcccaggctggcattacactcctgggctcatgtgatcctccc

SEQ ID NO: 76999 - DNA, 1387 bp, Homo sapiens
attcactgcacaggggacttttcccctgcgtttccagaagcctagtccttacctcatcctctctctccaccaccttccaattcagttgtctgctaatttcacccctgccctcctcctccatctcccctccagtctgtctgcttttagaccccctccctagagctgtccaacactccccccaacacactctccggtgctggctgattggtatctgttaattaatgttgcccaaggcctctctcctactcaaagacctgataagggaaattggatgtccatttctatctatcttttattacctcccagctcccccggccaccacaggcagccacacaccctctcccatgcagggaatctggacaaccacacacacacacacacacacacacacacacacaccctgatcccctgtcacagcctctcccctgagaaggtgcatcaatcaaagctcccccgtgtcagtcggtgtaatcactcctgctcttttgttgatcacccatggattccattagccagtggtgatctgaggcccaagttgtatagatcagtcttgggaactgtgataattcacttggagaatgctcacagggtaagggtggtctgcctggtcagggaccttcagctccaggagtgacccctaaggttcaactgccatgccctgtgtggaagccagggaagaagtggcatttggagacaggacagcagatggatgggggagaccacacaagccaaagagctgggtggtccagaagctcaggaccacccaggcctccaggcaagtccagagaggagaagtgagtgatgccaatggtgtgccaacaacaacaacaatatttagtaacaacagccacagccatgaccagcaccctagcatgttgagtgctgatggcgccgggagaggtgcccagcactgtacatgcatcttctcttttcgcccccacagcaccccacatcagaaagtggcttccagccaaggatggggtctaagtcagcaaatgaagtagaaagtccttcctaggcaaaattacccctgaaaaaaatcccttcatgtcagttacccatagtgcatggtgcaaacaactttgtggatgcccttccttctttgaataaatccagcatgtccgtgttagaaccaatcactgagtttctgtttgaatctccagtgaagttactgccttgtgtttggtggttaagatgcttgaaaatcagctgacttatttatttacttactctctcttactctcctataaatcaagatgttaattgactttgcctaatttaagtgcatgtataatgcaattccagtacattatcattgttctgcagtgagaactttcatctcatcattagtaataatagctcagtaaatactttgtatattctggaa

SEQ ID NO: 77000 - DNA, 3677 bp, Homo sapiens
tggaatcagcctcctcaaatagcagggaggggggaactagcatgattccaagctcccggaacaggcctgctgggtcatcgttaagcagagagttatggcccgggaagaggggctccgaccctgggagagcaggctgtcctgtgagaaagtgcccctgaccccgggggctcttgatctcttagcagccccaggctatggtcactggggccttcccctgtggctttgaacagctgcgtcctcgttcttggtcaggcccgtgggtctctgcacagctgagactgcatcaaggatcaggtgtcattttcaaataccaaagcctcccctggtttgagcagagagtgggccctggaaactccccagagtggccgagagcacgtactgctgcctcctggttccagtatgtactcagtcactcctttaactacaaatgcattgaattaaacaaaaagcctctacagacgtttggaaaataccatagagctaacaatcataatgataacaacaactgtcaacattgactgagctctcattttgtaagtcttttccgtgaattccaagtctgaggcattccccaaggggaggacagtgagtcttacgctacacagggaaagcctgggggcaggatccaggggtgccagggacaccccgcaaccagccacgccctgcaacctctgcccccagcgagccccagggaggcccctggtccgccctcctgacctgctgctgccctctgtgccccctcttcctgcaggcttctcaagcctctccctgggggaccagatgagcctgctgcagagtgcctggatggaaatcctcatcctgggcatcgtgtaccgctcgctgccctatgacgacaagctggtgtacgctgaggactacatcatggatgaggagcactcccgcctcgcggggctgctggagctctaccgggccatcctgcagctggtacgcaggtacaagaagctcaaggtggagaaggaggagtttgtgacgctcaaggccctggccctcgccaactccggtaagggcggcggcggggcctggaaggggagcttctagggctctgcatgggcctaatgagcccatccctggggcctgtgggcagggctggctgccatggatagagatgaaaggaaaacactgaaactttttattactgaagattgtccaaggggtggcctgcagataaaaagctggtgatgaaggctgacactggctgagcatttcctaagcctcagacatccagactggcacactggctaaggacatgggttctgaggccacattgctaaggagcaaatcccacgtctaccaactgggcaagttgcttcactctgtgcctcagtttcttcatcagtaaaaggagggcagccaaacagtccctactctacaaggctattgacaggatttctttatacataattatattgcttgcaacatgcttggcacataaaaagcactcaattatttatttatttgtttattatagacggggtcttgttctgtcgcccaggtaggagtgctgtggcttgatcctagctcactgcagtctcaaacttttgggctcaagccatcctcccacctcagcctcctgagtagctggaactacaggcatgtgccattattccggccaattcttatttctattttttatggagatagggtctcactatgttgcccaggttggtcccaaactcctgggctcaagcaatcctctcacctcagcctcccaaagtgttggcactacaggtatgagccaccacgctcagcgtcaacttattaaattagctaggagtttattgaattcttacaaacaacccaagagtaaaattcttattgttgcaaccccattttacagatgtggaaactgagacctgaaaaagtaaagaaaatcacccagggtcacacagttaaaaagtgtcagagttaagagtcaaaccaaggtcctctgattccaaaatcaacctgaacctatacccactccttgaatctttcagtcaaatttcttgaacacaggaggataaaaccttcccaactgagtggtttaagctggagttacaaaggaggactcactccatttcattagcatccaccaacttctggctagattatctgaggagagaggcaggcgttgggtaatgccagtaagtgaacttgaatgtaaccaacatccacacttagagagcttccacactattcagggaatggtgctgggtgccagggggctgcaggagaaggataaatacagggtaccctccctaaagagaacacatgccaggaatcacacacataattctgttgcagagcagtgtgtggcagagttaactgcccaggtctgggtcagatagacccaagttcaaattctatctctgacacttcctagcagtatgaccttgggtaactcagtgtccttgtgtgttcagtggggatattctgagcacctcttccaagcactttattttattttatttttttttgagacagagtctcactctgtggcctgggctggcgtgcagcgatgcaatctcggctcactgcaacctctgcctcccgggttcaagcgattctcgtgtctcagccttccgagtagctgggactacatgcgtgcaccgccacactcagctaatttttgtatttttagtagagacggggtttcgctatgttgcccaggctggtctcaaactcctggcctcaagtgatccacccgccttggcatcccaaagtgaggggattacaggtgtgagccaccacgcccagccccaagtgcttttgtgagtattaaagattgactgacaataaagcactcagcctggtgcctggcctagaggaaatgttcaataaatattaattattatcattactattaatgatagaggatacaaagtgttattagcatatggaaaagggagaactggctcccagatgcagacagtacacacagggtaaccaactggtttgctcaatactgtcctgcttttactgaaagtcccatatcccaggaaactcgtcagtccctggcaaactgggacagttggttgccctagcacatggcttcatggtgcatgcagggggtgctgttgatgacccacttggatcccttttactgggttagtgcatccatcccctagctgctaacagttcagaggtacccctttgcagggcctaccctcctctgccttgcccagagggttatgtggccctttccttggcaccaccaggcaatggtggacccacatgggtacaaaagttcggatcagagccctgcatgggatcaggctgaagccgaggtcccatctttgccttgctttctccttccctgtgcttcctgcctccccacttcctttctcctgaacacatgccccccgtaaatgtctgtacctaaacccttgcctcaggctctgctcccagggaacctgatctaacacagaaaaggatgccacttttttagttcaaatcttttattaacaataaatgaatgcaaaataatattaaaaattttacatacgtccacagagaatatttacacattgaattccaaaattgtagtgcattctttgttagagaatcctaatgctgtttttttaaagtatagttttagatttacagaataacttttttttttttttttgagacagaattttgctcttgttgcccaggctggaatgcagtggtgcaat

SEQ ID NO: 77001 - DNA, 3292 bp, Homo sapiens
gccactgctgaggctcagtgcacgggatgactcaggtgtggctccagtggctcagggggctgacgctgggcagaagtgcccaagcacatcagaggcagactgtgaccccacaccatggccccctgggagcctgctggctgcggtttaccccacatcccagccatccccaaagctccctgacagcaggaaaaattcatagccattgattttgtaattaacagtttatcaatgccatcgatacagaccggctgatggattgcaaagaaattaatcttgcaatgttattttatttcatttttggtcgaaggcagctgccaattttgtcctccttggggagagtcgggggaggatggagagggcggggagagggagctggcaggagtcaggagcccacatggcaatgcccagccatgttaggtacacactctgtaagtggccgagagtgtaggattagggccttgcttcatctcccacctgatgacgaaggagtgctcactgccttggtagcagggagcagaaaaatgtggaggaggcttgggtgtggggccagtgaagactcagccctgcaaggacactcacccccagcctgagtccccacaggaataacactacctgacattgaccaggtgctgatcacgctctgggtaatgtgctgcttcagtcaccctcaccaccaccctgtgagtcctcactcctgtgttttacagccggcttagacccagctgtaacgtggccgtcagcaggtgcctccctgccgtgctgggatgtaggtaaattttgtttgaacccctaggtcatggcctaagttcaaaacctttcccaagattttagagaactccctatagctccctccatcaccgtgcctcatgccgccaccttgacacagtgctcagcccctatatctgtgcctgtattctgtgtcctataaccagaattttgtcaggttagcgattgcactgaagacttggggagctggtgcctggcagcggcagctgcagtggttgtcatggtgatagtagtgatggggctaggggcggtggtaggggtgataccgctaccagggcactgacttgtgacaagttctgttataaacccttgacctgtttaactcctttaagcccttgaggtaggcatggctattatcccattttacaagtgaggaaaatgaggctcagagaagttaataacttgcccaaaatcacacagcctgcaagtaagggacacaggattccaagtctggctccagggtctctgctgccaccccctggtgacctcttgagaaatgtcccctgtagacgccagtctctccctgggtttgagtcccagctctgtcattagcttctgtgacctctctgggcctcagattggctctctgtgaagagagggttctgaagatacccctgcctgcctccatgctgcctcctggaccccaagatggcccccacaccaggcagcactccctggccaagcctgctaatgctcgtccttgtgcctgcagattccatgtacatcgaggatctagaggctgtccagaagctgcaggacctgctgcacgaggcactgcaggactacgagctgagccagcgccatgaggagccctggaggacgggcaagctgctgctgacactgccgctgctgcggcagacggccgccaaggccgtgcagcacttctatagcgtcaaactgcagggcaaagtgcccatgcacaaactcttcctggagatgctggaggccaaggtgtgatggccccgcacacggaccaatgcccacctacagacagacaaacggacagaccgaggtggagacctccacagccaccagcctccaccttcaacccctgtatcatggctctgagctgtcccagaggcgggggtttctcacctcctggctgtgtgcagactcccgggtgcagtggggtgggggacggggatgggggggcaggggtgtggggctcgactgtaactggctttttctttggtatgtctttccttctccatggacggtgcggaggcctgggccagggctgactcccttcaggagtggaggccactggagcaagtgccctctcccctccaccgagccaccaagaggcagcatgtgcatttcctaactcccttgccccctcccccatctgtggcctgggtgggcactgctcaggctggataccacctggaggttttccttccgcagagggcaggtacgcaagggacaacagtatctttcttccagaggtcctacctgctctgagatcctctggggccggtcaagaggccccataccttccacagtttccactcagctttcagccagggggtacccacaggagagcagcggctagagctcaagtgcttcctgggcaccccacccctcggggcctacccccctgcctgtcacccaccgcgccggtgtccacctgtcctcctcctcttctcctccccccgggagtcccccgctacttcctgaccctacctcagagctcactcacccagtgggttcagccagccacagcgactccaggggctgtagacaggaacgcgctggcacagagaagagcggggaccacaccatcctcccaagaaccctctccctcttcctgccttccccctctccctgaagggcaggtccaggccaagtgagcctgtgagaagctcaggagcctggctccatccaagagcaccccggggggaggatcaggacaggatggacagaggcccagactcatctttgccaagcacagaaaggccgagcagctgagataagtaggcaggggagccccaaagggagggaactcagcggggtggcctgcctcatccttcctggcttcccttccctgcactcagcatcatgccacagggctagtgtaccagtgccacaggaggggtgccctcctaccacacttgggctaccagaggtttggtgtagctcccctgggcaccgcgagcacgccagctctctggcaggacccctgcagtccccctggctgtgccaggtaaccaaccgtcttggtttgtccaggacgtttctttatcccaggaaactcctctaccccaggcacacggggacagtgggtcactctatttctgtggatggccgtgaaagttttcactaactcaaggggcagccctgaacacccatttgtgctcacaggttggccaagagcagcttagaggatctcccaaggatgaaagaatgtcaagccatgatggaaaatgccccttccaatcagctgccttcacaagcagggatcagagcaactccccggggatccccaatccacgcccttctagtccaa

SEQ ID NO: 77002 - DNA, 1671 bp, Homo sapiens
tctgcacaccaggcagctgcacctcactggatctagtgttgctgcgagtgacctcacttcagagcccctctagcagagtggggcggaagtcctgatggttggtgtccatgaggtggaagctgcttttatacttaaaactcagatcacaacaggaaatgtgtcagtaacaatggaactccatccaatgggaaagttcctggtactgaaggggtccattggacactcagaaaagaagttcaggggccaacttcttagctggaatcctggccagatgaggaccctctccggggaagggagaggactgacttagtggaaggtggtgaagtgaggagagtttaggggaaccttcccccagtggaacagatctcaagtttaccctaaacctgccatttctggaaaatctgtaaagaggaaacagcctgtctcagctgtactctcatgatacaggtcatttgaaatgaaccaagaaataaaacatgaaaatccaaccatggagaaggtggtatggctgggttttgtttggtccccttgtccttatacgttctaaagtttccagactggctttgtcactttgtgaactcgtcatgtgtgaaaaccaatctttgcatatagggaacttcctcgggccacactttaagaaccaagtaagaggctctcaagactccagcagagtcgggaggccatggcagcgccttagaggagctggaacctgcacccacctgtgtcggtggggggggcctcctttccccatagactctgccctccctctgtgcagatggaagtggcaggggagggtgaccagcttgtgacaagaagactgaagggtccagagtccatgctcacggaacagcaccaaagaaaagcactatgtggaaagattgttttattttctaataatgataatatggctggaatggcttcttaagatgtatatattttttaaaatggcagttccccattgcagcatcacctacttgtatgtctttctgcctctgtatatgttctcccagaaacccccatgtaaatcaaatgccctaggatgcttccatcctggtcccatgtatctggaatctaataaataaggaaaggaactattgagtttcttcacacattgtctttctgggctgactgtcccccagacagcactgcccttgggtttcaggctgaggctaggagaggccgttgggagaggcaacccagccttagtgttccctgggaagtcccatggtgtcattttaaaacatgttcaccagcaaagctcaggaatgcaactggagaagtatgctgcaggtctgagaagctccctgttgcttttatgcttttaatattaatggtaaggcaatcgattactttcattaatgccagagaaatgagatatcagatatatgtgaatgaaaaccaattcattaccttaggattttgaattgcatctgtgacacacacaacaccggatagcacagcccacatgttattccaggacacactcaggaccagtgagaagcagaggggagggcctgaaagagatcaaagaagacatttcaagatgccttttgtttcaagtaaaagttaccttagcttatactggcttactggatttatatgtgagtccggaagtggggtaggcatcaggcagggtttgatccaggggtttacaaagtcaatagggttatg

SEQ ID NO: 77003 - DNA, 1074 bp, Homo sapiens
tgccagctcttacaagaggaagataaatgataacagcgctgggaacaaaaccaaacatccttcatgttgtcagagcaatgaagccagcacattgcaagtcatgggccccagacagtgccttacttttggaaaaggcttgggttcttagtccccttctgctctcagtgaacagcacaattcatcttccttggggtgtctcctgaaactgtgggtagatggtaccctggggttggctagagggaggggagtcaacatgagccagctgtccttctcaacgtcccctctctgggccaacagtggtcttgtgtgactccctgggtcccttctgtgtcccgggtcaaccagacagggctggcttccatgtacatttagcaggttttgtcccaccctctttcatagagcactcaaatattaatgctgctctaagaggaagcaaactgaaacacaccggcagggggtgctgagaagatcacagagacttagctgttgcataatttctggctttgaatgcagatagagcatgaagaagaagccctgctctgagagtcagggaacccgcctgaatttggggctctgctttgccactgaagaggcaaggagccaagtcagtcacttaacctctctgggtcctaatccctaacttaatgttaggaatgtcctaatccctaacttaatgggttgaccaaatagacttcaagttaccttctaattttttcactctgttatttcttttttttttgagagtgagtctcactctgtcgtctcactgcaacctccacctcccaggttcaaacgatcctcctgcctcagcctcccgagtagctgagcttacaggcatgagccaccaggcccagctaatttttgtatttttagtagagacggggtttcgccatgttggccaggcaggtctcgaattcctgagctcaagtgatccgcctgcctccgcctcccaaaatgctgggattacaggcctgagccacggtgctcggcccactcttattctttatgcaactcagcatgtacatctgtggttttcctgagggcagcatccctttccttccttaggataacagc

SEQ ID NO: 77004 - DNA, 1099 bp, Homo sapiens
ccatgtggggagggagtcacacctcacacaatgccacacctgggccacctgccagcctcccttccacagcaacggtccataccactcacagttcacaaaatgtactctctgctaatccccaccacaaccttgccaaggggtgtctgcatggcttcctagataaccaatcccatcaaacacacgccaggagtcacaggtggatgccaggagttatgagtgaacgccagccagcccagggtgcatcttgttccagtctctgagccccggggtccttgtgtttctctgcctggtgggggatgcataccacataaaactgtatgttccaggtcttttctcactcccattattcttcattaagcctaattggaatgccactgaataatcatattattctaatgctccatgtaattattaagaataatggtgatttccatttctcttttcctcttgtattttttctttcctcccacacaaaagctacgtttgcttcttcaaggtgttgtgcttgactttattcccttccctggggctgggaagaccttggctgggtgatgaccatgacggccacaccactctggcaattttgtcactggattctccatgccagttccagaacatggcatcaaatgttgccagtggggatggggacagatcagagaggaggagagtaatttttatgtggtttacacattgtgctctcctggacatttgctcatttaatcttaggagcaaccccgcagggtaaatgatattataactatcattcctattttacagatgaggaaattaaggttctatttccttctttcatgagttttctatttcgagagtttttaagttgtaaattcaatttcctcaaaagttatagggctattcatattattttatattgggttaattgtggtagctggtgttttttgaggaatggattcatttcatctaaggggtcaaatttatgtatgtagagttgtacatagtattctcattctcttgaggtctgcagcatctgttatggtatcataccctgtttcactcctgatattggtaatttgtattttttttctgatttttttctgtcagtcttggtacaataattttt

SEQ ID NO: 77005 - DNA, 1003 bp, Homo sapiens
agttttgttgttgttgttgttgtttgttttgctgttgttgttgttttagcagagtctccctctattgcccaggctggagagcagtggcacaatctcggctcattgcaacctacacctcccggatttaagcgattctcctgcctcagactccagagtagctgggattacaggcgcccgccaccacacccagctaatttttgtatttttagtagagatggggtttcaccatgttggccaggctggtcttgaactcctgacctcaagtgatccacccgcctcggcctcccagagtgctgggattacaggtgtgagccaccacacacactgcccttgcttggattttgacaaaagctttctaaatttctcttctcccccgtccttcctcctcttcacatccagattctgtcctcgggtgctttggcccctcctttgctggcctggctcttcctttctgacacttgtttcggcaggggcagccaccgcctttccctgaacatcctgtccccttcctgctcctacagttctgcccacctggaatatcttgcatatcttcctgtcaaattctgccagtccctccagatagctccagtgatcttcccctcacattagttatgtagactagagtcacaagccccaaatcgcagtggcttaaacaggaaggttcctttctcccttacagtacccgtgcgtcgtgtatggtggcacaggttgggtgggtctctgctctagctcatcctccagggagatacaggctaggaggctccctatctagaaggtagccagtgagcactgtccattccaccggaaagaggagtggaagccatgtgttatggtctgaatcccttgtccatgactggttcaaggaccaggctgggcccatgttagccagagagctgtgagagtggcttgcttggggcttacggaaaagtgacttcttcaccctttttttttttttttttttgagatggagtttcactcttgttgcccaggctggagtgcaatg

SEQ ID NO: 77006 - DNA, 1091 bp, Homo sapiens
ccgtcttaaaaaaaaaaaaaaaaaaaattagccaggcatggtggcgggtacctataatcccagctactcaggaggctgaggcaggagaatcgcttgaacccgggggtcagaggttgcagtgagctgagattgcgccactgcactccagcctggacaacgaagtaagactccatctaaaaaaaaaaaaaaaaaaatcagattttatatagaaaagctggatctctagcttctcttggaaaatcaaaagatcttataatggtgggctctccagcttgccccagttccccggaactcacctgtctttattcgttgatgatattatggagtatctctgagaaaatggggcctcctcagccagatgctgcaagaggaggtgaggggcagtgggcagccaaggggatgcagcctgcagaaggcgttcccaaaggactctgccactgcctgcccatgcagtgtggctgcggctgcttttacccattggcttctgctttgtgccccagatcacaggctgtatcgagatggaactctcaagctcctgggtcgtctctcccttctctctgaagagatactctgggctgccaatggcttacccaaccccttctgctcttcagaccacctctgcctgctagccagcttcgggatggaagtcaccgccccatgacagggctcccaggggaagagagcttctcttccagaagagctcactggatcagagactgtggaaaaatcccatgcatctagaaacttagatccaagaaacttacatcccctcccttccccctcctcgttccctttttcccacggttagactttctccaggcctggctgcgttctctgcctgtggtccttgccccaccccagcctcttcctaatcctgtgccacacactcagtggccctgggagaggcagaaggggggctcccccttccttccatgtatccagcgctcccccttgatttttaattaccagggttatgggagttcttgatttcattggttatttgctttcaggccgtttcttgatgtaccttctgacctgaccttttccctgccttcaggacttctgggcccagccctcttgccaggcatgca

SEQ ID NO: 77007 - DNA, 1006 bp, Homo sapiens
cccatgttactgcaggtgaaaaggctatgtactctttcctcagagggtaaagcctcacagaagaggcctgggccccagacaggggtacattggggatactttaccaggtaacaagcagatagtgggggattaggagtgttagggagtctcagtacaaatgtgtgtttctaggctaattttagctaagactgccagccccttcttagcatggggaggaattggctgagattgagtcatctgagatcatccttttaaaaaatcttcataaaacccatagaaaaagtgatctagggaaaatttagtaatttttgttaactaatgtttcccccttcatccctgtaggactgtaggtaccatccagcactgcctccacctgacgtcagtatatacccacttcctgccccagcgtggccgcccagaggtcactacaatgccattgggtcttggaatgacagtagattacatcttcttctcagctgagtcctgtgagaatgggaacagaactggtaagcctgatggatcctgggttcctccacccccaggtccctgggaacagctaatggtaggtcaggcatttggtagcatgtcttcagctgctgggatttaaccagcaaaggagcagatttcatacctcccttgcactggtcatccttatcattctccccataggccacttgcctgccttgtctctttttacccttgcagcattaaagagaggagggtaggacagtcactcccaatccccattttagaggtaaaaatagagatctaggaattggttgagtttgtttaatgacagccactgaatgagggacttggttaggtaagagaccttattttctgtctcctctccccataccagtgggcacagtatagcaatctcccagccccatgcctgtattgtgtaaagaatgtttctttttggccaggcatgtgtattactgttatggccaggcacgtgtattactggttcacaccggtaatcccagcactctgggaggccgag

SEQ ID NO: 77008 - DNA, 2161 bp, Homo sapiens
ccagcttgtctgactctagattctgtgctcttttctatcatgttacattgcttcatacccttccctccttgcccttccagcccctcagtcagctggttacgatgtaagggggaacctgctgaaccaaggaagtggcaaaggctcctttactgagtagcaggaacaatgcctcaggggcatacactgggactgctggtgctggttggaagggattcaggctttaaggactctgacccatctctttggtgggattttccttgcaggctttacctgtttctacaagaggaggactgggtgtaaaaccgatggctgtgctgtctgctacaagcctaccagattccgcctgctctgtgctagccctgtggagtacttccggcctggcttggagctacttaatcgggataatgtgggcttagtgttgctactgcaaccactcgtcccagaaggcctgggacaagtctcggtggccccgctgtgtgtggcaaatacccatatcctttacaacccacgccggggcgatgtcaagctggcccagatggccattctcctggcggaagtggacaaggtggccagactgtcagatggcagccactgccccatcatcttgtgcggggacctaaattctgtccctgattcacctctctacaacttcatcagggatggagagctccagtaccatgggatgccagcctggaaggtgaaatgggagaggccacggtgtgggtgggaacatggtctaagagagattcaggcgttagcatcagtgcttcttctgtggcagggacctcagtacacctgctctggcctgctcctcctttttcttgttatgttgaatagcttgtacccaagcctggaagttaagaattcttgagtacttcggcatattggaatttttttcagtttttatcattaatatttttaattcacaagtaatacgtaagtacatacttgaaggaacttaaacattatacagtaagacacaggcctgttttattacccacattccctattctattctcttagagtaacataatgaccgttctaagtttggtggtagtcttttagcttgttttctttgcatttacagtgatatctatgttcctatgatattgtaatcagtgtttacatttgttaagcacttaagtgtgtgccatgtgctattttaagcactttatactcattaactaattagttttcacagtttccatcatggcttccattttataaatgaggaaactaaagctcagaaaagtgaagtaatttgccctaggttatgcgggtagttagtggtggagccaggatttgtaaccaggtggtctggctgcagagctcttaccctcaaatactgtgctgtcattgcttataacagccaatatgtaatctaccatgtgtgttttataaacatgatacactactgtatgtttcatttgtagcttgttttttttcactcagcaatttgcatatggatctcattccttctaactgttgagtgttgatgacaaacacctcgtagttttatcagcttgtgctgatttctttatgtcacttaatctccttgttcctctattttgcccctactgtttcaatttattgactaacttttggcaaggcacaatggtggaaggacacaaaacgattgtattactgttgcgcacatgggattttatgtaaatgagccagatgtgtgcagagaaaggcatgatcttgccctaaaggagctgtaatcaaggaactcagggaacgaggaaaagaatttactgactgcctgccacatgacaggcactgttaggcatagtgaatgagagcacttgctttgaagccagacagtcctgagttcagatccgtgctctgccaccttgagcaaattacttaacttttttgaaccccatttgcctcatctatacgatgggggatataatgggacctgcctcagaggtgtttttttgggtggattaaataaaataatgcgtgtaaagtgttttccagtatctggctcaaagtcagtaaccggtagtgattattaagattcttaattgtacatggtattattatcccattttatttatttatttatttatttatttatttatttatttattttttgagacagagtctcgctctgttgcccaggctggagtgcaatggcacgatctcggctcac

SEQ ID NO: 77009 - DNA, 1011 bp, Homo sapiens
tcttccaggtttaggggtcagaaaacacccagggctgcaattactctaaaaatgtctttaacctcaggtgactgttaagcacactcatctgagtgattctccggagattcatggatttatcaaaaatgagagtgtgtcagcttccatatatggagcatctattagatgctaggtgctggggatgtagtggtgagcaggccaagattgtctctggccttgtggagctaaccatgtcatctgaagaatgtccatagaaatcaattccccacagagagggatgggtgacagggaagatggaaaaaggaacttcaggcataatattactgagtcaggagtggagatggcagcacctctgcattactcatacttgccattgagtgcttctcccaatcctttgcagaaattttgtggcgagaatgggaggatttctccacccagccagatgctcagggcctgaaggcaggagatggccctcagttccagttcactctgatgtcttataacatcctggctcaggacctgatgcagcagagctcagagctctatctacattgccatccagacatcctcaattggaactatcgcttcgtgaacctcatgcaggaattccagcactgggaccctgatgtgagtgaagagggggaattgccatcttgcattgttgctggacctgggctgttgcccagtgctcttagaagatgagttcaacccatagttgttcaaatgattggagtcctatctagggctggagcttgcctgcctggtgtcagtgagttgttggcagatgctgagaagaatctccctagatgtgcacttcccagcacctttatgcaggaagggaggcttgagggattcaaggagcaggaaaatccagtgcacatctctaatctcttcagcttaagtctgggcctgttcttgctgttggtgactctgggaagtttcagtgtgacccagcagcttcccacctggcctcaggacctgctcctagagggtgggggtcacattccagca

SEQ ID NO: 77010 - DNA, 1093 bp, Homo sapiens
tctttaaggaaggtttcctaatcctgggtctatgaaggtctgcggattggctgcagagggccagcaaaccttctgaaatggatacagaactgagtgtgtgtgtgtgtgtgtgtgtgtgtgtgtgtgcgtgcattgcatttttctggggcaagttcatagctttccaaagattctcaaaagtgtctgtgacctaaaatatattaagagacccttaagggcaaggactttatcttagctgtctctttgttccccatggtaccaccaagcgtggtgctttgcataaaacacatgtaaacatgatgttcactaaagttcattgcttctgttgaagggtgatggtctccactccctggatacaccagcctgggaggtgccttctcaatggaaagacaaaaagagcattttctcgctccctttctaactccgctgccaccatagctcctgtgaaaaagcttgtggcgaagggggacaaaaaaaagaagaaggttctgaagttcactcttgattgcacccaccctgtagaagatggaatcatggatgctgccaattttgagcagtttttgcaagaaaggatcaaagtgaatggaaaagctgggaaccttggtggaggggtggtgaccaacgaaaggagcaagagcaagatcactgtgacatccaaggtgactttctccaaaaggtatttgaagtatctcaccaaaaaaatttgaagaaaaataatctatgtgactggttgcgcatacttgctaacagcaaagagagttacgaattacattacttctagattaaccaggatgaagaagaggattaaatttcatttatctggaatattttgtatgagttcttgaataaaacttgggaactaaaaaaaaaaaagagcattttctctctaaaaaaaaaaaatccctgtcacctggagagtccacacatcacgcccgggctcagtagtggcacgtcctctctccccaagatgggtggggaggtggagtgggtggacaagaaagacaccatcccccatccctaggcaggtctgaaattgaattcacccccaggaggaaggagaaatttgccaacctaatagctttcattctgtgtg

SEQ ID NO: 77011 - DNA, 1070 bp, Homo sapiens
cggaggtgatgggaacaggaagcatgttctggtcttccatgtgcacacacatttggacacataaacgtgcatgcacaggtgtccaggccaggcgtgtaagcccccaggagtgcatgcgtgtgtttgcgtgcagtctacaaacatgttttcacaaagctcaaggagaagcaatcagtcatctccaaggaatcttagcaacagccatccccagaaaaggctcctgccagctggggcagcgatgagtcagcagaggcgtcgtgggggaggcgggaggcgaggcagcctcagccctggagcctgagccggcctctcccttctcctgggaaggcctccagacccggcctggccgccacgcctgggtcactgctttggcactgatgtccgagaacacattcctggaactggccagcacaggcggctggagggtttttccctcctcctctctctccctctcaccctcctgtccgggccccacacccgcccttttatttttccttcttgctgcaaaaccaaaacaccgtgttcacgagttcaggcgctgtagccaagtggcaggagctggcagagcaattgggaaacaggagctgcctggcccaagcaggccaggggatgaggacacctctggccagccacagagagggccctgctagggcttgctgagccctggttaagtactgcagggcaaaaatgtcatcgcctggggccccagggaaccggagttcaaggtggcagctcccagagaaatggcctgtgtctctctgccccagtagcagagcccgaggtcactagcagaggatggcggctggaaggtgaccaaaggagcagagaaccacaattattaatcatgaatccattgcctgagtgcatacacagtcttcagagccacctcagggtagaattatgtccttatacagacagggaggtgaaggtgtgggcaggtgaaggaatttggcacaaggtcacgcagctagcttttagccacggagcttgatggaattaatccagcttcgagctgacttggaggctttaactgatgggccacactggcttttcttcctgggctgcagcta

SEQ ID NO: 77012 - DNA, 1072 bp, Homo sapiens
cctaccctcccccacccccacggtacctgggggtcatcctgaagaccgtatgcattgccatggactccccgggcaccaccctgcagcctgcccatgcccctctccagcctgagctgcttccctcccagcccagagccctggtgaattcccccgtcaccttccatcagggttcatgttagagctccagtttggaaaaggacttccccctcctcctcccccaaccccctgcccagatggcagttccccttccccagggaccagtgatgcagcagctcgtgtagcctgcagttgccatggtgatagccctcctttggctttccatggggtgggggatgacagggagggtgtgagtgtggtgagtgtgtcccattttccgctccaggtgaggagagcttatggagtggaatcctaccctcctcgagtggggtctgctcctcctcccagctgggacccagccagctcagtggcatcgcagcagctgggaagactggaagacagacagggacactggactgaagaaagatgtcccagaaggagcactggaggtggggggtggacatggccattggcacagttgccaaaggatggaggccggaacctggggtgggagccaaggcatcggggagctgggaggagggacaggctggagcctcagagcctcggaagagacccggaaagggtgggccccttatttctgccatccacccaaggagtctcccactgcgcttccccagtcaagagaaggcccctctgctcttccaacatgatctgtaatttccggcagacatttgaggcccctgacatctgcataatgtgggccagtctcttagcaacggggaacagctgtctggcatttccaagattaaactgtaactatacgcggtccttgccagggggagggggtgggggaaggggataaacactgcctcctggcattttcaaactcatttagcttttattcatttcctgcctccagtaaagaggccagggattcgggctgggctgttactgcccctgccaccgccgcctgccacgccgctgccaccacctccgctgctgaggttgcagatgg

SEQ ID NO: 77013 - DNA, 1050 bp, Homo sapiens
tgcagttttagtagagacggggtttcaccatgttggccaggctggtctcaaactcctgaccttaggtgacctgcccacttcagcctcccaaagtgctgggattacaggcgtgagccacctcacccagcctgctattttcattaggaggaaaagagggatggtagctttcatccagatcccccatcttcagaatgttttcaactttccccagaacctccacagcgttaagtcagtcaaaatccttggatggacccttccaagtagcaagggccaccctgtcccctttcccctggccatgagaccacgcagagcgcaggggccggagtcagaaagggcagtttggcccctgggcagtctcctgagagtctttctcctcccagtttctactatttggcggaaccttgaatgcaggggggcgggacagagaaaaaactagaaagctcgacttctgcctgcggggccggaagccccgctgcggccccagcccgcggttagcccctgtttgtcattttgcaaatctggtcaacccacctccggtgaaaactcccaacctcaccccagggggcaatgactaattacaaaacacattttctctcgttttcgtcaagctcgctgtcccgcccacacatcccccgcctatcccggcacccgtcggcttcctcaggagcctcactcaactgtgttgaatgaactcttggcctggtccctcccccagagacttcacaccgtggggttctttcctccctgctcagctttactttcactttctagtcactctcacttctctgtcagcttcagcttctcaccctagagcttgagccctggtcctttcttaaggcaggggctattgcccaagtcctgggctgcacccaattcgtcaaaagtctcgattcatcaatagtcaaaaatatttatcaaatgcattctgttccaggctctaggaatgcagtgcaagacaggcaaggttcttgctcatacagagcttctagaaacctgggatacagagatgcaatcaagtgataaaacacatggatgaaggctctgccattg

SEQ ID NO: 77014 - DNA, 1162 bp, Homo sapiens
cgtatgtttctatattttgaaacaaaggtatgtaacttcttcatttgaaggataagctggtttgtgttaagcagtatagtattggttgggtcatttgcatcatatcgttagcatttatttggtggcagaatgtttgcctaggtacagaattaatagcccttagcaacgactgctgctggtgtgtatttttgtaaatgttatgcactctctgaaaggaaaaacacacacaaaagaaaaagacttttttttttttttttttttttttgccaaggccagtgttgctgcctaaaaaaaaaaaaaaaaaaaaaaaaaaaaaaaaaaaatgctataaaatggtgaaagcttccttctaaactgccccaagtgttgaagtcttcactttattttgttgttttgttttgtttttctgttttgtttgcaaaatggtaagggggtgtcgggggggatggggtgtattttgttgcaagtttgtgaggggaaaatgttttggtttgtttctactgacctgaatgtgttggatctacacgtgttgttttgtttttgctttattgatgcacggatgcttttgaacagtagagcgaaatgctagacatggagaatctgctctgtttgtcctttatacatttctgtagttaacagaacactgtaatgtgccttggagcttagtaacttgtaataaattcaattgatattaactgcgctgagtcagcaattttgtctttctagggctaaggccatgcaactccgacgtaggcgacaccctccctacctccagtatagaacgaaaatcctagtgcttttgaaagccctgggagctggcctgtgggaaaggccctgtgctgccttgctgcccctccccctcggtaccaggctatttaaattcacctcttggggaggcgacagttgctgactaagcgatttcggtttactcttcagcatctctattttcccccggatgcgggcccagctgcaaatggcattgtcaagaatgctttctggtgcctcgccctgtggcggtgaacataggctgacacccagtgcagctggtgacttgacaagtgggcgaaaaagtctaggagaaaagctaggatgctttgcttcttagatatgacagacatcagtctgcatatttaaaacaaaactgccacagagctgggagcaa

SEQ ID NO: 77015 - DNA, 1048 bp, Homo sapiens
ggagaggaagagacagcccctttcgagcttccacgcaccagccactccggggagggggccaagaggcaacggcggccaccaccgggcaccctcgccccctcccctcgggccgggagcttccagcccaagtctgcagcaccaggaagaaggcgcctgagctcccctcgcgacgagtcaaccgcagtaggaggtgggggcgaagagagggctgaacccgtccgctgcccgggcggtggagcccccacggcgaggcgctgcgccggcggtggagactcgcgttccctccagcccctggggcagaactttctcgccccccctcctccctcccccgcagtcggactccctccccagccggccagtcctcccggaggagaaggcgccgcggagacagcccgggcgggggcctaccttccccagggcaggcatcatgtcggcggcgcaggtgtcctcgtcccggagacaatcttgctacctgtgcgacctgccccgcatgccctgggccatgatctgggacttctcggaacccgtatgccgcggttgcgtcaactacgagggcgctgatcgcatcgaattcgtgatcgagacagcgcgccagctgaagcgggcgcacggctgcttccaggacggccgctcccccgggccgccgccgcccgtcggggtcaagacagtggccctgtcggctaaggaagcggcggcggcggcggcagcagcggcggccgccgccgccgccgcgcaacagcaacagcaacagcagcagcagcagcagcaacagcagcagcagcagcagcagcagcagcagcaacaacagctcaaccacgttgatggttccagcaagcctgcggtgctggcggccccgtctggcctggagcgctacggcctaagcgctgccgccgccgccgccgccgccgccgccgctgcggtggaacagcgcagccgcttcgagtacccgccaccgccggtgagcctgggaagcagcagccacaccgcgcgactgcccaacggcctggggggcccaaacggcttccccaaaccaacaccagaggaggga

SEQ ID NO: 77016 - DNA, 1029 bp, Homo sapiens
ctgtgatctcactccatgttgccccagaaggcggaacaaggccgtgatttttttttttttttttttttaagacggagtcttgctctgtcgcccaggctggagtgcaaaatggcgcgatctcggctcactgcaacctctgcctcgcaggttcaagcgattcttccgcctcagcctcccaagtagctgtgattaccggcacccgccatcaggcccagctaattttttgtatttttgtagagacatggtttcaccatgttagccagctggtcttgaactcctgacctcaggtgatcctcccgcctcggccttccaaagtgctgggattacaagcatgaaccaccacgcccggccaaggccgtgatttcttctgccttacaagatcactgctcatcagtattgcttatggcacgatggatatgttggtcatagctctagttggggcatttctattgattattctaattattgggtttgcttttttttttttttttatttcatgaaaactgagataatcccagggaaggctggagaagggaaagcaatataatgggatttcggattctgaagtgtggcccaccagattgaaatttcctctccatcactaactggctctccacccttaagctagttacccacaaaatctctcttttccatggaaaagagaatggaatgatagctcccaggttgttagggttgtttgagatttcaacttcggttttttgtttttttgagataggatcttgttctgttgcccaggctggagtgcagtggcacactcgcggctggcagcagcctgacctcccaggctcaagtaatcctcccacctcagcctccctagtagctgggactacaggcatgtgccattacacctggccaatttttttgtatttttggaaagggatggggttttgccgtgttgcccaggctggtctcaaactcctgggcccaagtgatgcacccaccttggcctcccaaagtgttgggattacaggcatgagccacctcacccggcctcaatttgtttcttgt

SEQ ID NO: 77017 - DNA, 1045 bp, Homo sapiens
tcccactggcccacaccgacctggggatttccaccgtccggctacggagacccgttgccgccggcgctttcctgctggggccaccagaaggcggggcctcagagcgggaagcccctccctgcagcctcgccatccctcggtcaggtctggtacatggggcagctgtcactgctgtgcctggttgggatggatgggccaggatcttcaaatattttggcttgcgtgagctgagtagttcaacccgaaactcaggagagagggaggaagggagggcgcttagcatttgggtacatatttacattatgttgtttaacttggacttggctgaccctaaacagctgtgtaaacttgagcaaatctcttgaatttcggtttcttcatccgtaaaatgggaaaaagttacactgcttcctttgcctgcctcgttgatctgtgtggaagacaatgtaatgtgcttaataaaatgtaagaaattattaacaatacaatgaccaacatttgtctagggctcggaagagcattcccagacattatttcaccaatccctacatcaaccctgtgaagtaggtgttactttcatcaacctcctgtataggtgaggaaagccaagtccagaattactggaaaccaggttccctggctgtaaaacgcatttcttctttcaccccgcctgttgctatacctttttgagggtctcagatgctcctcagaaactgcaagaaattaaaacctctctccccattggagtttacaggttcatgtcccagtagatgcaaggttatacataaattagcacaggttattttggagttaaaatcactatccagctttgaagcaaaattgagtagttatgctttcctggcatcctgtaaaaccattctctttcttcctgcctttttttttcttttactttctttctttttcttttttttttttttttttggagaaagtctcacttcagttgcccaggctgagtgccgtggtgccatctcagcccatacagcctcaacctccctggctcagatgattctcccacctcagcctc

SEQ ID NO: 77018 - DNA, 1011 bp, Homo sapiens
ggcgaggtagctcatgcctataatcccagcactttgggaggctgaggcgggtggatcacctgaggtcgggagttctaggccagcctggccaacatggtgaaaccccgtctctactaaaaatataaaaattagctgggcatgctgatgggcaccagtaatcccagctacttgggaggctgaggcaggagaatcacttgaacctgggaggcagaggttgcagtgagcagagaccacgccattgcactccagcctgggcaacaagaggaaaactctgtctaaaaaaaaaaaaaaaaaaattgaaaaagtgcctgacagggtctggcacatagtaggttctcaaagattgaagactctcctgctgagatgttctgggatgaatgcacgaatgactatgaagagtggtccagagaacatggcagatggtaataaaggttagagcagttcagaagtgggtgggtgctagaacgatgaagatgacaatgacgatgaaattcaaacattatgttagtaaatgtcctaatggaacttcttggggctgtaacaatggttctcctttttacttctaatgccttttcttacccggctcagaattagacattgcatatacaggcttttctaattgtaagtggccacgcttgtacaattagggtggtccttaattaccctggggcatggaagccctgctacaggataaaggcaagagtgtacttttttttttttttttttttttttgagacagagtcttgctctgtcactcaggctggagtgtagtggcacgatctctgctcactgcaacttccacctcccaggctcaagcgatgttgtgcctcagactcccaagtatctgggattacaggcgtgtgacaccatccggctaatttttgtatttttagtagagacgagattttgctatgttggccaggctggtctcgaactcctggcctcaagtgatccaccctcctcatcctcccaaagtgctgggattacaggaatgaaccactgagcccagac

SEQ ID NO: 77019 - DNA, 2001 bp, Homo sapiens
tgttggccaggctggtctcaaactcccgacctcaggtgatccacccacctcagcctcccaaagtgctgggattacaggcataagtcaccgcgcctggccactgacgctcaagtctgttcaccaaatctttattgagaatactttatgtaagatgccatattcctcctggctaatggtggggtggggtgagagataccgagagcaagatcagagtagaaaggacctcagaatggcctttaaacttgggtgcctcagaactccaaagcccaagtatttaagaaagaaaaaaagactgctgcagtttaatctagggcagggatagggtcctgtccactctgccttgagtcagagactccatggataacatccaaacaaccctgacccagaccagggggggatatagaagcccagagaggtgaaatgacctccctcagtcacacagcaagttggaggcccactcaggttcaaagtcaagcccagtgcctcgtccattgtactgtcctaccccttggcacttgtttcagagatcagctgcggagatggggcgagtcacccaggaacagacagacacacttgctacagactaaagagaacaagtggttctaactcaggatggcaaaggctccccggaagaggggcagggagccgggcctagggcagcatgggcaggattgctcatggcacatggcaggggtggggagagaggtggatgtgaggaaggaggcaattccaggcctcagagaacatgatctgctagcgcctgaagaaagactggcaatccagagagctgggttccagccctggctctgccgtgacaagcccctgggccaggggcctcccctttgggccagtttccttgcatgtaaaatggcaaagagggtgggctagttggccctactgtgacatgctaggaagccttctctcctcccaccaccaccaacaccacccaggacactccccagtgtgtgccaggtgtctggaattgacaccaggagggagtgtccctggctgccctgtggcacagcatggagctggcaggcctgcccaaggtgtctgcccagagctctgggaaacagtgacaaaccatgaggaggcaggaactggagaagaacccgggcaggagccattcctcttctgagaagtggtctttcccatctggccctctccagaagctcaggcctctgccaggacttgttagggtcccaccaccccaaagaggcgaggcctcaagggtagaggggtacgagtccctgaacaaccccaagcctcagtattctcatttgtaaaatgggtaaaaatagcactttagtagtctcatttgtaaaattgatatcagtacctcagatgatgaaatgagataatgcgtgtcaagggcctagcacagcgcctggtgtaggagccacacgtcccagagggctgcctgctggggaagaccgcataatttgaagcctcctgacataaaacaggctggttgagggagggccctttctgtctaatacaccactcgtcgggacaggattgcaaagggggcctggggaggtgagcccactggaaaacaatgtgtgcgcgccccctgctggctgcgagcagaggtcccgcctgtccgctgggggtcttcaggtggttcgtgttagcaccacctgctgctgccgggtcaattgacccaatattcacagatcaccccccaggtgtcaggtaccccgccaggctttgggagggatgcaaaatgagtgaaagataagctaggtttttggagccaactagttttggtgtcgaccacgcatgggttcaagcccagagactatcaatatctgcttgaatgttcattcattcaacagaaatggttctgcatcgggatatagcaatgaacaaaggtcctggcatcgtggacttgcggtaatcttagacagagaacataatccctcagagcttcaggttctcatctgtagcatggaagacttctctactccttcccctcaaaccagagggtagagaccctgg

SEQ ID NO: 77020 - DNA, 1081 bp, Homo sapiens
ggtgatccacccacctcagcctcccaaagtgctgggattactggtgtgagccaccacgcctggcctaatttttttattttttgtagagacaggtgttgtcatgttttccaggctggtctgaaactcctgggctcaagcaattctcctgcttcagcttcccaaagtgctgggattacaggtgtgagccacttcagcaaagaaatttgtaagaaaggcaaactgtcaggccccaccccagacccactgaattgggaactctgcggaagaggcccagaatccgtgaatgagcgtaccaggggcttccgatgcatgttcgagtttcagaaccactgcttgcaagtctttgtgtaacaaaggccccgaggtgggcaggcgcaggcacattagagtacccaaggggggcctgcaggtggggcgggagtgggggtggggctggatggtggtttacactggccttgcaggcatgctcagcagttcagcacgcatcatttccagtcaccaggaggcctggccagaggttcctctgccctaagaaccctcaaggagtagcaggtcacctgtgtgtccaggctggccaagttacgtaaaagcatggagatgactatgacaaaggcttctagaggcccctggtcacctgatcttgaccatgttttgacttccaggaagcactagtcagacagtgaattctgttgctgtgaaaatgccttagtcctcaatgccgagagaggaaccccagagggaaacacctccttatcctcaagaagcctttgcaaagggcctgtgggtcctgtttccccttggatcggtgctagcaagggacattatctgctgagcagagggttgctagaggtggcttctaccctcctcaggaggcaaccctgaaacagacacattgcattaaagaccctgcgcagcagaaggcaggtatcacccgctgagagagctggttgggtggagtcaacgtgagctgctggagctgggctcattgcacaggaaggactggctgctagttctttggctaagcctgaacaggctgggtgtggtcacacctgcttgctggacatgttagcccagaaataca

SEQ ID NO: 77021 - DNA, 1020 bp, Homo sapiens
ctgtcacccaggctggagtgcagtggcaccatctcggctcactgcaagctccgcctcctgggttcacgccgttctcctgcctcagcctcccgagtagctgggactacaggcacctgccactacgcccggctaattttttgtatttttagtagagacagagtttcatcgtggtagccaggatggtctcgatttcctgacctcgtgatccacccgcctcggcctcccaaagtgctgggattacaggcgtgagccactgcacccagcctgctcacagttactgttaaacaccacagtagaacctgccagtagctgagcacacgcagggcgccagccactagacagcatggttatccagccactagacagcatggttatccatctcacttcctcctctttccagctgccccgcctctccatggggtttttcacaagacgatcagagacccagagacccaaaggaaagggagacaatggggattggaggccacgggctttaggggaaggtagggggcaaaaaatagagcatatgcaaagccctgtccttgttacttccctccccaatctccaccaccacccaactggcatatgaacttgttcttcttgtatacagctctgagcaaagcaccatatggcagtttcatcaggcccacggcctggtttccatccagcccactctaatttccttccagtcatggatctgcagaataacccatcctgtggaaggagctcagaggaagaaaaagataacaataacagtaaagatatacagagcacaaaccacagcggggagctgttccaattatgtgtatgtttgacgcttgcaacagctctaggaatatcgctgttagcatccccattttatagatgacaaaactgggagacagatgttccgagacattctcaaggtcacatggctagtgatgacagagctgggatgggagccatgttaaccgtcagactttgctgattcgctgaatcttggctaaaagatgttggcaggaagggctgagagcttagaag

SEQ ID NO: 77022 - DNA, 1030 bp, Homo sapiens
aagagttgggacatgccaaagtccctcttcaaggggagagaggcagctgcatggttacaaagtagacaaagaaagacaaggggcttcttttaaactggaatgtgtgaaatagaagcagggagctgtgaatgccacagcagcaattatgcagaaagactgcagtgcagacactgagcagcaccatcctatctgataacatcagcagcggcagaggcatattccaacaagagctgtttaagagctgctaattacttagattccaataggagctatgtcttaaaagtgattacaatttttgattacagctttttgaactgattgcagctgtaagctatgaaggcagtaatctaaatacaagcaaaaattcctttgatcaaacacaaaggaactcttccaaataaagatacctttattttacatacatatatagctatgtgtttcgcatgcgtaaacaagtgagttatacacatctattaaacatataaccatctacactaaattttaggttccctgagaccagggaccacacttgtgcatccttataattccttacagtgtctagtagggtatatggcacatagaagatgcttactgaattgaatgaaagtgaaacaattgctgtattaatgatttgatcagataattgttgtttgttacaataatggcctactatagaataaatactgggaaaagcaatacaaaagtccattttactaacctcaaatccaggaaatgtaccttcttttctagaaacccaaaagaagtatggaaatacattcttgaaaagaaagctaaccactctacattccacaacagagaccatgttgactgtgctgtgtgagttgctaggcaaccacttggtaattccccatgtaatagagatgaacctatcatctgctttcttagctatgtgtgacaagaagagacaacaggtaaaggacaaccaagaatacctgcacctggatgacacagtcactcctgctgaagtatggtgacaccggagaaaatccccatgccctgtcagaaattg

SEQ ID NO: 77023 - DNA, 1028 bp, Homo sapiens
ttcggagaaaagctagtaatgtatttataattctaacggggattactcaaggttttctttctgtgaccttatcactttattgtatttaagcctctggttgggcttttacctcacacttctgtccaggcacacatgttatacacgtgacacattttaaagggaacttgagcttccaggaatgttgccaagtgtctataaaaggagagatctgaaagcagcatttcagatccttttcttgtaaccctggatctcctttttaatcataaggacaaatcttcacaaagattgtttgtggattagatcaacccttaatttggatggtggatttgtccctgacgtttcaacttagaataaggggtagatcaaatatctgtttcctgcaggggaccagacgtggaggttagatcttaaggtgaccgtggtgtttggaaatgcagaatcttgaccttcaagctgttcaggtatttctgtgactgctaagctactagagctgtcagagactcagcaggtcagagatttgttggaatttattactctattgaatgcctcatgttaattgttgggggctgaggttgcaaagatgaaaaaaacaactcgaggttgaggagacaaataattagactaatgtcagaagtgcaaaaagagtagtaagagctaaatgctttggagcacttgctaggattttgaattttgtccccttatataaacttatatatttattgattcactttctttctttctttttttttttttttttttgagacggagtctcactctgtcacccaggctggagtgcagaggcacaatttcggcttactacaatctctgcctcccaggttcaagctattctcgtgcctcagcctcttgagaagctgggattacaggcacacatccccaagcccagctaatttttgtgtttttagtagagacagggtttcaccatattggccaggctggtctccaactcctgacctcaggtgatctgcccgcctgtgcctcaaagtgctgctgggattatagacgtgagc

SEQ ID NO: 77024 - DNA, 1025 bp, Homo sapiens
tattttctgagcctcaaaaaccgattgtcagtgtttcagtattttgactccatgatcaattatctcttatcctacaaattctcaataagccagaataaattcctgtgtattttctgtagctctattgactacactttaataataatagcaagacctttttcattgttttgccgcaaggattgtagaagactaaattgggatgcattatctaaagtacctgtaaaataatccatgtttagtaagataatgtgaaacttcaagaacctaagaacctaagtaaggttcttaattagttgcaactaacatgagctaccctcctaatctaaatcaacagcctggtccgacatgaattagtttgaatgcccatccacaagcctcatctacttccattttggagatggcttctattcacttttggacagtattattttaggaaaattatactatgcacatttgttgaatttcatacaaaaggatccaatttaattagagatatagttttacactttagtctactttttaagctgggccgtccatgctgtcaaatttcatagctgtcagatagacattgcttttgcatagttctctgcaagttgtgacagtgccactgtttatcttttatgcacataggattaaacgtgtgacctgtggaagagtgcttgatttgatgtcagttgaatgaggaagccagtccccttaaatgagttagatacggggcaaaatgatttttacttggaattgtgtttaaaattcattctcattcagttcagtttgtgttccctttagtctgctcctacagtatgcaaaagtacgagcaagagggttgcttataagcatccttgtcttctatttaattttattttgaactgcttctagggtagttaatgttcttcactagatcttatattagcaggaatgtccagacttggcactccagggtattccagatacagtggtatttggcagggggcttgtgtttttcttcactcaaagaacaacaggatagagtcaggagtgcatcgtga

SEQ ID NO: 77025 - DNA, 1247 bp, Homo sapiens
tacacgaggaaagcaagccttgcggtgtctcttttctcctctcccctttcccctctccccctccttctgccctctctcttctcctgtcttccttttcccttctcttcactcccctgtcccctctcccctctggtgagttcatttcgttacccattggaaaaagcctaatcaaatgtgcctttgttagcagtttacaaagcgaatgctgaatgtggtttgtgtgccttgaatttgtaatggaattagagggcagccagaggactgtgaatctccttatgggtggaaaccattctgtttagtaaacttgaagcttttgtcagttgaaacctctgagaaaataaagctgaagtgggtgaggccagtgttctttgcccatactttattcactgtttggatcacctgtttcagctctccaggcagtgacttcttatataattgtttttcatagggcagtccagatgaaaagagtaccaatgaatctgcctccagctgaataaaccatggagaggaaaaacccatccagagagagccccagaagactctctgccaaagtaggcaaaggcacagagatgaagaaagtggctcgtcagcttgggatggctgctgctgagtcagacaaggactctggcttttcaggttaaaaatatcttatccttcctctgttttgtgagtgaatgctttgcgtgaaaaatttcctccccaaaactcatttatgtgataaggatgggatgctttcacacacaggataaatacttacctgctttaaaatggtaattctgatgccatatgtcagggtacccatcaaagtcaccacagggttagttctgaaagaattatttaacatcttttttcaacttagactctgaatcttacacttccaactattgcaattggtcactggaaaaaatatttaaatactcataattctgttgttttacttcctttttcacaggaattattacattgtaggggaaaaattgctactgcatgtagtttccatgtaacaaattggaagactgccagttaaataaaagtaatactgtatataatttgtaaggtaactttttcattgagaaagtagtttcgctgtgtttagaaatgtacgcctccaacaacccctccccccagtctctatgcattttgtatttggactgtgagccacctggcctagctctaaacttgagtatctattagagataagaaaatagaacagttttccttacaagtttttcttaaaccttacccaa

SEQ ID NO: 77026 - DNA, 1085 bp, Homo sapiens
gttgacattttgacacttctaacaacttcaactttgtcaggccagttgttttaagaatattgtactactcagatataaggtggtattaaaataatcaaactcattatgccccagaaagtagccccagtgaatgccactggaatgcttcgagccactcttgggccaggtgccagtgatttcctcactgcctgagttattccagttaccttggagtaggatgaaatttgcaaaatcaagacaatttttcccattttaattaccacatttgtagttcaaaaaatttcaaatctatacaaaagcaaatgaataccccatatgtctatctttttgccatatatgctttctctctctcgctctctttacacacacacacacacacacacacacacacactctctctctgaattatttgaaagtaaattgcaaacacttgacattttaccccatgtagcttcagtacagatttcctaaaaacaaggacattcttctatgtagttataatatcattatcatacctaagaaatttaacactgatacttatcattagctacactccatattcagattttcccccattgtcccaataatgtcctttatagctgtttgtctttttgtctgttttggatccagaatccaactgaagattgagcattgcatttagttgtcctgtcctttagtctggtttagtttataaccactcccctatcttttctttcctttttttctttcttctttctttatgacattgacatctttgaatgagtcaggcctgttgctttgtagaatgtctcacactctggattttctggtagtgtccccattattagggtcaggattagcatcttgaccagaatactatgttgttgatgttgtatccttcccattgcaacacatttggagactcataagttagtcttactcttggtgatgctctggttggttgatcacttggctaagatagtgtgtacagatttctttaccattaaagtacccttttctctttgtaattaataagtaatttatgggataatactttataattgtgtgactatcctattccccaacaaactgtttaccagagttag

SEQ ID NO: 77027 - DNA, 1008 bp, Homo sapiens
cagctgtttctccaaggacccctcatttcctttatgtgcagaatggcatttagaaaccaagatctgggcactcaatatgtacattgcttctgggctcatttgttttcagtctaatggttcttaactagaggtgtacatttggattacttgtgttttgtgaaatacacctaccatggaaccaggtaaatcacttcagtagatcaagggaaggatcccaacatttatggttttttaaaagtatcactggagattctaaatcatatttccattgatgtatatccttccagtcatacagtcttccttaagctggagaaaatgcaattgttttgaggtttacagattggttttgtttttttaattgtaattacatcttgtggtacccagagcctctgaaggtcttaatcctaccttgggccatactcgtctcctttctcaacatagattctcgaaagtaataaactaactttgaaaccttgaactcatttctcctgtagactgatgatgattactttcatgtgagccctaattgaggcaggtttttgtctgtaagagagttagaaaggaagtcaaactcgtcctagggcaataattcttaatctttggtggaggagggattaattatagatcccattgaaaagccaatgaaagctaaaagcctccttctcaataaaattcacaaaaacacatcacaagtgttgcattcaatttcaagaggtctgtagctccttaggagcctggttaagagcccctagtctagagcctgagtgagttgaccattcttctgcccaccagatgggagctcggaatgtctgagctctgcagagcagatggagtccgaggacatgctgagcgccttaggctggagcagagaagacaggccgaggcagaactccaaaactgcaaagaatgccttccctaccctgtctcccatggtcgtcatgaagaatgtgcttgtcaaacaggtgaggaggactaatatcacctaaagtctttgcaaataaaaatctc

SEQ ID NO: 77028 - DNA, 1058 bp, Homo sapiens
tacctacccatttatttttctgagtgatagcacttgaataaaaataggtatttcctccagttttcccttagaaaaagtttaaaaagtatttgtgatatcagacacaaatagatgttcaaaccactatgtgagagaagcactgtccttgaaattgttctaagcatttgagtatccacttgcccctttgacagaagcttcactcctctatcctttcagcagtaatgagtagtgtgctgctctcctcctttgtcttcagggcagcagctcatcccagctccagtcgtggactgtccagccctcctttgaagtgatctcagcacagccacagctcttattccttcatccacctgtaccatctcctgtcagtccatgtcacactggtgagaaaaagtccgactccaggaactacttgcccattctgaattcttacaccaaaatagccccacatccaggcaaaaggggcctttcccttggcccagaagaaaaaggaacaagtggagtgcagaagaaaatctgtactgagagacttgggcctagcttgtcttccagtgagccaaccaaggctggtgctgtcccatccagtccctcgacgccagcaccacccagcgccaaacttgccgaggactcagctctgcagggtgtgccctctctggtggcaggtggaagtccacagactcttcagccggtatccagcagtcacgtggctaaagctcccagtctgaccttcgcttcccccgccagtcctgtctgcgcatcagacagcactctccatgggttagagagcaactctcccctttcaccactgtccgctaattatagctcacctttatgggctgcagagcacctctgccgcagcccagatatcttttcagagcagcggcagagcaaacataggcgctttcagaataccctagtagtcctacataaatctggtttgctggagatcactttgaaaaccaaggagttgattcgtcagaatcaggcaactcaggtagaactagaccagctaaaggagcaaacccagctgtttatagaagccaccaagagcagggcccctc

SEQ ID NO: 77029 - DNA, 1339 bp, Homo sapiens
tgaaagaatttcagaaatcagagcaaatgtgtctttaggcagattcagctccttttaatatttttctcttggcccactctctttgcttcccctgaatctgtgtggtactatagcagctctactctgtgcaccatgctaggaagcttcctttttggcagaatatgtttggcagcaaagctatagagacaggtgcattcagaacatcctgggcaccagtcatgagtcttactgtgtcaaaaatctgaaaacacttgctgagaaccaaatttattccattggaaaaaccctctgtggagctataagcctcttggactcttcttcctagattaaggcttgcatttccctccctgtttcagtaaaagatgatgaaagccactatcaatcctcactgctgagtggcagggagaagcagcaccactctcagctcttttctaatcttgtaacttagtgctagaagtctctccaggctattaccatgggcatttgttctctgttggagctgtaagcagatgaacccaagtagagaagatagatcttggaaggagagatccattgagtccagaagccagatcagcaaatggaggaacctcggaggtgaccagaaagatctccatcggttgcccaaggctgtaagtagtgatggttttagcgatgaataacgtaattggctatgaagtactgtggcagagctgctgttttctgaaggtgagaagccatttttagctcagagcaacccttaagagaacttttggcagattttgttggcattattgaaatatatatagaaaagttgctgattgcaatggttatgggaatggaatttaatgacatttgtaatttattacactcattggtttttattgattatagtattgtctgactttttattttctactatggttcctttagcagaaaagtaacttttgtgcatatattgaagtggtttttcagctatgaattctttagggtagaaatttatttagcaaatgtgaattcttttgagaaagtatgaagttttgcagaaattgactgtgaaatgtcagagaaaaataaaagtcacttacttgaaacctatttggcctttttgctttataactgcttaaaaatactgagtgaacctggagtaaatatttgaactgatttaaatgttaaacataggtactcatgttatttgggaatattgggattagacactgaacatgtggaaattcattgctcagattttcactggtgtgaacttgaaatatgagtagccttatggcaaatgagtagtcccctgttttctggagccttggaggcttatactgggcaggttgggaggagtgagaggtgaagatag

SEQ ID NO: 77030 - DNA, 1064 bp, Homo sapiens
taattttttttttttttgtatttttagtagagacggggtttcaccgtgttaaccaggatggtcttgatctcctgaccccgtgatccgcccacctcagcctcccaaagtgttgggattacaggcatgagccaccgtgcctggcctcttcatgtgttttaaggaacaatttggggctgcgtgcagtggctcatgcctgtaatcccagcacttcaggaggccgaggtggatggattgcttgagcctaggactttgagatcagcctgggcaacatggcgaaaccctgtctctctaaaaaatacaaaaattagctgggtgtggtggcacacacctgtagtcccagctactctggaggctgaggtgggaggatcacttgagcccaggaggcggaggttgcagtgaatcaaaatcatgccactgcattccagtctgggtgacaaaaaccctgtctcacaaaaaagccaaacgaaaaacagaaccacttgggttgatttaacattattttcactgtcactagtcagagatgacatagatgcagtgatactttgtgaggtctttattctggtccaagccttttgggtcaacctttcatctacaccagaagagagattagagatgagaagtctgcctgggtgacacagcacaatcagaatccctgagagaaagaggcagaagaaaacaacgactgtgccctagctcctgcagcctttacctctgctacgtcagtttcctttatcaaaagaggaggggcataatcctcgctatgcacttgacatcctgagatgaaggtgcaacgcaaaaaagtgatgtctcaaaagtgttttaaaactgctctacggagcaaggcagcctcgccgctcacagacccagtgatggaattcaagtgatggcattcagccccttcagggttgtgactgcttgggataattaagactgtcttctaccaaaatctcatttacagtgaatgagaggagagaaaatatcaacccaggatggttactctttgactggcttcctggaaggagctgttctgtgggtccatgtgtgaccattttggttttttcctc

SEQ ID NO: 77031 - DNA, 1056 bp, Homo sapiens
gaggaccaaatgcatggacagtaacaaggacagtcatcttcctaaggagaaagactggctaacagatggtccctgggacctaaggactgacttgttacagtggagggggacctgggttgaagtctcctcaagtttgttgtctttccaaaactccttgggttcctggagcttagagtgaggcagttcctgccttgcctaatctgacactagggcatgggtcaaagcagagtgtacccactttctggatggaaagcatctcactccagcacatgggcctgaggacccatgatctctattggcactgacagatgattctacccctgctgtgggagtcagagagctgtgctgtaaagaatgactggcagatgtccctgaaccccttcctccatggacgcagagtggttagttaagaatgacaccatcaactgccatctgacgggccaacgacagaggctagtgcatgagatggccctgaaccctagtgtcacaatcttttccaccccaatcctcctaacaatcaccccgttttcaccttcagggccatcttgggccccctccctagcattcctctactcatgctccatgtctgtgaagtgcctctgatatctttcccctctttaccatcccacaaccactatccccacccggatcccggttacatctcactgagatatagtacatgcctcttaccaggtccctcaacctccagtttctcccacttccagtctatcctccaaggctgcgctttctgaaatctacctctgatcatgctgctctcttgctcagaactttcagtggttccctattgcctgtcaaatgccctccaggtcccttagcttggcattcagagccctctctgcttgggtccctactctcagccttaacctcctctgcctctttgtgatatcccttataccccaaggcccaggcctgttctctgtccctggaaagccctccctgtccctctttgcctgctgaaatctcatccatctttccaggccccgtatcatggaaaggccccagacctagcagcagaatgtgctctctccctcctct

SEQ ID NO: 77032 - DNA, 1046 bp, Homo sapiens
ctatgtaagccatgaatctttttttaagccctatttgtaactctttatatcttataaagataaaataaaaacagaatctcagcttaaccaacctcataatttcataaatagggaaacctccaaaatcacatatattaataacaatatctatggtaaattatatttaactcagtatggaatataaagaatatgaaaaaaagaaaaactattatcgttattattatttgagacggagtctctctctgctggagggcagtggcatgatctcggctcactgcaacctttgcctcccgggttcaagcgattttcttgccccagcctcccaagtagctgggactataggtgcccaccaccacgcccagctaattttttgtatttttagtagagatggggtttcgccatgttgcccaggctggtcttgaactcctgccttcaggtgatccacccacctcggcctcccagagtgccggaattacaggcgtgagccaccgcgcctggccaagaaaaaattattagaacaagtgaggcatcacactcctctgccattcagtcaaaagtaagcaccaatttattaacacaaacattacataatacatgatacaggagcaatctcgctactgctagcactaagaaaatgttgttcttgcactataacattaaactgttaaatactgacagtgaaatgcaccaataaggaaactgtcatcacagagaatctctgataaaattttagatgtactcctttatcaaaggcattggcttgggcttcggctgaatacggattgtaacaattgaccatctggtgttcagccaaaatgtgtgttgagtgcatctctaactttagattatttccaatttctcactattattagcaacattgcaatgaacgtcctaacacaaacaactctatgggaccctgtgattatttccttggctgaattccaagaagtggaatggctgggtcaaaaggatccctattgccaaaccatcctccagaaagtttgtgccagcttccttcccacttaaggagtgaggggcttgtaacc

SEQ ID NO: 77033 - DNA, 1052 bp, Homo sapiens
gtggggatccacaggtagagggacttcatttatctccctgacagcatctccggatcgggggtttgggccagcaccggtttactccaagtgaaaggagttgccatgtgcctggctcatgaattgctccttttcagacaccctctgagcacagaacccctgacgctggcccctgctggcttcacaggagccttgggttgcatgatgaccaccaggagctgctggggtgacctgtgggaagggatggggttcccagtaaaccagatgagaactagctgcttgtggggtgacaatatagcaccagagaggagagggcccaccatactggagggaaaccacatggtatgtgtccctcccagctagcagagaaagggtcaggcctcagagaggccccgtggtgagaaccagacttaaagagcagagagctggaccgagtgcctctatcggcaggcactctgccctcagcatctctacctgatagctaggcatgaaaacaccttctccagatgggtgggagggctttggaaacttgtcaagtgtttattacaaatgggaagtattattcctggagtctctggtctaggtggaagccatctgtttcctgccttgatgggggaaacatggtcatttcttcttcagaggatgctctctccctctgcggccagcctagggcatccttctaggctgggaaggcaggtcagccctccccagcccgcttcaagttgtgcttgggcccttgaggagtttcatcccctccatccccagctgcccattatagttaacatatttaacaggatgttcacccccgaaaatgcaggtgtctagtggcaccgtggagcttcctacaggcctgtaccctccccactgcctcaactctcgaattccacgacctctgctctgattcttcctgggaagaggcgggtggaagaaccataaagataatgggtgtaaagtgctgggagctgtttgcacagagcgtccagtttgcaggaacccacgtggtgctcaggccatgggcaggctcacactgggaaaggctgtaatgaaagtgctca

SEQ ID NO: 77034 - DNA, 1053 bp, Homo sapiens
agaaccttccaggtggtgggactggcatatgcaaaggccctgtggcaggagggaaggtggcatgctccaggaactgagggaacaacctaggaggctggagatggaagtgagggggaagtttgacatgatgaagccagaacactaggcagggccccacacccaggccttgctggccaagttaaggagagcgaagaaagcccttctagctgattccatcacagcctggtccaggaggcctccccaggcactgcagattgggttcggttcatctgtgagcccttctcacactgcgttatcactgcctttcagccaaggcctttctcattcacctagaatgagcttgaggaggggaggaacacatctcatcctctttagcaacccctatccagtagagaactcaggaaagaataagtgagaacagtaggatggaagggagggtgagatcagcaagaccagggggtgtacccagaaggctccctgaagaaagcagagttgaactgggccttgccaatggagcattcccgttgggggaggatcaaggtcctccacagaggggaggaatggagggggcagagacaaccaaggcctttgatgggcaaggggccttccatcggctggagctgagattcctcgtggggagctgggggaggtgagactggaggggctcctggggccaagagggcctcccctggtcccagcctctgcccaggagcaggccaggagcagagagctcagatgtcaaaaggagcagggagctgtgcagaagctcgggccttggctttagatctccacccctgctgttcagctgctagctgtatgaccctgggcaggctacacacccactctgggcctcagcatcctcatttgtaaatggggacagttgccacctcttctctggcaggactgttgggggccaggtgagatgactttgtaaacatactttgtcacctggaggagagtgcacataggccctccgtcaggctcagaggtaatccagaggccaggcccattcaggaccccgccccctacctcctggaggctaccatttctctt

SEQ ID NO: 77035 - DNA, 1033 bp, Homo sapiens
aagtcaagccacaccacttctgctgctgatttttgttcccctttgtcaactttgtaataggccccagaccccacgcatcctgggagggccacagctctccctggggactcctccatcctcccctcctcccccgctcacatgtcatcacagcaaaggcaatttgctggggttgcactcctggctagctctggccttaggaggaagtcactcaagaaagctcaggctgccgctccagtgacctcagcatagaaggcctagctgcttggggactccacttgaccttgggtgtcagcctctgcctggccaggaaagccagtgagaagggccaggccccttgcagcctccaggagagcaagccagccctgggagtgagtgggaggagaagaagcaaggggaagaggatgcttgcattgacgtctctcctgccgtcctcccctctccccctgcagaacccaattgtgacccagttcttcccctctgtgatgctctggggcttcacagtgatactgcctctgattgtctacttctccgccttcctcgaggcccactggaccaggtgacctgggggcctcctctcgtagccctgtggtttctccagcctcttcccctgccctggcttccccgccagcctggcacttgggcctcccctctagcctaagaaggagaattgataagggatggttttgatacctgaaaccatccccaaagaccaacaggtgttctgtctttggaaggagggtctgggttgactctgggcccctgggttgctgagatagagccactgtctaagagtgtggggccaaagccaagccctccttgagcttctccctcagcccccagccatatcctgaaggcatggagctgtaggcatgagctaggcagtcccaggcattccatgcagaaggcacaggaggaaagacttgtgtgggaatgtcaatagaatgctttggccacacagaggggcccacaaactcactatgactgtcatcacatatggcccacaccatgccaaccttttacccaatcaggagcg

SEQ ID NO: 77036 - DNA, 1036 bp, Homo sapiens
tttttccatatatataaattttttatctctttgaacacccagccggtattcaaattgccttaattgttccagaagtatcttttagagcttgtccaacccaatatcaaatctagcacatgtgcctcaggttttcatgtcccttttattttagcacagtgccttttaaatgacttggagagaccaagccagcagtcctgcagaatgttccacctggatttttctggctgttcatgatgtcttatgacaggttccatgatctcctgaatgctggaagttagatctgatggcttgatagatgcaagttcaacatggggctagaacacattacaggtagtgctgcaatttacactcagagagatgtaacatcctgttaattcccattcattaatgatgccgtcatgaccttctaattaggggaatgacaggtggatttttccatggttcagttgacatttacccctttatgaccaaaaggtcatctagatggcttactttggcaccacgcaaatgtctagattcttttgtaggaaaaccgttccttcaaccagggctgtttggtttcactgaaataaactcctatgggaaaggtttcattccattccctaataacctattttctaagtaaggagatggtttaagagccacttcagaggatgacaattgctcttcttcctagtacatcctgtgtttttctatctgctgccgtcccaggcatggggaccattcctgggtgtgacaggtcatgtgaccaaagtctccgctagcagttccacatcttgaggacaggccaaaccagtgacagatcccgagggagttctgaatgtgctgctgaagctgtattagaaggtgcactagctcaggaaagagggtctctccagacctcagctgaggggagcctcatgtcacctcccctggatgcagcttgacttggaactgagagtgaatgggacatgttctaaaggagcagtggactaggagtggggagtcctgccactgaaccagccctgggagcacctagatgctcatcaaatgatca

SEQ ID NO: 77037 - DNA, 1889 bp, Homo sapiens
aagggtgggaatgggaagtgtgtggctgagtggctgaaagggagagttgtttggaaggctccccgcttccccagtccctggccttggtgctgggcctgtggcctgtgagcacatgcctgcctaagagggttacattcacatgttgacaaacacccctggccaaatagcccatgacaagacccctagaagggttgccctcctgggcctcttgggaagagccctttccatgattgtcattgagtcagcatctactaagctctccagctacagtgtgccccagtgggactcagacagacaaggccgtgaaagagaaccgggcttggcgatggggaatttctctggagctccagcaggaggaatggaattcaaagcccctcagctgaggcactgggggtgccaactgcctcctactggttctctctcacagcttctacctcttccaccctctggcttacgggatggttggtcccctggcccaggacccccaaagtccaatggcaggactaaggtggctggactcatgggacttttgaggccactgcaaagattccagcctgggtccaggaacttcccaggagagccagctgggaagcagtactggaccatccggccatgaggaagctgcctaaggagcccgaagaattctgctgctcaccaggacccagctctgggagtgcagctggaatggaacccagcattggagagagccgggagagagccgcagctccgtccacagcaccacggagaggacagcgcctcttgggctgctccctcgtgcacagcgcaggggaggatgggtgccagagggtgggagtgggtgcgcgtgtgtgtatgtgagggcatgttgtccatatccctgtggaatacagaccgtgtaactggacagctgagtgtcataaactctaaaatagtccaggctatagtaatattttctggtatttttttctgttggatttctttggttttggtttgtaagatccatcaaaaattctcagacctctgagagggccttgagggcagagaatactgacctcaccttgggatgtcaccaaaggcagagcagatgggactgtcaaagttgtgctgccctccctcccacaaacaaatgaatccagcgtggaggaaggcgcgccgccccgagctggagggcctggctcccaccatgccccccagtggctgcaggtagctggacttcctgcctgtgacgcacagagagcagcggactccggagcgtcagcctgccttagcccttggttcctcgttttttgggattgtcacactgtgacactcgggaggaacgatgtcctatcctgggctgctcagtgttcccaggccctgtgtgccagaggccaggtctctccaagtgcatctagcctggcctggagggcaaggcagatgcattctcctggctgctgggagagcccatgggaaccttgcttagcgcccaaggtagatgagagacagggcagggaatctgcgtggtgctgggatgtggggactctggcctctccagactaatgttcctgtcacctgctgagctttcccagtgtcacttctgcagtcctcctctgctcacccctccctcactccgtgggcaattccctttctctctgtcactgcttcagcagtgaagacccatggcacctagaaatgcatgccagcttcctgcgtctaccactctgcagctcaaacaagaagctcagagctgccccttccacttcctccccaaaagggatgaagaaaaccctgtggtagaaccaaaccacccaaggccagcccttaagcctgcctccaccttcctggtgcatgacaaaatatttcttttgtctcagaggactttgatgcttcaatatttaatgatgaatccgccacactccattttccctcct

SEQ ID NO: 77038 - DNA, 1089 bp, Homo sapiens
cttggtctttttgcctaggttggagtgcaatggcatgatctcagctcactgcaacctccgcctcttgggttcaagtggttctcctgcctcagcctcccaagtggctgggattacaggcacccaccgctacgctcagctaattttttgtattttttagtaaagacggggttttaccatgttggccaggctggtcttgaactcctgacctcaggtgatccacccgcctcggcctcccaaagtgctggggttacaggcatgagccactgcacccggctgtaagcctcattttatatcccctctctcccaccattttcacaccttgtccttagcttggcagatgggtatatattttgtgcccattggaacaatttcctctttcccttctttttccctagaaggttggaatggaccccttatgggagatggaggcttgtctgggagaagtaaagcaagtgtcgtaggtaggcagacagcagctgcctgattcttccctgcaagggaagggaaggagagaaggttctgctcggcgcttggccctatatcagaaaaacctgggccccacatttctgtcagccctctagatctctgtcttgactagctttctttgctaccttcatgcaggggaacagtggcctcaaacccaaggacaatgagttcacgtccaaaccctggcactggcctatcaactatcaggtaggatccaaggctggggctcctcccaggaaatggagccaagaacaagagcagggagaccggtggaggcgggggtgggtgtactagggcggcagggcgaggggcctcctgggatgggttggccagaggtgggagtatctgttttctgccctaattctgaccctgcttcccagagagctcgtgtagaatttgccagcctgaggttcgtgtccaggctccctgtctgtggaaggtgaccatcttcctccccctaatgggtgtggccgaggatgggctgggcctgggtcagcagggtggtctctattccacagggcctacgcttctcaggggtcaatgacacagatttccgagtctatctgcttggcaacccggtgagtgcctaaacattcccggctc

SEQ ID NO: 77039 - DNA, 1006 bp, Homo sapiens
ttggcctctggcgaggtgcattctctgggagggggatcgttttgctctggtggtggggcagtgggattcttagtatctgaggaagcagccctcatgtcttccaggttatgctacagtgcatcacctggcttgcaaattgtggcttttaaaggtgctttcaactttccaaagagaattgcaaatttttgggtacagaattttctaaggcctgagttcctatgtctgcaggattttcaggcatcaacagaggagaaaatacctaactgtgtacctttatcctatagggcaaggacagtttgggtgttcaggtatggtgaccaaaggattttatgaggcagaactcttcttgtgagaagagatttattttcttaaaggttttagcttgtactatccagatactgggtgtcagaaatggaattctttaagcaaaaagcaggcaagaaaacagactgtcagggttgctttatttagaaattaataaattagcttgttattgtgtcgtgactgctggcagaagatgagactcctgggttagagacaaaggactttattacaggaaataggatgcatgttagaagcagtttcccttgccatccaagtcccacagggtgacgctatgggtttaaatggatgactgcacaggcagtgggttgcatccaagtgaaggaacgacaagcttggaaaatctgctgttttatagaaggcagtacgcagacctcctctttgtcctggagggagacactgcctcttctctcaaagttgcttgctgcaaacacaaccatgagaaatggcccaggtgagatgcagtcagggccttgcattcttggtatacccagaatgatgtgtagaggcacgagcaatctgacagcctctctcactcctcgattctatggtcttggcttctagcagattttcacatgaatatacaactcccctggctactcacatcttttcagtttgtcccttacagcatttaattaaggttgttgtcaatgggactctaagc

SEQ ID NO: 77040 - DNA, 1021 bp, Homo sapiens
agcagcatttaccatgcttctggtcactcgtagtacagatccaaaggtgtaatccaaaggcatttagccattaggtaaggcatttcttcagggattctaagctaattaatgtctgccacactctagtggtcaccagcagtccctgtcccttggcaccaggagtccctgtagcctggctaggtaaggaaagggagttgcatctccaaataaggaagatccagttgtggccacccaattcctcctcttcgaaagacactttctgcccatcacctgctttctgtgccaggaccatctttactttctccacaaaaggtaccttcaggacaggctgggactgctgggcttgggaaccatcttggaagggcctaggttcccacttacacccttgccatctagcagactgagttggtagtacagggatggcaatagcaagttcagagagcagcttaatatgctaggggtggcagaggggagagggagctttggtgaaatgtctatagtcagaggggtagtaaacagggcatctgagaagttctttcaagttctcccctatccatagggatacacatgttttggtgggaagattcatgagtgctaatcactggcgagtctttcctgggttccactttgaaatgctggctcccgaagaagtaccagagaaattaactttgagccccttaaaccttggagtagagatcgcacacccagctgcccccaagggcccaaaggtaacaaaaatgagaaaagtgggccagatatgggccatggcagacctgagagcgcatacgctggttgatgggggccattagtctgttcccatcaattgctgctatttaggaacccaaatctgtctccagatttttttaaagaaaaaaaacaaacaggtgttgtatataaaatatcatgatttttatttttattttattttattatttatttattttgagatggagtcttgctctgtcccccaggctggagggcagtgacacgatcttggctcactgtatcctccgcctcctgg

SEQ ID NO: 77041 - DNA, 1886 bp, Homo sapiens
cagggaagggagatgggggtgggtggcaggcctggggttctcctgcttgcttggctttcctctggccaactcaggccaggccacccagcccaccagggccttgtctccacagttttctaaggacttccaggcactgaatcctatgaagcaggtgccaaccctgaagattgatggaatcaccattcaccagtcagtgagtgcagggcctgggggagggccctcatgagagcagtgccctgaatgagagcgcctgacatctcttcctcgcctgtgtacagtcaaggtgcctagcacataggagaggctcaatacaagactcgtggggagggtgcgaggttatttaggaaaataagggaagattcaagcacatggagaaccaagttctgcatgataaggtccaaaaaggcttatagggcttgagctgagcagaagcaggggggaagaggtgtagtgatggtgctggaagaggagaaggaggagtttgctggccctgtcccctctggtccaggggtcctgggccctctccctgcctcactgctcccctctggacagctggccatcattgagtatctagaggagatgcgtcccactccgcgacttctgcctcaggacccaaagaagagggccagcgtgcgtatgatttctgacctcatcgctggtggcatccagcccctgcaggtgtggcacttgtacacttgcacccttgcacacctgacacactcttacactcacacattggctgtgagctgcccagtgtgggggcgggggtgtcaagggagggagggggattctcagggcctctgacctggaccatgtgaaagaagggggtgaagatcgcaatctcagaattcagccccccagcgggtcccccgctgcgttccgagaagctctagtttccaaggacgcatgtacaggtgcttggggtggggaaagggccagaatggcaggggagagactgagcaggccccagtccaggcctcctgcctttaaccagagcagcttccgtttcatctgtgctatctcagtcatatactgggatacttgtaggattttattttttaagtgtcactgttaaaacagacaactaagtattaaaaacagttcatctgtgccagcttctactctgaatgaggaaatagccccagaaaggtggagtgacttaggagtcccacaggtaggtcataacaaagtggggactaagtcagaatccctgcatgcctatgccctctacccgcatgtcgctttaacaaaggatgttggagcagacagacatctccattttataatgaggaaacagagggaaaatggctccaggggtgccaagatggagccaggctggaaatctctggaagccggtcttgtggacctccctcatcccagccccaccctctttcacactccctctcctcacaagggaccatgcaagggagaagtgagggagacaggcctcgagttgtgggcacacctgccacagccatggccgcgtcctgtgtcacatgaatagggattcttgcacatctctgacagaatcacgtggctttttgaggccactggggcagcctgcaaaggtggctgctgggatggctacctccctccaacctcagggcccttggttgaaggaaggggctcatggagcctgggggagaagggatagacatccagccaggggcagatgggaagtgaacttccctgagggggtttggcgaaggggtagcccccacccagctgtcagcgcaatcacagattttctttgggctgcacagaacctgtctgtcctgaagcaagtgggagaggagatgcagctgacctgggcccagaacgccatcacttgtggctttaacggtgagtcctcacctctgtgagctgccccacagtggcctcttaga

SEQ ID NO: 77042 - DNA, 1055 bp, Homo sapiens
aacagctctctcgagacctggctgccacattctcaccagcagccatgcccagtctgtcactcagttgggcgcccatttcataactatggaggccaaggcccagaaagctttgtgtcccctccctgcgcccagaataagatgtttatgtggcctccccacagccctggagcagatcctacagagcacagcgggcatatactgtgtaggagacgaggtaagctgtccccagacctccccaggcccagccacagtggctgcctccctcatgctgacctccctcaagctcagagcttcctgagaaggcgtctgcagggggatctctgtgccatggggcactcctcagctcactcccactaaaccgtcttaagagggagttactcaaggtagaagactggctgtgagaggatgaggcgggccagcatcagttgagggattgtgctagatgatgtctgcgcagtcaaggcaatccatcttctctggccctctcaacccacagagttggttgtcagggcaactggagcatggcctgggagggcacttcagctccgggggacagactcatgcaggcctagggcagacaagaattggaggtgggatgggtgaaagagccgaagcagattgttggtacccccagtagagtcgcagtggacacacccagtccagccactgactctggggtatgcaccctgatgggaacccaccgggacctctttcaggtgaccatggctgatctgtgcttggtgcctcaggtggcaaatgctgaaaggtaagagagagccccgccaccctcccttctcgtggctctgcccacagtcaggccccactcagctggcgagatagcatctcatgcagacgcttcgccaaccagccaaggagcccaccatgccaggccacatagccacttctgcctggaagagggcagaagaaattggggcagtgctcctactacgcccaccacagcccagatgaacctgtatagatagccccagctcctaagaggaggtggctcacctggtggacccccaagagcacctgcctgatgtcctcaaatgtgg

SEQ ID NO: 77043 - DNA, 2114 bp, Homo sapiens
attggggggtaaatttcctttggggcctgctgtcatgtgatgctataccagagtcaggttgggatttggtattttattgccacaaagggtctgtttggttagtcttaagatctctgttttaatgttaatgctggtcagttgtatttaaattccaaagggaagagggtaatatgaggcaccctgtaatctgaccataatatgaggcaccctgtcttcccatcatggactagtttttcaggttcctttgagatcccctgggccaagacaggggtccattcagccggttgggggatttagaatttatttttggtttgctgtatatatatgtatacacacactccccgcataaatgtaaaaattttaaactaccaattcctaggcaaagatgattctaacattctgttccttttgacaagtgtccaattagagaatgctgagaatgtcccctgcatatcggctctgttggagagcccctgatttttagcagacctgtttcattcaacatgggttacccaggaggtggtcttcataaaaatgtttcttggaggccaggcgccgtggcccacgcctgtaatcccagcactttgggaggccaaggtgggcagaccaccttaggccaggagttcgagaccagcctggccaacatagtgaaactccgtcgctactaaaaatacaaaaaattagctgggcgtggtggcgggcatctgtaatcccagctactctggaggcagaagcagggagaatttcttgagcccaggaggcagaggttgcagcgagccgagatcatgccactgcactccagactgggcaacagagcaagattccgtctcaaaaaaaaaaaaattgtttcttggtctccatctttcaagaaaatacatctgtgctgtattttccccttccctcaggccatgatctctgctgttttccttactaactggcatgtcagtacaagagtgattgtgaagctgctccggaagggctttatgctaacctctgttgcttgatgacatgtcctcaggactctgatattaaaactcaatccttagataacaggtagctttatcatggaagtaggtagcaatttggaattagaccattcttagttatttttttcttaatgaattgatacatgcactttaaaaaatatttttgttattttgggaagaaaaactcagacttttaaaaaagtgtatattgtcccattataatatgtatatggaagagtgaaatctgaacgctgtcttatattaagcagtagaattaggtattatcataaaaagtcttaatctgtagggaatatgagtttatgtttatgagtcctgctcagtccctctttgagagaattagttgaaacccagactctaaagtctgcttttatatttgtttgttaagaccacttatctgcagaaggttgccttttaaccccagtggttctaaggtgtggaattgagtgaccctaatatttacataagagacttgttttagtggagcataagggaggggcataagttacaccgttttgtgctgcttgagaactgtcttttaaaattgatcacaacgagggaaaacaaaataaaattagggggcaaagggtaggagtatggggggaggggagagcaaacctatcgaatatatcttagaattttgctcagaaatcactgctgcctctcaagtgttgcattgtccctgcctaaaccaagaaggctaaacaaagcccctcctgtttgaattcttaaggtaagaaatttctaagctaagaaaacactattgcctaaaaccaatgatagtggagctcatttacaaataggcatgcctcacacacacagtccaaaggcaagacactggctttgaaattaggctcatgatgtgattcctattatatgtacctgatttttttaggccccaggtatgtggaccagagttaatgtcatgactcttcaaagatatgatgaaaagttgccctagaaatctagagatgcatgtttatttaattccatagtttaaaaaaaaatttaagcaggtagttgtggcttatctgggggcaaaataatatatgtgaaattgcttccagaggacaaagtatattttctaaagtcctgaaataggatcatgaa

SEQ ID NO: 77044 - DNA, 2743 bp, Homo sapiens
aataatctccccgctctgtgaaagccactgggtcacctggtccttccgctcaccttcaggcaggacttacgcagtctctgaacactttgccattttgctcacgcagaacccgttccagctggagatgtggagagaggctccaggagctccttgcggggtcgctatggggaggtcatgcctgtgtaccggcgggacagccaccgagacgtgcaggctggcagccatgactaccctggtgagggcatctacctgctcaagttcgacaactcctactccctgctgcgcaacaagactctctacttccacatctactacaccagctgaaggactgctgggacaggggcaggctgtatttgctggctgaagcaggctgccagctggtgcctcttgtttgggataggcaagagccaaaggttcatggggggctgctgagcctcacaccctgtctggcatgcctgactgttggcccacgtagctttttccccttcttggcttctgcaggtggtggtgtagtgcccctgttctgtagtccctgactcatacccttcttgcttcagactccagcaaattccctcttgaaggcacctatggggcacaagcctaaaaggaagcagggcgatgttttttaaaaatagattcatcttggcacaggtttatcattcagattgctgccctctcctctcccacagcccttattgccagtgcatttagtggcacccactctcttcagttgttgaggtgccagaagagggaaaagcacattgcccatgaaggagccccatcttttggttggagaaagctctatccagcctgtcaccactgccatattcctgcctgctggttattcttggtctctgcatagctgggagaccacactgcctttggagggctattactattcctgatggtagacaccccctcctttctctttcctaagtctatgtttttgccattacagcaagaacattcatgcaatctcaagtgatgatcaatgtaacctaagatcttgtgggaagaaaaactgcccccattatttcctattccaagagctggtttcccttactatgggcactggcagtcaaagtggagagagtggaaattaggtactgaattgatgtcagaacccacatatttgaaagtcgtgttacttttttttttttttttggtataatcaaagaaggaatggtatcatctgacagagaagatgaaaaacaaaaaacactccagagtccccaccgcttttttttgtctttagagtaggagtgctgtttagaaatgttgctttggaatcaaatgcagtgaaacccaatcaggtttccaaagtttctgcatttagctttcttgcattgagggcttaaagcttttggtgttcaaagtcccttagtttaggtgataatgaagcttcactattgctgctgattgtatttgttctttacctgaccaaagcttgcatttccctggtgacagcatttcctactgtgtcacccctgaggctcaggagtgccacagagtgcaggtagtgctgcagccagtggtcaccagagcaccagctgctgggcccccaggcggaggaggagacggaggtgagatgggacctcagcagtctctgtgtttgtacctccctgtctcttactcctcgtgttatgtctgttactgcctacgaattctgaagaataattagatttatttattactgtatttatttttttagcacatttcattttgcctttgaaacagtttccatctgtttctcagaaggcttcccatctgttctgagccactgaagccccctcttttatggagttaaagatgatatttttaggagaatttgggaagcgatgatgttttatttctgtaggtcagtcctgtgacggctttgcgaggagtatggcccttcagagatggatgatgccaccttactccatgtttggggtacagtccagcactccccatgaaaaattctaagttgtgagggaatctgcccatttgctggagattgagtgcagaggaattccctaaccaatcagagatatcccgtgattccaggatttcagagtcctttgtctcctctgaggtgtcaccttctttgtgatgtttcctttgactcattgttagattcctcacaccaagggtctatccctacagtagcataactcaaggaacgggactcttcccagtgggtccctagtagcatctacatcacatcaaagggcaatatatcctgcacctgctcttcccctcggagcaaagccccaagtgggataggatgttggggactgccagagcattcccattctctgagcagcatcatacctccattattttatatttgcaaatgtgttttgtagaggattacactggccaacatttatatacctttaaagaaattattttagtgactgtctgttgaggcagtgaagagctgatttgctgtgtgtcatcccattggatagctgagtgaccgctcttgcatcattgaagttgaatcatgccttagctaactgaatataatctttgtaaaataattttctactgagctgttttctagtcagctaaagccttgcttatttttcctgtttattattaacttctgcctttctctcaaattgaaacagtcaggccatacacagcaagctcccaaggataacacttgttattatttattttcaccatgagattctctgcttattttctttggaatcctagttctgttgcatcagggaagcctaagggacttgttccc

SEQ ID NO: 77045 - DNA, 1048 bp, Homo sapiens
ctttaaccagagttctgttgtgcagatggctaagtatcaagttccacagaggtctggggacatcgttatgatccagtctgaacatacaggagctatagatgttctttcagctgatttggaatctgcagatcttctgggggaccacaggaaaggtgagacctttgggagtaaaggaggtggtttgtttccagtagatactcaaagaaaggcaggcagacagacaaatggaaggaaagaaaatgacttgtgaaaggaagtcaagccagtagaaagaatgtctgactgtgccagcctctcttagcaaaatgcccggggtactcatgtttcctcatggtttctcagtgctaagctgcttgtcctttcagtctccccacctctgatggctcctccatgcatctggacctttgccaaggtgaaggaattcaaaagcaagctgggcaaagagaagaacagccgtctggtggtgaagcgtggtgaggtggtgaccatccgggtacctactcatccagaggggaagcgtgtctgctgggagtttgcgaccgatgactatgacattggctttggagtttattttgactggacccctgtaactagcactgacataactgtgcaggtcagtgattccagtgacgatgaggatgaagaagaggaagaggaggaagagattgaaggtaaatttaattttaacctaatttgcagttttctggcttaatctgatttctggtgaccattttgtgggttgtaccagtcctcctcttcctttgaatgcagttgagaaactcagcattacaagctaagctgagtggtacaggccaaagagaacattctggtggggttgatactgctgccttaattgaaagaaagcctctttttccttatcggtacctcattgttttcccaacaccttcctgggggcagggatggggcaggagcagagagagggtgagtcatgcggcagtttagagggatggtcattcaggtcgcatgtaagccagagattattttacatctctctcttagtttgtagatatttattcttggcctggaa

SEQ ID NO: 77046 - DNA, 1048 bp, Homo sapiens
tggctctcagctcatctctctgcattggtgcagtggcctccagccacactgagctgccacggtggtatttttttgtgttcttggttttgttcattcagcctcctttgcctgcagtgcccttttccacttgacttggccaagtcctggtcatttttgaattcagtgcaattgtcatctctttcaggaaacctttgatacttttattccctaaattagttaactatatgtgtatctgtgacatctagtgcataattctatcctaaaggataccacacttatattacaactgtctgtttatgagtttatcttcctcactaggctgagttccttgagggcacaaatcatgtctaatttaactgtatattccctacatggaatatactgcctgacatatagcaggggtccagtaaagttctgttgaatttaggcaaagtcattaactcaaatttccctttttcatgtggttgctgtatatacagtatattttgattttggcaaaatatttggctgagtgatatctgaaggagattcagtgggctgctttaaatggataaatatcattgttgagtggaagaggtaggttaagtagtatgtgtggtcagaattcccttattaaacaacaaaaaaggcaactgatttttatgcataaaagagcttgtttcagccatatgagctcttaaaggatgacaaattaaaacagtagtgtttcatcgtgttctatctatagaatggcagcagttataaggaatgattatatctagtgttagtgagaatgtggggaaatggttacactcggatatccactcctagtagaagtgaattttggagagaaattgggcaatgtgtataaaagtgttaatgtgtagaccttgacaaggtttttcagttctggggacttgtcctatagaaatgaagtaaaaaaaggcttaaataacaaaatgcaagctgggggtggtgagggtgcctgtattctcagctacttgggaggctgaggcaggaggatcacttgagcccaagagtttgaggctgcagtgagctctgattatgc

SEQ ID NO: 77047 - DNA, 1027 bp, Homo sapiens
catcttgggcatcatgatttctccgagcttcaatttcttaaactatagaaagggagtaatgatagcatcaacttcagtggttctataattcagtgcaattcagtgactattcaatatggtgatgcctacaaaaaacttagaaaataattgacatatagtaagtgaccactgagtcttggttataataacaaagatgatcagaataaaggtagaatagctaggtactttaattaagttcagatttctggacccagtgaaattctatccaggaatttttgtcagagttctttttacaagccatataagttaattctggctgtcttaagcagaaagaggatttattagaaggaaaaaggaggctcactaaattgttagaaggctggaggactccagaggctaagcagcaagaacaacttggctgtttggctgccactagatgaattctgtctctcatttgtcccactcctgtttcaccttttccaggtgggaatattttagattatgtgcttgttccctgacttcctggtactgcgaagagaaggatcttccattttgacttccactgagtactattgtcagtgacagttctccccaaggaggaaaaggttgagtatttttgaaagccagaagattgacagatgacttctacgtctggggtcctgaaataacttgcaaatatacttgtgcaccatctttgagggatgtcggggactagaaatggacatacctagttatcctgaagggaaagagtataatccagaatttggagaccattaaacttgatccagattttcagtagaatatgtcatttgaatgtaaagaaaataagtgttgctaggagccagcatgggcgaactaaaaacacatttgactatctaattattttctaattatagcctttctagtctttcattactagttaggtcctttctctctctcatggacttctgcagaggcctcctatctgatctcgtaaaatccatcctacctatggctgccatagaattgtaccaaaaaaatacaggtt

SEQ ID NO: 77048 - DNA, 1020 bp, Homo sapiens
atggcattgtttgtaatggtaatacattatggaatattcacccaatgaaatactaatcagctgtagaaaagaatgaagaagcttttcatgtgcagttatggaaaggtctttgagatataagtggaaagaacaaagtacacagtagtatgtccagcatgctccccccgacctttttttttttctgagacagagtctcgcactgttgcccaggctggagtgcaatggcgtgatcttagctcactgcaacctccgcctcccgggttcaagcgattctcctgcatcagcctctcaagtagctgggattacaggcacgcaccaccacgcctaagcatgcccattttttgtgtaaaaaagtgaaaaagtatacacacacacacacacacacacacttttttttatatgcataaaacatctttggaagactacacaaaaccaaataacattgattgcttttggaggtagggactgacatgggaggaaatttttcactgtatacttatatgctttttgaattttgaataatgtggataaattattcagaaatagttaataaaaatagtctttaaaatatataaatatatgtgtacatagatagacacacacacaaacttggcatgagacttcactatgtctatatcctaaataagagcctttctataggtctgtattctgtttctgctcatcaggaactgacattttctagacctttttctctcagtgaatttttttataaaaggttataagtctccttagagattaattttgttattctttaaatccactactgtctttcattatttttgtgctagtttcatttctgtctaaaaatttaacctttttgaagtcttcattacgatccaaaggacaggataagccaaagggggatagacatagtagataaactgatattattaatcaatgacagagagagggcagaattttttttttttttttttttttgaaacggagtctcgctctgtcgccttgactggagtgcagtggtgtgatctcggctcactg

SEQ ID NO: 77049 - DNA, 1046 bp, Homo sapiens
cctatccccatctcagtcccctgccccagccttaccacgcgcctctcggcccccacccgggttggcagccttgccttcctctgccagaagcccactgcgccctagccttcctgcacataggccccctggccttgctgccatcctctccatcgcttagagtgggaaaaatgaaaagcagagttgaaataggtagtgtctggggtcttttgcttgaacacagtagccaaagcaagagcaggaattaaaaatttggcctacctccctcattctcaagaccctcatcctcttcttgtccaggacgacgtctccatttctactaacgcgagttcctccgtgtgtattatttcagtgtccaaagacaaaagagtccatccatcacactttcttctttcagcctcctgaacaccacacacgatgcaactgaaaggatgctcttttgaaatacgaaagggtagaggggagagaacttgtcttatttaagtagcaaatataaattaattttctaggtctgaaattaaaatagacaccataaagtataatggttgaggcactactgtggagccagggtgcctggattggagtctgaaacgtcagtttcctcatctgtaaaatgtgattactaaaaatatctgcctcataggattattgtgaggattacttgagctgctttgtctaaggcatttggggtatagtccatggtacacactatactcgtctcaaccattgtgacagtaaggtctctttttgttcagttgaacttcctgtgccgccagaggtgttcttggatgtatggcttccaacatggtgcctttttctgtcttctactctgatcccaagtatcttccctctcataatgctgccttattcaaacacacacacaactcacccagctctttcccatgattttatattcttttactttaaaacacctgacaaattttgcctttttttcttacgaactctgctttgtattaaattaaaaatcgttggcatatatttaacatagcagtagaaattctaagcataatgtctaaaagactaagcaa

SEQ ID NO: 77050 - DNA, 1047 bp, Homo sapiens
tccttcaggactgtgttagcccatggttgttttcagaattaaaatatgagtccaggaagagaatgagcagttaaatctgtaaaactagaggggaactggagccattcaggtaacgagaaatattttataatttctttttttatttttatttatttatttattttgagatggagtctcactctgttgcccaggctggagtgcaatggcgcaatcttggctcactgcaacctccacctcccgggttcaagtgattatcctgcctcagccttccgaatagctgggattacaggcgcacaccaccacacctggctaatttttgtatttttagtagagacagagtttcatcacattggccaggctggtttcaaactcctgacctcaagtgatccacctgcctcggcctcccaaagtgctgggattacaggcatgatccactgcacccggcctataatttcttttgagaagtgcagtcatgggtagactctagcctaaattttgtattataaagacctggaaagtaccacataaaaaagcctgtaagcaaaccacagaacctatttcatagtggtaagccatgtttagatatttacatatttagatacacacatatctaaaaaaatttttttcttttaaatttttcctgatgccaaaaggaagagagaacttccccacttttttttttgcaaaacatttcctttaggccaggcgcagtggctcacacctgtaatctccccactttgggaggccgaggcaggcagatctcttgaggccaagagtttgagaccagcctggccaacatggtgaaaccccgtctctactaaaaatacaaaaaaaattagctgggagtggtagcttatgcctgtaatcccagctattcaggaggctgaggcaggagaatcacttgaacccgggaggtggaggttgcagtgagctgagatcacaccattgcactccagcctgggcaacagagtgagactccatctcaaaaaaataaacaaaaaaccaccatttcctttaaagaacttgtcactgcaaatccttttacta

SEQ ID NO: 77051 - DNA, 1038 bp, Homo sapiens
ctttaacattgattgctttggctatgtgggatctttggcggttcaatatgaattagtttacgttttaaatatctgtttttccattatgggtttaaaaattttctgtttttcctatttgttaattatttaattagttatattaacaaagcaatatgtgtctgttgtcaaaatcaaacactgtattaaagtatagaaagagtgaagttcctttttcattttctacctactcctatctcaccccctttctcaaggcaaacactgttaaaagtttaatgggtagctttccagaccttccctcatgaatttgcaaataaacatctgtacttacaaagatatggaagatggaattattttctacattgataagttcatactacaaatattaagtaagttacttatcccatttagtagtatttcaagacttttccctgcattcgtttctatagatctaagaagttatttcaaacctgattcatttccactctctcaaatcccttgatttttctgaaaaattcatttctcattatttctgtatccctcagcacccccactcacccaccacattattctggtctgatcgtaaaacatagactaacctagaatgtgttgagtgtgcctggcctacctgccgctaccccatcttcctctttcagaactggctgggctataccaagaagagagcacccattggcttccatcgggttgtcgaaattttgcacaagaacaatgcccctgtgcaggtaatgggtcctgaagagagttgggtacaggatattcttggagacctaactttaagcctcttactggtcagtgatgggagacccgatctgctcttgttttcccttaaaggcagcacaatggctgcaataggcctcaagacagaaaaggccagggagtgaaattctctccctttctcccctttagaaacaattccaaactgtcctctctgagtagcatctactgtgttagcccaagtggaatactgatgtactgttcaaatgatagaaaaggagaactcgtggagaaaagacatcaggg

SEQ ID NO: 77052 - DNA, 1045 bp, Homo sapiens
agttaatcagctatctccctcatctaaggagacaaaatacctcaaagcctttttctgctttttgtagctatctcattatcgagagcatttgaacattcaggaccctgacaaacgaaaagaatttcttaaaacctgtgttgggtaagtatgggggaaaaatgattttaagtataaatacctttacccagaaggaatgaagaaaattaaaaagggtggaatggataggcaggaaggggagggctaacaatgaatcataccagcatcattcagggtcacctcatgcagtggtgttcacacactagtccccagcagagtttccactgcttgatggtaaactgaggaaaaaaaaagacaaatgtagagagattttttttcctaaagctaaatttatttaatttgaaaggttatcttttattgtaggattttgtcctcactcttctcttcttctttggtactaaaatgagctgtacctttttttatgaccttaggtaataaaaagatagcaatactttagggacctgatgcattttttcagtgttactggtccttgaaaccccaaagtccaagaaccactgatccagggcaagctttcatccagaatttaacttattgcaaaacccagctccacatattcctgtgacaggatgcccgttgctcttgaaacagctcagtttgtttttgaacaaccttcgttattggaaagtgcttccttacgttaagctgaaatttgcttccctgtatctttcaagacaggtgtagagtctacccagtagtccttgcttcttcaggttcagtactcatggttgtttcaaccattcctcatgtgacatgatttcccggcttcatgtttagaaatttgattatatcagtgaaatccatttaatgttaccaaatactgagatatgttatatggcctctggaaaacaaggagaaaagttaaaatagtgaagtaactagaatttatagcatctctctttatctcttctaaaaattcactatggctaaaacttatctggaatagtgtaattaaaactcagaattcttc

SEQ ID NO: 77053 - DNA, 1055 bp, Homo sapiens
tatatttctatcattgactttatattctgaccatagatgcataaatgaaagagcaattcttagagtggaattactcacataggatgtttgcatctgtattgggtagatattgccaaattgacctccacaggggttgtaccaattcatactaccaccagcaatggaggagggttccagtttccctatagcctggctaacacggtattatcaagcttttggatctttccccatcttataggggactaatggtttctcattatatttttaatttgtagtactcttagcaaagctgggggcaggtggtgtgtgcctctggagggtagtggcgatggatggcttgaggccaggagttgaggctgacgtgagacatgactgttagatatgattgtgaatagccactgtactccagagctccggcaatgtagtgagaccctgtctctaaaaaaaaagaaaaaaagagaaaaaagagtaaggttgagcatcttttcatatgttgaagagccatttgaattttctgtgatccacctattcatgtccttggtccatttttctgctgattagtctatttgattctatcttttctccctgccccaagttggccaagggaccagggcttctggtgaaaagcttttagagtttattgaatgttggatgtcaaggctttattgtggatgagaattgctgatgtagttcttactatctcacaggtatctcatggtccatcagagagactgctggtaatagcggctcaacccacgaggggcgtgaacagctaaagagccgaaacagcttctcctcctatgcacaactacccaagcctacttctacctactccctgagcagcttttttagaggtaaagagagatgcttaaatggatagggaagtccttctctttttccagaaaaatcttaggccataattttcatttactttgtaagaaaaagattattgaagggtaaagcattctcattggaggtggcagctgggtgttaggagcgagataaatgagagaaattcagaggagttggactggttttctatagcatgatgaatg

SEQ ID NO: 77054 - DNA, 1411 bp, Homo sapiens
gagaaaacacgaataacgagaccgcagggcatgctggaagtcgtagtttcttctgcctctgctgtcaggcgctgtcccgacgaaccacaaggcttcttgactacagcccccagaaaccccaagcaccgtgctaggtcatttcctctcctttccgcgagaccttccgcggttatccagcgagtcacgtagcaagactacaattcccatgaggctcagcaagggcgatttagggtccagggaagcaatgagacgtgttctttgttttcctatgggtgaggaatggttgtatgagcagttgggtttcgggacgctttttggggagaacccgatggagtctgaaggatctctaaatcaggcggaacccacggtgcggcgagttgggacggaagtaaccggtgggagtggggaggagccggaagttaaggaggggagggggtggagggaaaagcaagccaggaggtgcttgcggccgcttctagtagtttccaggcgctgccgggcggctggcactaagcggtcctgaggctgtggctacggctgctccggagctggtggcgccgcgataggagagccgatggccaagtggggtgagggagacccacgctggatcgtggaggagcgggcggacgccaccaacgtcaacaactggcactggtgagggccagaaaagcaggccggccttgggagacctgcggccgggccagggtttcagggttcctagaacctcggcccggacagagctggggctgaggtagccctgtccggagatgggggtgggtccttcctgtggcaggggtccgtagccccaggcctctccactccgcggtcaccttctcagtgtttgaggggagggagatggacgtggagggctgcgccccagaggagggttgtcagagagactaggagataacgccctggctgctgcatccagcccgagcagggaggtgcttattacacgtggccagaggagtcactgagactggaacctcctttgattgtgttgggagatagctgtgaaaggcctaaggccaggggtctgtaattcctattttgcggcctgcggtaaaattaaaagtcattcataggggaccgctgcagcggtcccgcgggagattgagaacgtgttgtgcaggtgctcagagctcagatagctgcggcctctcacccggaactatcaggtcgggtgtgttggaactccaggttgccgagcagccgtggttttataacctgaccgttcttaaaataactgccctccttcatgaaatcttcccaaagtaatattagtttccttatttttgaattccactgaacttttttcgtaatgtttgtattgtaccgttactttgttgcagccttttttgctgttgttttctctaatagttgataagtaggaaggcagatagtgatgttt

SEQ ID NO: 77055 - DNA, 1364 bp, Homo sapiens
acgtttttgtggccatctaggggacagtgaatgtgtaggaagtttataatgcaagtgcgaatctgataggtcagaacaccgtgccaatgaggtcagggttattggtttaatcctttctgggccttttagctaagtactattctttcatggtccagtctgtgttcctgatctcagcaatatgtgcagttttccacttggtcaaatgggggcgccatgttaaagtatcaagtattcccccgcaccatcatgccgagaaaggagagcataattttccattgagtttataccattttctacagcagctgtctttgttgacagtgtgcaaccccttgtcttcctaaaaaagaatgacatgtttgtggacatactggagtgcgactgggagtttttgtgttcttttcaaactatttgtcaggcctcctttaacctcgtattctcttgcatagagcagcgtatcctccgtttgactgctggttcatagctctgtttctgctttgcaggacggagagagatgcttcaaattggtccacggataagctgaaaacactgttcctggcagtgcaggttcaaaatgaagaaggcaagtgtgaggtgacggaagtgagtaagcttgatggagaggcatccattaacaatcgcaaagggaaacttatcttcttttatgaatggagcgtcaaactaaactggacaggtaagtctaagctgggctgtcagagagattaactgtgttttgtttaacctgttaagtagctggagagaacagttttgaggagttacagaccttgaagggagaaggcagatgttgctgctttggagtcctatgtaaagcagtatcgagtcctggaatttctttgccattgtgggatgctaaatggatttcctgtgtctgggtctcataagtcccatccatgaagtggccgggccactgcatctttgggccttggtctttgttgggacacctacgatgatatttcttcagactagctacatgtatcttgtgagtgatttaaaaggaggaaggagaggatttttttggtcttgatctttgtgcactgtcttcagtgtgaatcttaacagattaaaccactgcgctaatgaagcttgtgtgtgacagtaatttggggctgttttatctatcttctagttttatgtcccttgtgtatgacattaggaaaaaattgaggtcatgcgtatgaccgttttggacagtcctgactgtcgggagcctgaatgtaaaaaggcactaaagctaagggagtatgagatagctactgtctgtgtatggggcaaagcatgaaatttgtgctttgataaacatttccgaagtgaacagtcatatcataaagaagggtgcaagtagatct

SEQ ID NO: 77056 - DNA, 2666 bp, Homo sapiens
gtatttttattagagatgggtttcaccatgttggccaggctggtctcgaactgtgtctggccgacgctttttttttttaatatagggactaaaaattggtagcatagttttgtgcacattaaatggtaagaaatagataaatataggccgggcgtggtggctaacgcctgtaatcccagcactttgggaggccaaggtgggcggatcacgaggtcaggagatcaagaccatcctggctgacacagtgaaaccccgtctctactaaaaatacaaaaaattagcccggcgtggtggcatgtgcctgtagtcccagctactcgggaggctgaggcaggagaatcgcttgaacccaggaggcggaggttgcagtgagctgggatcgcaccgttgcactccagcctgggcaacagagtgagactccatctcaaaaaaaataaaaaataggtgaatactacaataaatatggtgctttaccatgaaaaagacctgaagtttatttgtgaaagtgggcatcaaagccaggcgcggcggctcacgcctgtaatctcagcactttgggagactgaggcaggtggatcacgaggtcaggaattggagacacacctggccaacatggtgaaaccccatctctactaaaaaatacaaaaattagccgtgtgtagtggcacgcacctgtaatcccagctacttgggaggctgaagcagaagaattgcttgaacctgggaggtggaggttgcaatgagccaagatcatgccactgcaatccagcctgagcgacagagcaagactctgtcttgcggggggaaaaggtgggcatcagaagggttgcagcttgaggactactatggaatggtagaaggagagtcatccacaatcagagggaacattacactcgttgaggatgggtatggctcacaacacacgctgtaaactgaggtcattggcagataggtgtttgagatgtgtgtgttttatgtatcctgtgtagctgggtgaggctttccgtattcacctagtgtttctcatggatggagtcacatataagcaaacatgaacttctcattataatcaaattgttccctaatatttcagttgcactgaaataaattgatattttcaaaacaagtattctagcagaactactggcttttgacccaagttctcatggtataactcatgctagtaccaaatctgtagctctttgtctcacattgtaataacatagttggtttccagtaacctggtgaggaaagacatttcttttgggggtgcgggtgttgattgcatctggcatgtggcattctcagaataaagaggatcagttcagccatccaaaagcagcagaagtgaggtagcagttaggaccctggagcagagacctttcctgccaaggagtggactaatgacattgcattggttttgacaggtacttctaagtcaggagtacaatacaaaggacatgtggagatccccaatttgtctgatgaaaacagcgtggatgaagtggaggtttgtgcttcataactcctaatccgagtcctctatatcctcttattctcagatgagaaaagtgacctgtcattcaggattcatagcccaggcttggtccaagcattcagaaccctagcctgcagataattttctaggcatatggtgccattggaaacttctagagcaatttgcacttctttaatttcttcactttagctagtgacatgggttctaactaacattagccacttgacagagaggactcaagaaggaacactaatggggattgtacgaataccgcagtactcatgcatttcctttggaaatgtcagcagtcacctgattgctcagcccccacattccataatgagggtgcccctcaagttatttaccacctacttctcatctttcacccagattagtgtgagccttgccaaagatgagcctgacacaaatctcgtggccttaatgaaggaagaaggggtgaaacttctaagagaagcaatgggaatttacatcagcaccctcaaaacaggtatcccttgagtagttctgtatgccttaaggaggtagtttccacctgttagactctggttaagggcctggacagtcctttctttggcaaatgggtaaagatttggggggagggggcttatttcatcttaaagtcagtccataagctcggagtaagggaaagatctggagctgtgttgcctaataatgatggttgagcattttagatgtggctagaccaaactgaaatgtactgtgatggcctggcgcggtggctcacacttgtaatcccagcactgttggatgctgaggtgggctgattgcctgagctcaggaatttgagaccagcctgggcaacatggcgaaaccctgtctctacaaaaaatacaaaaattagctggatgcggtggcccatgcctgtaatcccagctactcgggaggctgaggtgggagagtggcttgagcccaggaggcagggaggttgcattgagctgagatcatgccactgcactccagcctggatgaccaaaaaacacaagagatgtgctgtgagtataaattacactacgggctgggcacagtggctcacacctataatcccagccctttgggaagccgaggtgggcggatcacctgaggtcgggagttcgagaccagcctg

SEQ ID NO: 77057 - DNA, 1070 bp, Homo sapiens
tggcataggccaaaagtaaagatgtaaaaatagcctcttccttttctggtcataacctcattctgtggtaggatggctgtgtttgtcaagctgtaatgaaactccagatctcagctactaagaagtaacttccatgagctggaattttatcttttcagagttcacccagggcatgatcttacctacaatgaatggagagtcagtagacccagtggggcagccagcactgaaaactgaggagcgcaaggtaaatggttttcctggggtgggagactgtctgcaaaggaacttgagagaccgccttcttaattccacatatcagctctctgtgtccctaacctctaagccagaccagcctgcgatctgctcatggtgctttttcagagcgcctgcaatatgcattcattcacccatctttaacctggttttaattcatttatcgcagacctttagagcaagtaggagctatcagacagttaaaagtctgactcttgattgcatttagcaccagttaggaggttatgaacaaaggatggacttcacctatataagtcttcagtctaattggtgtgttgatatttcatactttgatattagaggtcccatcaagaaatggagttacatccctgtcttcacccaatctccccaattttcagggtgagcaagtactttatctagagatggaagtttgtggttcaagctcagcacttggtttagagccctgttgctcttttgtcagcatagtgaagtggatactctggaagtggggagaaaaccgcttccagctatttaaacatagaaattgtttgagaattacactgagctcttcaaaaatatctcaatgatttgatttgttatttgactatcagggtcttccttgtagagtggttatttttactgggaattgaggaggtttccagaatcattaccctcatgactgaaacacctacacactcaaattcccttcaaaccccttggaataattacccttggaggtgaacatttttatgagaatgaatggtacaactgtctctgaagccacgttgattgaggttgtatcattactctgt

SEQ ID NO: 77058 - DNA, 2220 bp, Homo sapiens
aactgcagagcccatactcagcaaattgttgtctttatttaacaatatgtggtaccattaagtttgctgggcactgaccatgagccaagtgttggggatatagtgggttcagactgccacattgcaggaagaggtaacagtacctgaacagggagagtcactcctggacaagcctcgccctgacttcctgcaccccagcgggagtcagtgctctctaagccagacgctacctcctgcagctacagctatttccttcgtctgtttattgcctgttttattgggtggcagcaagactttgcaggctaaaactggttaaagcagagttcaagatctggttcatttacacttcccaaagccatctttggcttgaattacaagagtgctgggctgaactaatccacatctagtttgacattacatctgcctcctaggggtgcaaaatgacgccttttgatgaagaacctggagtctagcttgaatcaaatcaacaggcccttcctaacagactcctaacagagacgattaaaaatgagactttgggccgggcgcggtggctcacgcctgtaatcccagcactttgggaggccgaggtgggcggatcacgagggcaggagatcgagaccatcctggctaacacggtgaaaccccgtctctactaaaaatacaaaaaatcagctgggcgtggtagtgggcacctgtagtcccagctactcgggaggctgaggcaggagaatggcgtgaacctgggaggcggagcttgcagtgagccgagatcatgccactgcactccagcctggacgacagagcgagactccggctcaaaaacaatttaaaaaaaaattaattaaaaaaaaatgagactttggctgggagcggtggctcacgcttgtaatcccagcactttgggaggccgaggcaggcggatcacaaggtcaggagttcgagaccagcctggccaacatcgcaaaaccctgtctctactaaaaatacaaaaattagccgggtgtagtggcgggcacttgtaatcctagctactagggaggctgaggcaggagaatcgcttgaacctgggaggcagaggttgcaatgaaccgagaccaagccactgcactccagcctgggcgacggagactctgtctcaaaacaaacaaacaaacaaacaaacaaatgagccctttcggccaggcgcagtggctcacgcctgtaatcccagcattttgggaggccaaggcgggcagatacctgaggtcagggattcgagaccagcctggccaacacggtgaaaccccatctctactaaaaatacaaaaattagctgggcataatggcaggtgcctgtaatcccagctactcaggagactgagtgggagaattgcttgaacctgggacacagaggttacagtgagccaagatcacgccattgattgcattccagcctgggtgactgagcaagtctcaaaaaacaaaaaaaaagaaaagaaaaagaaaaagaaaaagaaaaaatgagccttttcacacacacctggctggaaagttaccagttccagaatacttagaatcaatcaagtagagatgaccaatatgttcattaaacccaaggcaccaggctaagtgcctgccatgtgacatgtgcagttgccattacgtgccagtattgatggctattcaattcttaccattgccattttactgataacattttggtaagccatctggacctaaaaagcaaatggcatagctagaaataaaactgtggacttcgactttgtgtttgaatagtaaaagttccacttcctaacaaattgggtgaatatccttatctgtagaatgtgcataataggtgtcttgtgagagcgttcgagatgatacatgtagaaacgctggcacctggtgtcatttagcaaatagtcgctgctgaatccattcaaaagcccaagtgtttgcccttaagccagaatgctattttgaaaagctggctaattttaatccaaattgcgtatcttgggctaagagctctccatgcctgagaggaagaacaatgcacaaaagtggactccactcctaaagattcttactcagtgggtgtggggtgtggcccataaacagagtttaataaataccccaggtgattctaatatcagggatgcactttgagaagcatctcaacatattaacaaaacaaaacctcattgtaaaggagccacagcagcacatttgggt

SEQ ID NO: 77059 - DNA, 1087 bp, Homo sapiens
gcatgtgttagaaccgccatacctggccccagcccagaccagttcagtccatacctggcatctgcgaattaggagtccccaggtgattctaatgcacctccaggccgtaagctgtgattcttgtgccctaagaggccaggaaggttagccaaaaatgtcagccaagagaagacagctggtttgaaggaaaggttgggcctctcacctctgaccctgaccccatcatccctcgtctctttggaatgcagctctaagacctccttcactggccggcctggcctgtctcctgcaggtgaccatcaaggtggtggaggacccccaggccgaggtgtcgatagacctgttggctgagcccagcaatcccccgccccaggatacccttagctggctgcccgccctctggtccttcctctggggagactacaaaggagaggaaaaagacagggccccaggggagaagggggaggaaaaggaggaagacgaggactatccttcagaggatatcgagggtgaggatcaagaggacaaagaggaagatgaggaagagcaggcgctctggttcaatggaactacagacaactgggaccagggctggctggcccccggggattgggtcttcaaggattctgtcagctacggtgagcacccccatcttggcatccccaggctgctcccctgtaggtactgagtggaaatgggggtgagggagagggtggaggcttcccaggcaagaccattgaggaagccaggagcttaggccttgttcaaacaccatcatcaactcaaaagtaacattgacaatagcttgcagagtttttccttttttttttttttaattttttaatttgagattgggtctcgctctgttacccaggctggagtgcagtggcatgatcatggttcactgcagcctcaaactcctgggctcaagcgatcctcccaccttagccctcccaccttagcctccgaatagctggaaccacaggtgcataccaccagggcaggctaatttttttatttttagtagtgatgaggtctccctatgttgcagaggctggtctcaaactcctgggctcaagcagtcctc

SEQ ID NO: 77060 - DNA, 1092 bp, Homo sapiens
gcccctcggaggagggtgggggacgtccaggtgcgcggaccctagagctgtgcgggcgcccacgcgaggagccggggccagagaggctgtgcgagctgcgcgcccccgccccgcgcggccccgtgccccgcgcgcccctcaggatcgccgggtcccgcccccggaggaggcgaggcggggcgcgactgggttcgcggccgcgtgcagaggtgcaggcagagcagcctcggaaccgagacgatgcgtgcgctccgcgaccgagccgggctcctcctctgcgtgctgctgctggcggcgctgctggaggcggcgctagggctccccgtgaagaagccgcggctccgcggaccacggcctgggagcctcacgaggctcgcagaggtgagtggcggcggcaccgggctgcggagcgcgctgtcggtcccacctccccagcccgccggctccagccgtgcggggagcgggaccgggacacacacaggcagcgaccccccgatggagagaggggccggggccggccggaagctcccggacaccgggcgttgcccaggtgcgccggacttcggggcttccactcctcgcgcgtgaccgcgagccgggctgccgcggaccagccgggtgacaagtttgacttctgtgcggagtgaggtggccgacactccacggtggccgggcttcctcgccctgagcggacctcgcctgcagccccctttccaggtgcgcgctagctcggagaggagtcccgccggtgcgaggaatctggcgctttgcggagtggcgggccagggccgctgaggttcaaacggtcaggtgagccccttccatgagacaagcggaggcacagtggggctctccagccgccggcaggggtggccagcctgagactggctctgtcctcgtggcctgtgggtgggcattggggtataaaacaggaatgagatggaagagtggtgttggccatggagagaagccatggtctgtcaaaccctgtgtcttccagtcactgaggggtctacagtccagcttattgccccctggaatgcagcggacgttcattcccatggggacaaagacagccagacttgtattagg

SEQ ID NO: 77061 - DNA, 1326 bp, Homo sapiens
aataaactgaccctaaagaatgcaatggcttttaaactgcagttactgtgttcttaatgaagcaatacccaaagctctgttcttttggagcacttgaggggagcttgaatgaaaggtgcagataagagcagtaccttgatcttatgctttctgagtgtcctgccttgttgccatctgcatggatgagtgaatgcttctatgcacgaggagactcaagccaactcagagtctgctttttccaacgctcttcccaggtttcttttgcaaagcttggtcatttggcccaggtcttcctggaaagtggagtacatgtcactgactagggtggcgtggtgtctttacccttaacattaagtcttgttacctcagtgatgtgaagccaatggttggaattataaaaagcatccttgctggttcttcacaggacactggaacccaccctgtcaattcagctagcatgtccacacagtcttgatgatccctctctgtaacaggcagctaacattaagagaagggggaaagagaagaagagagcaatagcttatgggagagctgagatcttacttcgttgacccatatttttcccctgaccaagttacctgtaaactggaatttgcaaggggatgctgtgatgataacccctttctattgctgtaatgttcatataacctgggaaactgagagaaggggatgtgtaaataaaagcttaaacattttagtaatgtgttaaaatgtcactctctcttaccctgtttcccttttttgccagatgatgatttttttatttttattttgtactttactggatgactgtgaagcgatgagtattgggttggggtaggtgtgttgattttgagagtgcatgttaagaactgaaggggaactacttgagatgacttaagaagcatcccatgcaaatatcttgttttgccctaataaaatattcagaaagatatatctgcctttattcattcaaccaatacatattgagtgctatctctctgatgggcagcacactgagctttgtggttcctacttgctagtaaacagataagcacatgaacatacatgtcattttacaaactgttaagtgctatggaggaaaagtaaagagcttggtaaaagtaaccaggccgggcgcggtggctcacgcctataatcctagcacttcaggtggatcacttgaggtcaggagtttgaaaccagcctggccaacatggcgaaatcccgtctctactaaaaatacaaaaattaaccaggcatggtggcacgtgcctataattccagctatttgggaggctgaggcacgagaatcgcttgaacctg

SEQ ID NO: 77062 - DNA, 1181 bp, Homo sapiens
agacaaatcactggaagcatgttcaactccttggtgtttgaagaggcatgacacaaacatagagcccttagtggttgtgtaggatgcttctgttcaccttgatgactacagaagcaagaatcctgttttaaaatccttgccctatcatgaatgtttacgatagtgactaaagcactacgatggctggattcttcaaacaaataagcagtactttgggggttatggagactagaagctttttttaaaggtaaggatttcttatccaaagcaaagcaaaaagttgaaaaagtgctataaagtccatgcccctgctaagttaaagcttaaaaaaaaaaagatgcgaggagaaaccgccactgctgcttggtccactcctcatatgggcttttgacatctcctagctatgcatttcctggcttctgatgtgatctgctgaaagaggtcttataaacctgaaataggtaacagcaatgctgaataaaaagaggaatgagaaaaagtgctaaggactagtcacacctctatcaatcgactcagatgatcagttttggtagtcatggttaaccggtatctgtttgaatcctatcagagtcttgaatcaggccgtgttaaactgtgtaagaaactactcttgtatgcctcaaatcgacttattctcaatgactgtatttatatatacttgtattcctccaagtacttggataaatgatgatacctaggatatgactggaccctagatttacattacagtttcaagaagagacaaccaaccatgtataatgtctacataacattttgttctttagaaagtacagaggtcctgcatagatcacaggagatttgtctcttcaaaataaacttgtaacaaaattacacttatcttgaaataactttgtaccaacaaagtgatatagatatattttaaatgccggtactgacatttgaatttgcagtgacttcatgcaagccaaaataaaaagactagcaggtaagttcattgcttataagtttgtgacttttacaaaccctacgtttacattagtaaatagtaactgcagtgcaaaagctatgtggtattccagtgggattctatggtaggaaactagatgtgcagaaaaggttgacaatgtatttgattttataggactcctatttagttaccacaacctccttcttacttt

SEQ ID NO: 77063 - DNA, 1670 bp, Homo sapiens
aaaaacagtgtatgaaagtcatgttacaggccgagtgcggtggctcacacctgtaatcctagcactttgggaggctgaggcaggtggctcacttgaggtcaggaattcaagaccagcctggccaacatggtgaaaccccgtctctactaaaaagacaaaaaattagctgggcgtggtggcgggcacctataatcccacctacttggtaggctgaggcaggagaatcgcttgaacccaggaggcggaggttgcagtgagacgagattgtgccactgcactctagcctgggtgacagagcaaaactgtgtctcaaaaaaaaaagtcatgttacacatttaagtttttgaaattgctccttttatcggtaaagattctcaatccaaattctcctgggtgtgttgtcatcagctgtgatatgtttgtgcacattacgtatagcagaggatgtaagcaatattattgtttgtgaagttttgtttttaatgtcttgagtatgagttatgtttagtcactgtcagcatctgagaactttaataagcccttgagatattccaaagttttattttacttttttaaagaacagaaaaagatgaatgaaagaaccaaggagagatgcagagactatatttagcatgtataggttaaagtaagaaggaggttgtggtaactaaataggagtcctataaaatcaaatacattgtcaaccttttctgcacatctagtttcctaccatagaatcccactggaataccacatagcttttgcactgcagttactatttactaatgtaaacgtagggtttgtaaaagtcacaaacttataagcaatgaacttacctgctagtctttttattttggcttgcatgaagtcactgcaaattcaaatgtcagtaccggcatttaaaatatatctatatcactttgttggtacaaagttatttcaagataagtgtaattttgttacaagtttattttgaagagacaaatctcctgtgatctatgcaggacctctgtactttctaaagaacaaaatgttatgtagacattatacatggttggttgtctcttcttgaaactgtaatgtaaatctagggtccagtcatatcctaggtatcatcatttatccaagtacttggaggaatacaagtatatataaatacagtcattgagaataagtcgatttgaggcatacaagagtagtttcttacacagtttaacacggcctgattcaagactctgataggattcaaacagataccggttaaccatgactaccaaaactgatcatctgagtcgattgatagaggtgtgactagtccttagcactttttctcattcctctttttattcagcattgctgttacctatttcaggtttataagacctctttcagcagatcacatcagaagccaggaaatgcatagctaggagatgtcaaaagcccatatgaggagtggaccaagcagcagtggcggtttctcctcgcatctttttttttttaagctttaacttagcaggggcatggactttatagcactttttcaactttttgctttgctttggataagaaatccttacctttaaaaaaagcttctagtctccataacccccaaagtactgcttatttgtttgaagaatccagccatcgtagtgctttagtcactatcgtaa

SEQ ID NO: 77064 - DNA, 1091 bp, Homo sapiens
acatcactctacggagcagctttgtacccaacactcagatgtgagagtggccttctcaccagggtgggatatgggtgctctgaaaacagtaagtgctttaaaaagggggtgggacgtgttacggttagagcttgggaagaaccagaatttgcgcacatcctcagactgtgaccattatgaagaagtatttgatggtaaaggaagaaatcatctggtgaccagaagaaaatggaataagaccaaacccttgggagattacacaatgagcctttcagcagtcatcgcttactgtttttcttaaaaggctaaacttaagattaaagggtgaaaacttccgttgattacttgaatggttaaataaggattccaaggttggccttgagacctctgagacctggatgggaagtaagtggaaggcacttgctccctagggaggagggccaggtaagtatccaggctgcggagccagggccagcagtagctcttgatgggcccaagtctgcaaggtgctgggagaggggaatggcctgtgtggttagccagagacaggctagggtcagcgtgatttcacaagtagaatggttgcaaaataaaatgtttttttaatggactgaaaaagcaaagtgagtcaccttcgtttttaaaggtgagatttagcaaaggaaggattagaagcagttttttactatttacaaaatgtcatttagagtggaggtggccaccttcagtagctgaggcaatgtctttcacgtgagatggccacagaagtgtggttcctggaactggctcacaaaggccacaggctgtcctgggtgagggagagttcctctgagggagcaccaaaaaggctcagtcttctgtttcttcatacgtcgtctcgtcaaagggcctgtccagtagaggtaccaaccgatgacgggaatacttcagctgcaataggtccccaacttcatctatctcctttaaagcctaaaatacacaagacaaagtagaggtctgtcagagccagtaggatgcaggcatgcctggtgttttactttgctaaaaacaatcatggcaagattatccttcggcaggacttatgtctagtg

SEQ ID NO: 77065 - DNA, 1154 bp, Homo sapiens
gaggttgcagtgagctcggagggcgccacagcactccagcctgagcaacagagcgatactccatctcaaaaacaaaagggagagatgacaaattgtattcggttttgtaagttcagagtgcatataactttttctaccaagcatatcatactttgaattatagcctttattctgcatacctggctattcacaacccattattcatggtgagcttgaaggccttgttcaaaaagcagctccttccacagctgtattgtagtctgatcttgtaaatgcactagacataagtcctgccgaaggataatcttgccatgattgtttttagcaaagtaaaacaccaggcatgcctgcatcctactggctctgacagacctctactttgtcttgtgtattttaggctttaaaggagatagatgaagttggggacctattgcagctgaagtattcccgtcatcggttggtacctctactggacaggccctttgacgagacgacgtatgaagaaacagaagactgagcctttttggtgctccctcagaggaactctccctcacccaggacagcctgtggcctttgtgagccagttccaggaaccacacttctgtggccatctcacgtgaaagacattgcctcagctactgaaggtggccacctccactctaaatgacattttgtaaatagtaaaaaactgcttctaatccttcctttgctaaatctcacctttaaaaacgaaggtgactcactttgctttttcagtccattaaaaaaacattttattttgcaaccattctacttgtgaaatcacgctgaccctagcctgtctctggctaaccacacaggccattcccctctcccagcaccttgcagacttgggcccatcaagagctactgctggccctggctccgcagcctggatacttacctggccctcctccctagggagcaagtgccttccacttacttcccatccaggtctcagaggtctcaaggccaaccttggaatccttatttaaccattcaagtaatcaacggaagttttcaccctttaatcttaagtttagccttttaagaaaaacagtaagcgatgactgctgaaaggctcattgtgtaatctcccaagggtttggtcttattccattttcttctggtcacca

SEQ ID NO: 77066 - DNA, 1050 bp, Homo sapiens
aagttagaagatgtaaattctagttgcagctatgccacttgctacttgtaatgtgccacacactattgtgcaactgtaggcatgtcactaccttggtgagagtctccccacctataatatgaagataatcataaatatcctgcctactgtcaagggatttgtggagtgctcagtgagggggtatggctgaaattctttgaggatgctaacgctccattaaacgttttttacattattataacttctgctgttaacaggtagaatgacagaatacaaaatgagacattttacatttatattccatatggtttactctgtaaaatattttatggtgaaatggaaaaaaacgaaacagaactgattagatagaatggagatagaggagatttactgtcttttttccattcctttttacttaggattattttgttttctctcaccgtgactttccaggtaaagagtgtgtacaacagttagctgaaaacaccaggtatttcaggagacgcctgaaagagatgggcttcatcatctatggaaatgaagactctccagtagtgcctttgatgctctacatgcctgccaaaattgggtacgttttgttgcagatcacagaccagtctgtccttatccttatctgtgatgtgagaccagggcttatgtattttgttagggaaaatggtcttgtccttactgtgttaaccttcatttggtacatatgccatagatcaaatagtggattccaaattgtaaagtatgttaatttgttcttctttcattaaacatttgagtttcatgtactctctaggggcctgggatagatcagtgaataaaatacaaacatctctgtccttgtggagcttacagtctagtagggggcaacagtcagacagacataataaacaaatgaactgtgtacgatgttagaaggtgtcaagtgctatggaaaaaaatagagcaggacctatatggggagttgagagtgccctgtgggcgggccgataacactattaaatagggtggtcagggtaaggaagcctccttgggaaggaa

SEQ ID NO: 77067 - DNA, 1073 bp, Homo sapiens
gttgtacacactctttacctggaaagtcacggtgagagaaaacaaaataatcctaagtaaaaaggaatggaaaaaagacagtaaatctcctctatctccattctatctaatcagttctgtttcgtttttttccatttcaccataaaatattttacagagtaaaccatatggaatataaatgtaaaatgtctcattttgtattctgtcattctacctgttaacagcagaagttataataatgtaaaaaacgtttaatggagcgttagcatcctcaaagaatttcagccataccccctcactgagcactccacaaatcccttgacagtaggcaggatatttatgattatcttcatattataggtggggagactctcaccaaggtagtgacatgcctacagttgcacaatagtgtgtggcacattacaagtagcaagtggcatagctgcaactagaatttacatcttctaactttaagattcattctaattaactgtgctgcaaataaattttacacataagaccagagatgaagcctttagacccccaaattttcatcttctgagtttcattttgttgtttccttacaattctttttttctttttctttcttttttttttgagacggtgtctcactctgtcgcccaggctggagtgcaacggcacgatcttggctcactgcaatctctgcttcccgggttcaagcgattctcctgtctcagcttcctgatagctggggttacgggtgcacatcaccacgcccagctaacttttgtatttttagtagagacagggtttcgccatgttggccaggctggtctcgaacacctaacctcaagtgatctacccaccttggcctcccaaagtgctgggattacagacatgagccaccgcgcctagcctgtttccttaaaattcttaccagacaacagtaacatatctgtaatagtataaaatcgtatctttaatcctattttgctcatcttccctaaaacacaaatagattaaaacacacgtttctgtctgcaattgccaactgactaaatatttgggcaggttttgacattatggtaagt

SEQ ID NO: 77068 - DNA, 2806 bp, Homo sapiens
gcttgccggatttgaaagctttccaaaaaggaattgatttttttttaattgtcacctatagtttttctaattatctaaatattttatttgtatctacctccctgctatctactttggcagtagagtgaggtgttaaagaaaaaattattcctgtcacttgtgaaacatgataagacagacttccttcaagggggccatggtaataagcatagggatgactgcaatggggtcttccagtgggggagagagggtgggctgcagtctgactccaataaggacagatgaggatttacagccaaggaacagggtgggagtgagtagatagaaaaatactaagaggaaacatcaggggtaagggggatgcttgccttcagcattcttgttgaaggtaggccagggtgataagataccaggggtagtcatgtaggggattttctctaatctgacttagcaggattattgctcaaactggattctgcaagaatggagaaggaggcgcaacgtcaggactttatcagaaaggactccaagaggagcctgactcaagtttggtcaaaggagagagtctttgtcaggttcagaatgacctcattaacatgaactctttaagcccctgttctcagactttgtccatggaccacctgcatcagaggtacttttagtacagtggttcataccttgcttacacacaggaaagcttaaaaaaatagtgccagtgttagagaccttctgtagacccattgagtatctcaaggcgaggcctccctgccatggcatggtgttatttaaaagcaccccagatgcttctcatgtaaggccccatttcagaaccactgctgcttgttaaaaatgaagattctagtttgttccacccaccctactgagtcttggtggatgaggccctagaatatgcattgaaaagaaaaccttaggctggatatggtaatcctgacattttgggatgtaatcgtaacattttgggaggctgaagctggaggatcacttgaggtcaggagtttgagaccagtctgggtgacatagtgtgagcctctgtctctacaaaaaattctaaaaattagccaagtgtggtggtacacgtctgtaatcctagctacttgggaggccaaggcggaggattgcacaaacccagctatgatcacaccactgcattccagcttggatgagagagggaaaccctatctctagaaaataaaaaagaggattgtctttttgacaatcctctttttttccttttaacttttttacctcagtaccaaagcagctctactgattgatggtaattgaaaaaggaaaagaaactggaagtcaagatacaaatgagggagatgtttggcttgtaagacaggcatttgctggcagagctaagttgccatttttggttgtttctggaactctaaatgcctgggatgctgacactcccttctgaacagctgatgattctggctgattgaatcagtggcataggtggagaagttagaaaccagttaggtgcagcaggaaaacagaactaagcattcagagatctgtggtcatggttcctaaggctagttggaattaattatttttgttttactttttttggggggggctgcttgtatttttataacctattaatcctcaaattacttagtacataacctacaaatggccttgcccactataaagttgttaaaatgtttagtattaaccgttttgtaaaactctgattgtcttattgtattgccttctacctctaaaactgttaacttaaatccaagccaagcctttaccagagattacctttatttgctagctgtcttcatctgtgggtagatacattactacagtgtttacgttccttatctctttgtctcagagtagcctgtgatatgttccagccccaacagaggacagtagaatggtccattaagactttctgaggccaaggtgggcggatcactcgagatcaagagttggagaccagcctggccaacatagtagtgaaaccgtgtctctactaaaaatacaaaaattagccgggtgtggtggtgcacgcctgtagtcccagctactcaggcggctgaggcaggaaaatcactggaacccgggaggtggaggttgcagtgagctgagatcgtgccactgcactccagctcaggcaacagagtgagacttggtctcaaaaacaaacaaacaaaagactttctgtcctgcctgtgggttggcacccgttaaaactcagttccttgatttttcacaggcacttggcctcttttctgccttttgtggagggccctctgtttctggctgtgcattagcaaccattcttttaaacttctgattatattgaatcagcaactttaagcttgcccctgctgcttgtcatacatcctgtggcagtcctcaggaaatcctagtttttggcattgaaatgaattaaaggattaagccacaagagggtgggggtgataaactgtgcttttaagaggaatttactgtgcagtacttggtgttagcaaaagcagttctagttcttacagggagataggaaaccaaggggctgctttagaacagcatccctaggatatgaagacgcagatctgtctgctttgatgttctttagcttgacagtggccccggctgagcactttgatatttgtcgccagtctagcaaaataggggttgtgtcttggagatggtaaacctagttcccgttgctttgcttcagtgttagaaaattactgaactcttgcttcctggaagtcccttataaatctcccttttacaagactgttctctggggcac

SEQ ID NO: 77069 - DNA, 1078 bp, Homo sapiens
ctagaatgctgttgtttggaaaaaaaaaaaaaaatacttgtttccgccgggtgcgatggctcacacctgtaatcccagcactttgggaggccgaggcaggcggatcacctgaggtcgggaattcaagaccagtctgaccaacatggagaaaccctgtctctaataaaaatatgaaaattagctgggtgtggtggcgcatgcctgtaatcccagcactttgggaggccaaggcaggcggatcacctgaggtcgggaattcaagactagcctgaccaacatggagaagccctgtctctaataaaaatacgaaaattagctgggcgtggtggcgcatgcctgtaatctcagctacttgggaggctgaggcaggagaattgcttgaacacaggaggttgcggtgagctgagatcgcgccattacactccaacctgggcaacaagagcgaaactccatctccaaaaaaaaaaagtgttttaccatttgttaaacacttatcaagcaacaagcaactactctctacatagtggtagatatgctgtgtgggagatgcagagttgaacaataggtgatctttgcctttgaaaaaacagtccagtggtaggggtaagattcccgggaagaactagtctcagaggcacagataaattcttcctttgttcagcttgtcttttctcaatttcctcctccattctcttctacaacctcctccttcactcactcccactcccctaaaaccttaaacttccttaaaccagctaagtttttgaagcaaactcatattttagatttcttatataataactttctatataaatgaaatttttctgtggatactgtcactctagtaaattatcagcaatcaaagcagcttcttgattattttttaaagcagcttcttgattattgagcacaaaaggccttttaaccaatggcttaagccttctgaaatcagcaagcaatatgaccaccttacaggtggagaaatttgagctcatgtatggaacaagttttctcaatatcttgtctccaactagaatgtagcttttctaactccatctgcttctacttctgaggttgc

SEQ ID NO: 77070 - DNA, 1035 bp, Homo sapiens
tgtggtgttagtggaaactgtgtgtgaatctgagagacagacatatatacacacatatatatacatacagctagcatttctctaggtacttcacataggcacacttaccttactgattcagcacacaggtttaggtgactaagaaatggctaagagctatcaaagttaacattggataatttatttgccctgttccagaacatggatctgtgtgacacattacccccagataaatgacttatctgtactaaatgatgaaatctgggctgtgctagtagtgagaaaatgaaacatggtaattatatataggctttggatcagcacaagttttctagtttttgcctctagccacccccaaagcttagtgatgtgacacaacagccatctgattatgctcacagatgccacaggtcaagaattcggtcagggcacagcagggatgacttgtctttgctctgttgtctggggctggcctggaagactcaagtgtctggaaagactgagatggttggtggttgggatcatctggaagcttttccactcacatgtcacctgggctggagtgacttggagccaggctcagctgaggctgttgaccagagcaccttcatgcatgtatcttttcaatgtggcttaggctcctcatgacatcgtgactgtgtacccagaaaggatgcttcagagagcaagcattccaaagaacctggcggaaaccccatgaccttttctgacctgttgttaacaagcaggtcactaaggccatcccggattgaaggggtggggaactagattccacctccccagtggaggcatgtcaaagaatttgtggctggtttttttttttttgagatgcagtctcaaggagaagtaccatgcttttttaaacaaccagatcttgggagaactcagagcgagaactcactcattacccaaggatggcagcaagccattcacgaggatcctccccatgatccacacacctcccaccaggccctacctccgtcattggggatcacattccatcctgagatggac

SEQ ID NO: 77071 - DNA, 1075 bp, Homo sapiens
gcgattctcctgcctcagcctcccaagtagctgggattataggtgcccgcctccacgcacagctgatttttgtatttttagtagagatggggtttcaccatgttggtcaggccagtcttgaactcctgacctcagtagatccacccaccttggcctcccaaactgctgggattacaggcatgagccaccatgcacggccatatttctaactttaaatgatacattctccaaatttagaggggttgttttaaaactagtttttctcttatgttgttccatgtttaaaaaacaaaaccaaacctaagaactttgccatgtttctgacccagttgttgccagcggtatgcttcgaccatgttggttgaccttgtatctcagattagtgtccctattccagtgccattgaagtgaggagtcctctagaacttagaaggaaaggactgacattgccggtgaatgcaagaattgtctctacttatctgcctctgtgaactccccaggagctgatagactacctgcgaacacattctcatagtgcagtgtatgccacgtcattgtcacctcctgtagtggagcagatcatcacctccatgaagtgcatcatggggcaggatggcaccagccttggtaagtctttcttttcttgaaacattgcataagtccacctagcagccaaacgtgctgtttttcttgagcttttttcctaaaataaatagtcaggtttactaataggcagagctggctggtgtgtggtttccatggacacttttttagtgtgtttgatacatatgccatgagaacgaccctggctcactttctatggaattttcttgtttatagatgggaggctttactcttactatcctacataccctcttaactcagaggtaatataccttcgaggtttttcttgaattacataattttatgtgaaggtataattcactgttagtgatgtttcattaacagcatagttaagagctgctgttttcataaattagtattcctgatttaatgcctttttaaagagtttctactttcatatacggtagataataaatgacatcctgaatca

SEQ ID NO: 77072 - DNA, 1123 bp, Homo sapiens
actcagccgggcagggtggcttattcctgtaaccccagaactgtgggaggccaaggcgggtgtatcacttgaggccaggagttcgagactagcctgggaaacatgaggaaaccctatctctactaaaaatacaaacattatctgggcgtggtggtggcgggcacctctagtcccagctacttgggaggctgaggcacaagaatcgcttgaacccaggagtcagggattgtagtaagccgagattatgccactgcacttcagcctggacaatggagcaaaactctgtcccaagaaaaaaaaaagaagcagtaaactcaataataatgaagtgccaaactcccaattttgatttaaaaagtctcagtgtatatgtgtatatatatattttttcatgttttgccagcatggagggatctattgttcgtcttcctgaagtgattgccctcaagaagaaatacaaggcatacttgtatctggatgaggctcacagcattggcgccctgggccccacaggccggggtgtggtggagtactttggcctggatcccgaggatgtggatgttatgatgggaacgttcacaaagagttttggtgcttctggaggatatattggaggcaagaaggtaaacgagccatgagaatgagcgattagagataaagtcactggcaattagatttggtacctcaggcctagcagatggggccctgaactgggatgtccgcaaatttgcctctggtttaggctcataataccagtgagtgactctaatgtctcctcactgaactaaaggctggttctgttcattgtttgttgttttcttatttgagcttctttctaagctacatgctgatctgagatatagaataccctcttgtgtgaaagaacacacagtggtgctccctgcccgccccagccttctgttgggtttgcattgtgctcacagtttcaaaaacagtggggttgtcatgggagcccatgggaatagcaggtcaccttgcccttggacacaaatatatcatgagtgaacatggagacaggaagcaaaaaagttgtgccagctgtggggtactacaaagcattgtatttttcaatttttaaactatgaagttgccttttctgggt

SEQ ID NO: 77073 - DNA, 1050 bp, Homo sapiens
ctgtgaagtttttttacgccttgcgtttgtttttttaggaggagtatgtgtctgtgatggtttattcacactctctcgctctgtcttttttacgcatttatttccgaatgactcactgggattagagatacagtttgattctgtatttttcgataaacacacagaagctaacttaatggcagggtatttaacatgagacactggtcattttataaggaagctaatgaactgagttagccaccaccgtcctttagtcaagtttcgatggttttgaacatttgttacattttggatttcaattcaaggtggcaataattcacctattttgccctgcttttttctgcccaactctaattatgtcctttgctatctgaggcatggtttctgaatgagaaatatatctctgcatttccggaataaagttaggaaagaggaagatgcggtataactgttcttttttgtgctctgtagatatgcaaagcctagagaagctattgaaagatgccattgtttatggtcagcctcggacacgaaggccctggaagaaaattctcatccttgtggaaggaatatataggtaatcctgctttattattcttacctttgtgacttggccccatgaagtcatagaattttttaactgaagggaacattagtctatccccctctggaaactaaggagacagtgtttataagtcgctaaaatacctggaaacagagtcagcattagaacagaagtctttttgtctagttcttcgttattctttccataatactacatggtcaccaaatcccctttctatttgagtcttttatttttctagtttgtagagggaacctatatgtaggggcaagaattggaatatatattttaatatgtcaaaacaaattacacaccatttaattttaataaatattttattttaggctgagtgcagtggctcacgcctgtaatcccaacactttgggaggcaaaagtgggaggtcgctcgaggccaggaatttgagaccagcttgggcaacatagtgagaccctgtctctgtaaaaaa

SEQ ID NO: 77074 - DNA, 1038 bp, Homo sapiens
atgttttcttctgggagttttgcgatatattttttatttaaatttatgtggaatttgggggcataacattggagagattgaatttttttttctaagtagataatatggttaagcattctgctataggtatttcttttttttgaaacagtcttgctctgtcacccaggctggagggcagtggcgtgatcttggctcactgcaacctccgtctcctgggtttaagcgattctcatgtctcagcctcccaagtagctggaattacaggtgcccaccaccacaaccggctaattttttttgtatttttagtagagacagggttttgccatgttggtcagtctggtctcgaactcctgaccttaagcgattcacccgcctcggtctcccaaagtgctaagattacaggcgtgagccaccacacctggctgatgcttcttttatctaaaattttgaccagtattatttttctcctccttctatatataaacagagaaaactaaaataattcctgtgtttttacttgtcttcagctgatcgccatacattgctctctgcctaagaactggaggctttgcaggacttggggaggccaaggagggcagatcacctgaggtcaggagttcaagaccagcctggccaaaatggtgaaaccccacctctactaaaaatacaaaaattagctggatgtggtggcatgcacctgtaatcccagctactcaggaggctgaggctggagaatcacttgaatccaggaggcggaggtttcagtgagcagagatcacgccactgcactcctgccttggcgacagagcaagactctgtctcaaaaaaaaaaaaacaaaaaaactggaggctttgagtcaggacgtaatttacttctgtagggaacatctcctgaatcttgattaggtcgtatgcagatttttttcttagaaattactgaatgtgtaagcacagtcacaaccttagactatcttatttgtgtttgtgttctgtgtttttattaccttatctctttttctgtcaaaattgttttctgca

SEQ ID NO: 77075 - DNA, 2615 bp, Homo sapiens
agactgagggatgactgtgtgtctttgtatcttctctcttctttttattctcgtgggagcatgctatatactttctgcacccttttcatctaattggatattatgaggctatttttgacagagaaaaacctttttctgagttgagatctgacaggttgaagggccccctgagagatggaagagtaagaactgcagtgaaaaaaaaaaccaaaccgagatcttcaaccttttcttagttgccttagcagaaactgatgtttgtgtgttaaagcaaagcttgtttggggatttttaagacaaaactgaagcctacagtccatgctatgtggggaaaaagttaataagtaggatcttccctggactctggatatgagtagtagtgagagaatgcaccatttccacagacatgaccccatcagctgccatttcccacagataaacagaacatgatactaaaactacatggaattctctcacgtaaagaaaccaaaacgttttagagacggatgtgtcatgttttagatacaaataaagacctgttgccatatatctgagtatttacatcagtcatgggactgaagatattaaattaaaaggctagaattttgcatctacttttaaggtgtctttacaaaaaacaaatgatcgtgtacacctttttcctcttcttaaaattgatcactgtgctgttgtgcacaatttccttaataagatacagctattagtgtttgtggcattttgtgatttgtgtaactaaccctttcccctccagcttcttacctttctgttcctgtgatgttgcagggttgcctgattctgagtgatgaactgaatcatgcatcactggttctgggagccagactgtcaggagcaaccattagaatcttcaaacacaacagtgagtttgctgaagaattcactgctggccttggttttgctattctttcgatccatggtgggagttaacattagttatattagcacttgaaagtataaatgaagacaaagtagcaacatttaaaatgttcttccggtccagtcttttaaaattagaggttgatggaagcctcttgtacaaatataatactatccttttatttgaccatgaagttttccatcccatttccttgtttacagatccgttactcaaatacatttactcgatgactatagtgtatcttgccataagactaacagtatttaagtgaataaatcaagatctctgactggttaacgaagagacttaatagataagccagtccttacaatatagtggacaggtgctgaagtacagctatgaatagatgctgtgggagcacagaggagggtggccctgagccagacctttcctccctcagtggaaatatctttgtgtattattaaaatgattatttagaataaaaatgcgtaactttcatagttaaaacacacacataggcagaaaaggtgaccaaactgtatgttaatagcatcttttcccaaaatgtgtacaggcacagacaaaagtttggaagaatgtataccaaaatgttaggtgtgtacccgtggatggaaggatcatagatgataacatcatttttgtttttgtttttgtttttgtcttgtctaaaatgttttacagtgagaaatgagatcttattaaatatcactatgtaacctgttattttcttttttttttttttgaggctagagtctcgctctgtcacccaggctggagtgcagtggctcaatcttggctcactgcaacctctgcctcccgagttcaagcgattctcctgcctcagcctcccgagtagctgggattacaggagcgcgccaccacacctgactaatttttagtatttttagtagggacggagtttcactgtgttggccagactggtcttgaactcccgacttcagttgatcctcccgccttggcctcccaaagtgctgggattacaggtgtgagccatcatgcctggcctctttttacaatacacggtgattgttgtttgtcattacatgtaactctatctcattcttaaataccagtgtggcagttagtgcctgggtgtgccctcatttaattgccccctcaattggacatcggggctgtttctaaatttttctactgggaacagcactacagttacagttttgtaccatcatctggttagtgccttaggataaatttctagcagtctcagaatgcatggttaaaagagtatacatttttaatacttttccaaattgcctctaagcattatatgaactttttttttttcacttttattttaggttcaggggtacatgtacaggtttgttatataggtaaattgcatgtctcgggggtttgtgtacagattatttcgccacccaggtaatcagcatagtacctgataggtaggtagtttttcgaaccttaccctcctcaacctcccctgcctcactctcaagtagaccccagtgtctgttgttcccttagtcgtgtctgtatgtactcagtgtttagctcccacttacaagtgagaatatgtggtatttggttttctgttcctgtattagtttgcttagggtaatggcttctagctgcatccatgttgctgcaaaggacatgatctcattctttctta

SEQ ID NO: 77076 - DNA, 1006 bp, Homo sapiens
attatatatataatatatatatccccaagtgggtagtgtgtgtgagagggcacaatctgtatgtaaatgtaaattatatttcagcagattggtactctcatcctgaaaggccccttgaggttatttattctcatgtttaacatgacacttaggaatggtatattgaaaacgtggtggattaactcaagcaggagaattgagtttttgttttttggttgtttatatggtcacacttagctgtgtgactgtgagcatgtcaaataatctttctgatcctccaagtttcttttgtaaaatgaggtggttgagctagattaactctaaagtcctttttagttatgcagtgtatgggtctgtaaggtacagatgggacaaatagaaaacaaacagcaagataggagatttaaacccacctgtgttgataaacattaaatataaatggtttgtacattccaatgagaagacaaagattgtcggataaaattaagtaggtttcctaatgtaaaatagcaacctattttaaatatgaagacacagaggttaaaaggaaaaggatagaaaaaaaatacagcatgcaaataataatcagaagaaatgtgaagtgcctgtattaatataaacaaagatttcagagcaagaaatatttctggtgataaagaacattgtgtaatgattaaggaattaattcatcaagaggttataattttaaatgtgtaggtgcttatcccatttatgcctaatgttccattattggaacgctaagcatgtgggagttatttatatcctactgctcaaggtcatcgccagggtctgattttgcaattcaaaaaattgtaacctctggcataaatgggttattaacagagcgtcaaagtacgtgaagcagaaattgatgaaactaaaagaagtagacaaatagaaaattgtaattagagacattaacccctctctcttttttttttttttttttgagacagagtctcgctctcttgcccaggctggagtg

SEQ ID NO: 77077 - DNA, 1071 bp, Homo sapiens
gctaagggctggctgggcatctctgtttctctttctctctgtctccccctctccttacgtctttctctcctccttccatagtctcttatccctcagttcccatccccccgcccatgttctgtttttgcaacaggccagttagattgttttacatagcagctgacttcaaaagtgtaaaagcagattttgctaggcctcctaaggcctagacctggaactagtatgcacaaacaggaatgggagaaatttttcgcagccccctttggggaaattccactgcaggtgctgaatcagattttattcaactattgtgttctttatgagcacatattactcttcacaatattatgaagaatattactcttcataatattgactccttcatagatcttagtctgaaaaggacacaacacatatactatgatttcttttaataaagtgatgagtaattcttaaattcaggattttgtgatactgactttattaacttcttcacacaggaaacctggacaagcatgaagaactagaggagcttgtagcaaggttcttaggagtagaagctgctatggcgtatggcatgggatttgcaacgaattcaatgaacattcctgctcttgttggcaaagtaagatactctgtcatttatgaaaactccctcatgtatatcttcttttgttttgaaaagcagtcagagtgagctaaaagctgttataaactttaggctaaacatagtttagccaaagatatttctaccacaaattgtttttcttttttttttttttttttgagatggagtcttgttctttcgcccaggctggagtgcagtggcaccatctcagctcactgcagcctctgtctcttggattcaagcgattctcctgcctcagcctcccaagtagctgggactacagctgtgtgccaccacgcctggctaattttttgtatttttagcagaggcggggtttcaccatgttggccagcctgggcaacatagtgaggcctcgtctcaatttgattttattttttaaattaaaaacaatttgtggccaggcgcagtggctcacacctgta

SEQ ID NO: 77078 - DNA, 1070 bp, Homo sapiens
aaggctgaaagaggtaaggaagctgcagaagaaaagcttaagcctagcagaagttcattcatgaagcttaaggaaagaagccatccccacaacataaaagtgcaaggtgaagcagtgaatgctgataacttcagcaagttatccagaagatctagctaaaataattgatgaaggtggctacaataaatcacagattttcaatgtagatgaaacagctttaaattgaaagaagacaccatctaaaactttcacagctagagacaagtcaatgcctggtttcaaagcttcaaaagacaggttgaccctacttttaggtgctaattttaagttgaaaccaatgaatgacctcattttaatttgattacctctggaaagttccagtttccaaagaaggtcacattcttctgggaatgaggacgtcaaaatatcttttttggtgggacacaatggaacccgtagcatcatccttctgtatattttccattttcattaattgtgttcagaattacagatgtccactaattaataaaaaattgagcttttagcttttatttcttggttatccagttgttttgtgatgattttcaagaggaagatgggagtagaacatttttatttccccctgcctttaaaacagagtttctaactggcactccagaaatgacaagccttgtgatctaatcctgtggttaaaggagcattgtgcagtggcgacatatagtaaggatacattatgcctttatggcatttgatattttataaagtgctcggctggatgcggtggctcacgcctgtaatcccaacactttgggaggccaaggtgggtggatctcttgaggtcaggagtttgagaccagcctggccagcatggtgaaacctgtctctactaaaaatacaaaatagtcaggcgtggtggtccgcacctgtaatcccggctacttgggaggctgaagcaggagaattgcttgaacccaggaggtggaggttgcagtgagctgagattgcgccactgcactccagcctgggcgacagtgcgagactctctctctcaaaaaaagaaaaaaagctca

SEQ ID NO: 77079 - DNA, 2152 bp, Homo sapiens
agagacagggtttcactgtgttagtcaggatggtctcaatctcctgaccttgtgatccacccaccgcggcctcccaaagtgctgggattacaggcgtgagccaccgtgcccggcctacagcttgccttcttagcttggtcaaatatcagtgacaccccttctcatgtgtatattcacagcaagtttattatttgtagtgactacattgtattttacagtatacatgtgccatggtgtgacatgttgggctgtgttaataatctcaaaatctcagggaattaaaacagtaacagtttatccttatcgatacttcatgttcatcctaggttggtggggcccttgaaccattttgtccttagttaggggcccaggctgcctcagcttccattgtatgaaatgtcactggtctctgtatctgaagaacagatgtggcaaattgtgcagtggctctcaaaggatcctcatgtgtatatattctcatgtgcgggagttactgagtatgtatatcttttaatggataagtactgccaaactgccctccaaaaaacaaacctgatattcttatgtacagtgtcctgtaagataaggtgattgtcctggccaacactggatatcattagttttaaaatctttatcactattaataaatgaaaattgattattttaacttctatttccataattggtagtgtgtttgagatttttttaatatagactttgttctctctgcttccttttgtgtcaccagttcatttaatattacatgtaagtacttttttgctcatgagtttcattgttttatgctattgatgcacaggtatacagggaatataataaagggtgttataaacatgggttcctacaactatcttggatttgcacggaatactggatcatgtcaagaagcagccgccaaagtccttgaggagtatggagctggagtgtgcagtactcggcaggaaattggtaagtgaaagctgtatttggccagctgctgtttttgacattgttttagtcaggggcaaataatagtaatattgacctagagtattaaatatctacactttgtcatgtcatttagataaggtgaagaatgctttgtttttctgaagtgtgatggatgatttcaatgctttcaacacattttgagatgtgtttatctttcccaatgtgttatacatatagaatgtccctcgaaaaatcctgccagtgtttgtttcatttataactttaatgttgatttcattggcttttgcaaatgttagtggttaagagtgccacttattaggatgttgggcatatgagagttaatctgctttcatactggtacatgggggctaataataattcctgccttatagagctcttttaagaattacgtaagctaatccatgtagagtacttggaacatagtagacaataaatataaactctttttattattgttttaagtttgtaaaatataaaagagtaataactttatataaagagattcaatttattttaattcagcggaagatttcagattgttccaatttgattcagagaactgacaaccctggaagttatgaaaactttccaaatacttattactgtaagcacagtagattaaaagaacagttcattgttagttatttctcagggttctagggattggcaagcacagttgggtgcttcttacccaaggttcctctcacggttgcactcagtggtggctgtatggctggagacatgaagccttcttcattcgcatgtttcacctaggctgcggtggctggagctctgtgtggcctctccatgtttctagcttgggtttcttcataccatggtggtcttggagagttgttcatcatgcatggctgcaggcctctagagcaagcatgcaaagatacctgactgaagccaggcacggaggctcatgcctataatcccagcactttgtgaggccaagataggaagatcagctgaggccaggagttcgagaccagtctgagcaacatggtgagacctgttctctaaaaaaataaagataaagtagccgaacgtggtggcgcatgcttgtgatcctagccattcaggaggctgaggccagagcatccctcgagccaaggagtttgaggctgcagtgagctatgatcgtgctactgcaccc

SEQ ID NO: 77080 - DNA, 1028 bp, Homo sapiens
tgttgagacagagtctcgctatgttgcccaggcttgtcccgaactcctgagctcaagcagtcctcctgcattggctttctaaagtcctgggattacagacgtgagccaccaagcctgtcctgatttagcagttaattaaatataagtggcctctcattctcaggtgctcttacagtatgaaaatggaagttgtaaagtttgtttttaaagtaactcagtggaatgatagacagtggagacttggaagggtgagggagtgagggtggatgatgagaaattacttaatgggtaccatgtgtgttatttgaatgactgataccgtaaaatccctgacttgtccattacacaatcttgcacgtaatgaaattgcccttataccccataaatttacataaataaaagatcatgtcatctgttaaaaaattttttaataaagtaactcagttaaatttatggtatgtcaccatttcttggcaggactttgtgtcattgtatcaagattttgaaaacttttatacaaggaatctgtacatgaggataagagacaactggaatcggccaatctgtagtgtgcctggagccagggtggacatcatggagagacagtctcatgattataactggtccttcaagtgagtcttggttgggaaattatttgacaacaattacaaaagggtttcttcatttgagaaaatatgttattataaattgagtattctctcaaaataggagtagcagctgaggatacaatatgattggtttccttacatattcttcattgttgagctttttaagatatatctttctattacatttgatactgtgttggattatagttcagaagaaaatttggcttatttattttttgagatggagtttcgctctgtcacccaggctggagtgcagtggcgtgatctcagctcactgcaacctccgcctcccaggttcaagcaattctcatgcctcagcctcccgagtagctgggactacaggcatgcaccgccacacccagctaatttttgtatttg

SEQ ID NO: 77081 - DNA, 1106 bp, Homo sapiens
cagttatgaccgatggtagctgaagttttatttaaatattcaaactaaaaactctttatctgcagggacctctcctagtgtagatgcatagtcgaaacttgataattgacgtgtattgctggtggtgagggaagtgctgattgtggtgcagacagcacattcctggatgaggggatagtataggcaaaggcatgaagaatgtttgggagaatctggaatgtagacagaagagaaattgtgttttgaaaatcaaagtaagaagtttggtaggcaatgaggagtattgtttttgtttttgtttttaaatagagacagcgtctcgccatgttgcccaggctggtctcaaactcctgtgctcaagcgatcctcctgccttggcctcccaaagtgttgggattataggagtgagccaccatgaccccaagggcagtttttgatcaggggatttttcatacagcttgtgcagctggtgctcaaagtgtgatgaatgaatgaaaccaacaagatgtatctgaattactttgtgagtacattatctttggaacttgtttcatgtttacagaaagtaaattggtggtttaagtgttgggagctgcctgtgtatcctttgtgtgaaagaattagaacacacagattttattcttaagtagtttctaattttgttgaggaaacaaacatttgaaagttatgggcctttgcaaaaccattatacaagtaaataatacttagattatatgaagatatagaacaaaaaaagtatctgagtagcatagggttaatcaggaaacaattcttggaggaagtaatacaaggaaatgggaggctgaggagagcatttgcctctgcagtttatggagaggattttattaaattattcaaattcatttcaatagaatattcccagtagataacattagcatttaaaacagccaacttctgccattttcttacaaaaattcagcttttagagggaaaggaaaagtcattcctttcctgtgatagatcatgtttgttttctaatgttggattagagatggggaaagagggaggcaaattaagtgttaaactggaaggaggtgagggaaagtggttgcttgggatcataa

SEQ ID NO: 77082 - DNA, 1237 bp, Homo sapiens
aagtgctgggattataggcgtgagccaccgtgcctggcctaaaattcttttttttttttttcttgtttccagtgaggttggaacttagaaaattcctttttttttttgacacggagtcttgctctgtcacccaggcaggagtgcagtggcgtgatcttggcttactgcagcctccacttcccagattcaagcaactctcctccctcagcctcccaagtagctgggattagaggtgtgcaccaccaatcctggctaatatttgcatttttagtagagacaggtttcaccatgttgaccaggctggtcttgaactcctgacctcaagtgatctgcccgcctcagcctcccaaagtgctgggattacaggtgtgagccagtgcgcccggcggaacttagaaaattcttaaggtataattcagcaaatctctaaggacctagattttaggtaggaatgtttttcttgccatgatggaaataaacatttttaacctctcttttagatccatcatgttacacaaaatggaggactatataaaagaccgtttaatgaagcttttgaagaaacaccaatgctggttgctgtgctcacgtatgtggggtatggcgtactcaccctctttggatatcttcgagatttcttgaggtattggagaattgaaaagtgtcaccatgcaacagaaagagaagaacaaaaggtaactgttagagagtttttgattctgtaaatagaagccttttatggaaatcttagtatttttgcacaaaagctttttctcagaaatttgggtacacattaaaattaaactattccagatgcagttaaatgaaaacattctacaaagaaagctgaaaaataacaaggttaaagatatcaaagcattcatcatgggtttaatcaagaagaacctaaggaggtgggcggcactatccctgttttatggattagaaatcaaaaagtcacaagttaaacaacgtttcccaagatgccaggtgtcagagctgctgtgtggacagaggactgtgaagtgaaaaagccttgctctttctgttcataccagcatgctgaatcccaggttgtgtttaccattttctgaaaaggttgtattctttggaattaataatgtgttttctcatagatacattatacatagttgggtgattcacacatcagctcctctccccagacaaacaagctgtaatacagaatgtggccaaccgattctatttacggtaaaca

SEQ ID NO: 77083 - DNA, 1072 bp, Homo sapiens
cagaaaaattcatgtcagttactaacaatttttccccttgttttgggtttcactttctttttacttttatataatgctgggccacactttttttttttttttctgtatcacctaggctgtagggaagtggcatgatcatggctcactgccatctcgaccttctgggctcaggtgatcctcccacctatctcctgaggacctgggactacaggcatgtgccaccatgtccagctagtgtttttgttttttgtttttgtagaggcaagattttgccatgtgcccaggctggtctcaaactcctgggctcaagttatctgcccaccttggcctcccaaagtgctaggattacaggcatgcgccactgcacccagcctggaccacacttatataaacatcttagttttttgcatgatttacttgtgttatcactaccaacaaaggttaatttgaactacgtgtttctgcaggggcctactgctgataattatttggaatactatggctgggtggctttaagaatgtgtggtagtaaaacatttacaaatattttacattctaataaagctgaatttacttttgaacttttgatctcttcatctgtaggccaatatagtacttttttgggacaggctttctctttgttgatttatattttttgctttttttattagaacaaaagaaattatgctagcattttagaatctatttaagaaaatcaaataatgataaaaatcagtgttaggtggtgttcttatgcagtccttcttgctccccttcttttactgttcatctgaagggcatataatttataagttatttctattgaaaacaagtagccctgcttatctcttagtgttagatttgactgttgcttacaaaattctttttttttttttttttgagatggggtttcgctcttatttcccaggctggagtgcaatggcttgatctcggctccccacaacttccatctccaaggttcaagcaattctcctgcctcagcctcctgaatagctgagattataggcatgcgccaccacacccacctagttttgtatttttagtagagatg

SEQ ID NO: 77084 - DNA, 1322 bp, Homo sapiens
ctctatagcaaaagaaaaccctggattatatgttgccttctgtctcttaagtttcaggaaaattttttaaaaataattaaaataaaacagtttttattgcactgtaaactgactcagaagaaatgatcctgaataaaggtttcaagaatcccatgaaaggacagggagtaactatgttataatccaataacagtgaagtaattattaggaaacagaagcacacatttctgatatgaatacaaaatcacaaaagcataatttccttaagcaaataagcacattccagctgcatgctacagcaggataacagaacctgcccagctggtgaatggtttggaactttatttttaaaaacttaatgtctaatgtgaaccacccattattcttcagcaatcaaagaactgttatcatgctttgtccattaaacgaaccctattcattttcaagtgctatgtttctgttgctccttaaaatcagttctgctgaaactgtccttgcaattttactgaaatgtactggcctctccctactgcatatcacacatactagagagaacagtttggagctttacacaaatcacataggctatactgtgctctgaatgtgtatgtccagaagtgtctccttttttcagcagggaaattctgaaaagtagaagtccatagtttttcgtgtaggcagcataaattccttagtttttgtcagtaagtatctcatgtggaatggaatgaaaaatgtttccaaaactagctgtgaaacacatttatattttgacattaccattttgctattgaaaacccccaaaaggagatcttcaagcatatatggagtggaacatttccatttcagttcagtggcatcctgtacacactgggcactgatgtctgcccaggagttatcacactggccacccaagcctccgctgtaacacttttccatctctagataagcatcacggtgtaagagatgcaagagcctgaagactggagtacaagtgcagctctgccacaaattctgcatcttcatctgagttctcctccactgctgacacgttctgagcctgtaataccattccctccactctgcccccaccacgtgctccagtctggttttgtggtgcacaccactggagaggcaatccggtttgtgtcaacttcccttctctgggaatactccctgatatgcagggatgcgcccctggtggtcacgtgtatgctttgttgtgactatatttcctggaccataactgattgatgcagcacagacacctctgccgaaagaaatccaacaaccctcttttatggggatttaaaatgtcaatg

SEQ ID NO: 77085 - DNA, 2985 bp, Homo sapiens
aaaaaggaagtcaagagaaaggtgttcacacttcagcgttgctttgtgttcaaatgcttctttcaatccctatgagttatgttcagatttagtaggaaatcaaggacctttctcccataatctctaacaatttagcatttatagaatgatatttcttcagagcttgccaactaataaggtgaagaaatatcaaggtactaacatgacattttaaaatctgtatgaataacatttggttgacttttggggacatgttttgtaaaagtttcactcaaggcacattggtggcatttggaagaacggtctgttggaatgctgtgagggctgcagtatcccttctagaaaactacttctcaccagtatttttaatacagacttcagatctggagctttctacactctcagatggaggaatattgtctgtgaatatttttctttcttatacaaaagagagatcttggtaactacatgagagcaatacaatatcttaacattttttaaaagttgttttcatttttaattaaagcgatgtgcttgtgctccaacctctacctatctttcccctctttctgggggggaaatgttgccaactgtgccatcaaaaatacgcatacagctgtgtgtcatgcttttactaaaatatgaatttagagtataacattgttgagatgtaaattcttttcctcacatctcccaccatgtcttttaatgaacaggagagaagtcagaaacgtctaggatcactttacactctcaagagtatgtttctgtgcttgaagagatgaatgaatgtgtatagtaaaagaacaactcttggatttgggtttagaatttgatgagctagatgctgtgttaaggagttatgaaacaatcacacattgctgtttagtgatgacagtagacacacagttttcacaatagtaacagttgaacaatagagcagtaatttttcctctctgctattcagatgagtgggaggagcacaaacctttatttgaggtaaggtgtggcaatttgcccgagggaaacttttacattagcattggaaagaacctttgggagtttatttaattcagtcctttatctctttgtaggagtttattaaaatcagtcttgatagaaaattctgtactgtttttaaagatctccaggggatttgcagcaagtttttctctatagcaaattggattattattccatgatcttaattaccaaatttcttcctgtggatttaacatttgatgaaataaatgccatgttttggttgcacctgaaatatagtagtttgtttgtgtgtttgtttttaaaacttcacgttaacagctctttttaaaagagcttccatttctttatagaagttttgagatttaggttttccttttactttcctgagttagttaataagtgtgaaagaaaaaaagttatctacctttgagacagttttgaccctaacttttttccctttgggtgtagttttaatgagatattagaaggatgagagctctctggcttacagaataaaaaattctatctcaaggaattggggcaaaagttgtgttcttatgttaaataataagcaaagtagaaagaacaaagtgttagtcttgcttcttaggaggaggcaaataaataactaataaagctggtttactaaatagctactagcttttgtttccactgagggagaaacagtaactgggggtttatatgtgatagttaaggaaaaggagacgatagttatgaggctagaacagtagaaatagttagaatagtcatatatctatttagatttagcagatcctgataagatacctcagatacctgaaggcttttcagaaataatgtaatttacaacttggaggacaagattttcatttcagttttcactctaaggggaagcatatcttgattcttacatagctgcatctgaagaattccagagttatttgagatactcaggaattttctttaacaggaattcttgggaaatgtgtaagcagctatgttcttaagatagtattttagaactaggatgttcagaaaagtcagacttgcccactttttagggtttgcccatgtgccatagaaatttgcaccgctttgagcaagacagttaattggttgatttaattagattcagtttttggaagaaagaagcagtgtttattggtagaataggcaattcagagggatgggtagaggcactgtttgcattctgagtgggtgtgccatacttgattaaataaatggtttgtggactcaaagtcagttcccttctgggtagtttctgagaagcttctgtaatataattcacaatttgtgaccgataaaaaagtaagtcctttgctcttgacccatttactgttagaaaatttatcttaagtttgtctttaagactactttttattgcaaagcttgaggcagctattcttccttttttaaaaaaataatttttacttctcattatagaaataatacatgtttaatgtgggatcataaaacattgagataatctctgcgttaggtttttttttttttgagacggagtctcactctgtcgcccaggctggagtgcagtggcgccatctcagttcactgcagcctccacctcccgggttcaagcgattctccagcctcagcctcctgagtagctgggattacaggcatgcgccaccacgcctggctgatttttgcatttgtagtagagacaaggtttcacagtgttggccaggctggtctcgaactcctgacctcaggtgatccacctgcctccgcctcccaaagtgctgggattacaggcgtgagccaccacgcctagccggaggtttgttttttaatgtggtctattgtaaatccatctgctactttccgttaatttcttttctttctttttttttttttttttggcgagatagggtctcgctccagcctggcctgcagtagcacagtcatagcttactgcggcctcaacttctcgggctcaag

SEQ ID NO: 77086 - DNA, 1056 bp, Homo sapiens
cgcctcctcctcggtctggaccattaaacaggcaagccctaccccggacctggatgcggcctccaatcaggtgccaggccctggagtccctctagagaagccccctctccaccggcgaggcgctttgctctcgtccgtgattggccaggcagcagcatggggtccgcctccttctcttccagattggtcagcggtcctcaggaccacatccctctcggcaggtccccgccgctttttcccttcgctgcgtggccttggccgagaccggtcctctgcggagagggccccgccctctgtgaaggcccgcccgggaattggcggcggcgctgcagccatttccggtttcggggaggtgggtggggtgcggagcgggacttggagcagccgccgccgctgccaccgcctacagagcctgccttgcgcctggtgctgccaggaagatgcggccggagcccggaggctgctgctgccgccgcacggtgcgggcgaatggctgcgtggcgaacggggaagtacggaacgggtacgtgaggagcagcgctgcagccgcagccgcagccgccgccggccaggtacgaggggcccgcgcggcggggccggggtggcggtgtggactggcggaggggcggccgggcggggcgaggtctccgggccatccgctgggcaatccgcggggcgggcgccgttcgcaggtgtgggcggcagtgtccggccgctggcccgacctccacgagcctggaggctcaaggacggctcgggggctccccacctctccgcgcctggaggtcttactcccggagctctgggttctgctcagagctccgggtacttttctctgccccattctgccagaagtgtgtgctgtccccaggggaagcgatgaggggcccttcggactccagtgggagccgcccaagggctccggagggtcccttctcaaacccctgaggttattgcttccttttaaagtcctgcagtcgtccaaagaaaaccacccatggggtccttaagaagcaaagaaaattaggcggtggtgtcagatggaaacacacccag

SEQ ID NO: 77087 - DNA, 1055 bp, Homo sapiens
ggatattttggttagtaaaaacaagttgcaaaataataaatacagtgtaaaaacatgtaaaactattatatatgtatatatatatatatataaactaatatgtaaaaactaaacaagtctttctttttttttgagatggagtttcacgcatatcacccaggttggagtgcaatggcgcagtctcggctcactgcaacctctgtctcccaggttcaagcgattctcctgcctcagcctcccaagtagctgggattacaggcgccggccaccatacccagctaatttttgtatttttagtagagacagagtttcaccatgttggccagattggtctccatctcctgacctcaagtgatccacctgcttcggcctcccaaagtgctgggattacgggcgtgagccaccgtgcctggcctaaacaagtcttatctatatatgcacatatgtttgtaaatgcatggggggaaaggatatgtccaaggataagggtggggaggagagagattagaagattgtagaaggtactttctactatgtgatttttggccttagattttttaaaaattttttaaaatttacatttatttatttatttatttatttatgagacagggtctcactcttttgcacaggctggaatgcagtggtatgatctcggctcactgcaacctctgcctcctgggttcaactgattctcttgcctcagcctcctgagtagctgggattacaggcacacaccaccatgcccaactaatttttgtgtttttagtagagacggggtttcacttcatcgcccaggctggtctcgaactcctgggctcaagcgatcctcctgtctcagcttcccaaagtgctatgattaaaagcatgagccaccatgcccagcctggtgtttatttttttataagaattattcacatgttacttatatattttatttatttatttatttatttatttatttatttatttatgaaggagttttgctcttgtcgcccgggctgcagtgcaacggcgcgatctccactcactgcactctccgcctcctggtttca

SEQ ID NO: 77088 - DNA, 1483 bp, Homo sapiens
gaggtcaggagtttgagaccagcctggccaacatggtaaaaccccatctctactaaaaatacaaaaattagccaggcatggtggcaggcgcctgcaatcccagttactcaggaggctggcgcaatagaatcgcttgaacctgggaggcagaggttgcagtgaactgagatcgtgccattgcactccagcctgggtgacaacagcaagacttcatctcaaaaaaaaaaaaatacataatatttagctgggcgtggtggcgggcgcctgtagtccctgctacttgggaggctgaggcaggggaatcatttgaacctgagaggcggaggttgcagtgagccaagtcgtgccattgcattccagcctgggcaacaagagcaaaactccgtctcaaaaaaaaaaaaaaaacaaaaagtaaagtcacagacgttaggccctgagaaattggttttctaataatctgttagtagggatgtaaattgctatagcccctaaggcacaatttggcatcatgtaatgtgtgactttttatcctactttgaccagggtagtcctggatctccttttccaccgagaagtggtctttcattcaatgataatttatgtggtcatcctaataatgttttcaaatgtataccctttgtcccagtaaatttcacttctaggaattgagtctgtggaaagtaatcagagctgtgcagaaagatttttgtgtgagaatattcatagtagagaaaatatgaaatatactcaaaatccagcaacagggagttaaattcatgtacttttcagcacgtgactactgagcactgttctttggctgcacaagtactttcctttgtggagcttgtatactggatatgccataaccctatgtagcctttaaaggccatgttttacaagaatagttagagataaggggaaatgtttatactatatttaggtgagaaatccaattatgaaactgtccatagtaacctaattttgtatagaatgttgacatttttattttatgtttttttgttcagacctctcagagatgaaatgtttacatatttttttaaactggaatgatgtgaataccaaaacatgaatgatggtggaattacagttgatacttatttgtgcttttctgtatttctgatttttaatttttttttctctttctgcgcacccccctctccccctgccccatctactgggcaccagagttatttgatttttttgtttgttttgtttttttgagacagggtctggctctgttgcccaggctggagtgcagtggtgcaatcatagctcactgcagcctcaatctcctgggctcaaacaaccttcccacctcagcctcccaagtacctgggactacaggcaccaccatgcctggctaacttttctaatatttttgtaatgacaggatttcaccatgtttcccaggctggtcttgaactcctgagctcaagtgatccacctgcctgagcctcccaaa

SEQ ID NO: 77089 - DNA, 2143 bp, Homo sapiens
ggcccccacggccatgtttatgcacagtggtgacatcatgataatgtcgggtttcagccgcctcttgaaccacgcagtccctcgtgtccttccaaatccagaaggggaaggcctgcctcactgcctagaggcacctctccctgctgtcctcccgagagattcaatggtagagccttgttctatggaggactggcaggtgtgtgccagctacttgaagaccgctcgtgttaacatgactgtccgacaggtcctggccacagaccagaatttccctctagaacccatcgaggatgaaaaaagagacatcagtacagaaggtttctgccatctggatgaccagaatagcgaagtaaaacgggccaggataaaccctgacagctgagacttggagatcccatcctttttactcaggcacctgcttaccgtaaatgatcatgttattgtgtattgccgtggacttcagcacccagacaagccaaaaacagagacagggaagaactcattgttgatcacactgttgccttggaacccacgcagaagtaaactcagccactttgctcagagaagtgtttgacatggtctgttcctagttacatgttggctgtaatgtatgttgagaagtcagtccaaggaggtatgttcttccacaacagccttctcagcctctgctatttcctttgaggaaggtagaagtgagtttccatgtttgcagagtatttaaatacctcagattttattaatgagaaatacagtacccctccctccactccatctggtaatttatggtaaaattgtggttctgtgaaccagctattagtctcatcttcttaactccctcaggcatcatcaaattctttgatcttctcttccacctctctggctctcatggaagaatcctttacacatgaaaacaatggaactggaaaatcttgtcttttagaaaagaaattaatcacaactatctctcttgcctaaaagataaatataggtaaacccaaggaaaggggaatttagtttctctacatgtcatttcggtctccaaactccctgttggctttttaatgcaattttaattgttggaataaaaaagtcccaagggtgttttgttactgttttctccatgaataaactcacttgattttaaattaaagatctatatctgtctttggggtttagtctatctgggattaaggtttttttttctgtttttctttgctgtattgttcatgctattgaagccctctagctgtttctgccctacaccattctgctgtgccctaagtattctttgtggctgtctcacagaagagagaacatttcttaatattccagtcactgctgttattgtctgagggtaggcagcttggaaaaatgtaggcaacaccaagttttaatctttatacccccaacaatttgactgactatatcatggtccaggttactttacatttctctggacctcggtttcctcatcataaaatgaagatactgtagactaccatcttcctaaagggatattggtatttgaaagagaattaagtgctcctttctacaaacatgatgtgccaaaattgttttattataagggctctttgaaacatcctaacttccttgtgtggaggactggctggaagcccatttggtacctactgtttgcaatgcatgttattaagtttacatgtctcctctgtcctgctctgccccttttttaaattactggcattgaatattgagttcatatggtaatagcagggtttttaaatgaataaaaattatggatttatctcttatgtgtaagctaggttctttgttttttgttttttgttttttttgagtcagagtttcacacttgttgcccaggctggagtgcaatggcacaagctcagctcactgcaacctccacctcccgggttcaagcgattctcctgcctcagcctcctgagtagctggcattacaggcatgcgccaccatgcctggctaattttgtatttttagtagagatggggtttctccatgttggtcaggctggtcttgaactcctgatctcaggtgatcggcccgccttggcctcccaaagtgctgggattacaggcatgagccactgcacccagcttaggtcctaaaattaatacataggaaatc

SEQ ID NO: 77090 - DNA, 1746 bp, Homo sapiens
taaaggcctatcttggccatgctataaatgagagttagttccgatgttttgagcatgtcatcccatcagattgaccagtcaaattgccactaagccatgttgcaagctgagaggtccaaaaccaaactggctatagtatttgagttgcctttttataaattaactttttagtttaggatagttttagatttgcagaaaagttgagaagatagtacagagagagctcgtgctctccccctattattaacattttaccttagtatggtacctttgtctcaaatagttaaccaatagtaatacattactgtaatagcatttgtacttcatttagatttccttagtttttaactaatatctttgttcttatatctaattttctaatatccaggatcttatccaggatactacattatatttagtccttgtgtttccttgggcacctgttggcaatgacggttttgagttgcatttttaccctaatagaactgtctcatttacagatagagtatactaactagagggtggtggagtaattgcttcatgtatagactcaatgcagtatatagcacagtgcctgttatataacaggtacttgggtttttgaatgattcattattagatcattagataccccaagaatggatggatagaccgggcacagtggctcatgtctgtaatcacaacgctttgggagactgaggcaggaggatcatttgagaccagtctaggcaacatagtgagaccccatctctgccaaaaaaaaaaaaaattagccaggcatggtggcacgcacctgtggtcctacctacttgggagactaaggtaggaggatcactgagcccaggaggtctaggctacagtgagccatgatcacaccactggactttagcctgggcaacagattgaggccctgtctttaaaaaaaaaaaaaaagaaaagaaaagaatggatagataatgctgtgttaatatgttaatatgactttgtaagtaagattattttaaagtggtaattaatcttatagtttcctgtattcctgagatcattgtttatttttcttattctctctacatttaccaaagaaatactcagcagatcattacacacctttcccttctgacctgggtttcctctcagagcaagtagccgctgcctgtggatttgaggatttccgagctgaagcagggatcctgaattactaccgcctggactccacactgggaatccacgtagacagatctgagctagatcactccaaacccttgctgtcattcaggtgagttagttccagggatttgggattactttttatcatttaattcttttttctaagacattttactctaaaataaatacaggtatttaactttaaaaaagtggttggactctataatcttccacttctgggaattttaataaattatagttagtatctctgtttaagacacatggagcctaccttttattttatttttattttttattattgtttttttttgaaacagagtctcgctctgtcacccaggctggaatacagtggcttgatctcagctcacttcaacctccgcctcccagtttcaagtgattctcctgccttagcctcctgagtagctggaactacaggtgcacaccgccacacccagctaattttttttttttttagtagagatggggtttcatcgtgttgcccaggctggtcatgaactcctgagctcaggcaatccgcccacttcggcctcccgaagt

SEQ ID NO: 77091 - DNA, 1124 bp, Homo sapiens
cagactcaggtgatcctcacacctcagcctcacagtaactagttactttctaaaagctccacagtttcagccaacccaacttagatacattaactgctccaaatgatgacagatttgttttaaaaatatttgtgatataattctgactttcagcaatacagactcagtaggaaactagatattttttgaggggaaatgccatgtgattttctttggattagacagcctgagtttgaatccttcctccggtaatgatagtgcctacctcataaggcagttgtgaaaattaagtgatcagtgcctgtaaagtgatctcaatggtgtctggctattctaagcagttaaatgcattatcacaataaatgttagcttttttttttttttttttttttggtgataatatttttactgttgatattgttattccccaagacctcaaagttaacctcattgactaagaaaaatagggagtaaaaatgaccaaaaactgaatgagtagtcagagaaaagtgaaagagaactttaaaagaaaaagtagtgagtaatgcagagacagtttggacagggttgaaagcccaaaagggtgattatttcattatagcagaggctatctacagctagaatgacagccttgactgtttgattatctgagggactaaagcttaaaatgatagaggaaaacttaaagttctttaatcacactttgagttttgagaaattgaataggaactcttctaatttacagttcagtaaaaggagaaaaaatgaaaaacagaaaagttccaactgaagagaccaggccattcatcaagagtcttccttacacctgaagttaaaggtcgcttctggccaaagtaaatacttgctgtccagacctatgactgctgcttcagctagaatatattcagacgctagtagagatatgagacaaaagtagattttctgatcagatttgaggttaatttagcaaagaaagaagtgagagcagaggagcatcaagacaaaagaagagtctgtcaggtacatatagcccaaatagccctcagattcatccatataggaacctgtaagtgaaagtcttaatcataactgcagccatgtcactcatgcagaaagatgttata

SEQ ID NO: 77092 - DNA, 1875 bp, Homo sapiens
agcattaccacctgagcttcgccccctgtcagatcagcagcagcattagattctcataggagcgcgaaccctgttgtgaactgtacatgcaagggatctaggttgcgcactccttattgagaatctaatgcctgttcatctgagatggaacagttttcatccccaaaccaccccccatccccactccatccatggacaaattctcttccatgaaactggtccccagtgccaaaaaggttgggaaccactaatgtagagcactagttctggagtcagactgactgtgttcagatcccagctccaccacttaatagctgtgtaaccttgagcaagttccttcacctttctgtgtctcataacagttctttccttattgaatagtatgaggattaaacaagataatacgtgagaagtcctttaaagtgcctgttaaaaccattttaccaactttgtgtcccgtttggtgttacgtggccttaattttgtagttttcagaaactgtcatgccgattctaacagagtaaagagaagattttcttaaggggaaaggaaaagtaaaattcagtggttttttttaaaccttggtctataggttatggtatcaacaggagcagtgaggaaaatcctgtccatgagcttttagtagtgtcttcttcgcaactgagagcaggggaaaggaagatcgtggttaagtaaaattagtccaagagaacctactgctattaaaccagcctgtgttttcaagtaattttttttccttctgatatatgactctgcagaaatcccagctgtcttttaagatagctcagatgaatctctgtaataaatcatcctgtaaacaatggtgagataccttttttttggtctaataaattagcagaaataaaaaatttgatggtcgtaccttatgttgtcaagggttggaagaaattgatatgctcaagacattgtactggcagcactgaaaatcgattaaggccaagttttcattgtatcactatgtgatacgtgcttcagtttcctcatgtaagaaatgaaggtattggactggataagccattcaaggtaattgaatcatgggcagtcagggtcatgtggacagtacctggcagctctcccaactttgccagagtctctcagaacaggagagagtctgttgagttcaaaacagttcccctggagattttgattaggtatcataacatcctctgacattgagaaccactgaagtaaaggacctctaagatccttttggttttaattttctagaattctatagtcagggaagaaaaaactttaaataggaaatgaagaagaaatacttgaacttaagcaaaaacaaaaattatttaaaaaaaaatacttgaacttaaggactgttcaaaaaattagagtacctcaattctgttcttttttttccaaagtgaatggcgtagctagagattgttgtaaaagtgtacaagagttatgtgcaggccgggcacggtggctcatgcctgtaatcccagcactttgggaggccgagttggacagatcatctgaggtcaggagttcgagaccagcctgaccaacatggtgaaaccccgtctctactaaaaatacaaaattagccgggcatggtggcgcatgcctataatcccagctactcaggaggcagaggccggagaatcacttgaacccgggaggcggaggttgcggtgagccgagatcacgccattgcactccagcctgggcaacaagagtgaaactccgtctcaaaaaaaaaaaagagttatgtgtaaacatcttcattgtgacattgtttgtaacagaaaaaaaaaatgcaaaacagcctaagagttcatcaacaggcgaccaggtaaatctaacgtgaca

SEQ ID NO: 77093 - DNA, 1501 bp, Homo sapiens
ttagctaaaattcattataagatttcgtgtaatcatgcctgtaataaatgaaatagggaggtaaagaagtctcggatgactctaagtgtcaagacctgataaaaattagaggtgtacttttaccacttccaattctaaagtttgctttgggataacagttgttgtggaatatttatttctcttgagaatacccagaaagccagacacatttgcataggggtagatgtctaatgttcatcaaaacctacctgttcattaacttgaagcatgaccaaaaaaatatggggagtaaataacaaaatagtgagtataaagatgtcaaaattatttgaataactgatggagaatttccccctcttctttttttcccacccatcttttgtatagggtttatttttatcccaaaccccttcctcccaggttaccagtggcactgggtgaaacagtgccttaagttatattcccagaaacctaatgtatgtaacctggacaaacacatgtctaaagaagagacccaagatctgtgggaacagagcaaagagttcctgaggtaagtcttgtcaatcagaatgaagtgttaatactcagctcagatcatcacaggtctttgaaggaactgttctataacaatgcagtaaaagtgactggctgggtttttttttcccttcattgtttccaagcaaaaacagcacaattgtattctttccccaggaacatttggacagatgctttgacagttatagtaaattgagatccattttaaagacttgcttatcatagcttagataattgagttcatcctcattaatcatcacatgatccatttccattagcttcagccatttttttctacttaaagtgagttcctttgaaggcttttggtatcctaggaaaggtaacatcgaaagctctttgcttctaccctcctagatggattcagtggtactagccgttttatgataggtcagttgttcctgatgagaataactaatattttcaccttcatgcttcaacattcattcattcattccacaaatacttaatgagggtcagtagtgtgtcaggcatgatgctaggcgttggacacagaaagataaaggcaccctccctgcactcagtagtgcatagtctctggcaagaatgcattacctatgagaataattactgtagagctcagaaagtgttatgatgcggtttagaaaaatactgtgggagcatagaggaggaaataattattccaggcagggtagaagtgtgaacgaagaaaaaatgattttttgtttgtttgttttttgttttttgagacagagtctcactctgtcacccaggctggagtgcagtggcgcgatctcagctcactgcaacctctgcctcctggattaaaacgattctcctgcctcagtctcctgagtagctgggattacaggcatccaccaccacgccccaccaatttttgtatttttagtagagatggggtttcgccatgttggccaggctggtc

SEQ ID NO: 77094 - DNA, 1440 bp, Homo sapiens
agtaaatagctttgtgactcaagatatttcagtacaccaagcacctttcatgattcagccccataagaagttggaaaggtatgatgtcataggaaaaagtagttttgaaagccaaaattagcctgcttaagttttcttattaccattttgccttaattttgggtgactctactgttactatatagatgagaaactgaggctctaagacattaaatgactcatctaaaatgcccagatcaagtaagcagtacagctaagattaaccccagagttaatactccttgctttggccaggcacagtggcatatacctctaatcccattgctttgggaggccaacacaggaggatcacttgagttcaggagcttgaggctgcagtgaactatgatcatgcctctgcactcgcctgagcaatagagcaaggttctgtatcttaaacaagaatcctagctttgcctcatacaagaaatgtgtttggaggtttgaggttcccggggttgacctgcaaaatagatttagtcctttaacttctgtttccttcctgccaggtgatcaaatctcagctaaatgtgtcttctgtcagtgagcagaatgcatatagagcaggtcttcagcccgtcagcaagtggcaagcctatggactcaaaggctatcctggtgagtgtaactgacctcagagaaggcaatatcactcaatcatttatgtcttcatgtcttcaaagaaggtactgtgtgtgagcaagtaaatagacaaaggatacacataataaacagataaatgtttcatttccaaacccattctagactgtaccttgtctaagacgtccgttttgaaaggatagaacaggagtcagcagtgcctgcaaatgtggctgaaagtggcatgaccattgaaaaaataaggacattgcctctgggctccctgccacaactctgaacatctgatttggcagaagtgctgtgaagaataatttatcattatcattgtaataaatgtcataatagttatgaataattcataattgtccctctagtcacattctcaaatggcataacaacttaaaacttgttgctatcaaggctgaacatatttaataaagaattacaattaatgacatcaaaagtcctcgccaggcgtggtggctcatgcctgtaatcccagaactttgagatgccaaggtgggtggatcacctgaggtcaggaggtcaagacgagcctggccaacatggtgaaatcccgtctctactaaaaatacaaaaattagctgggcatggtggtgcgtgcctgtaatcccagctacttgggaggctgagacaggagaatcgcttgaacccaggaggtggaggtttcagtgagccaagatcgcgccattgcactccagcctaggcaataagggggaaactctgtctcaaaaaaaaaaaaaaaaaaaaagctggacg

SEQ ID NO: 77095 - DNA, 1242 bp, Homo sapiens
caaaactgtagtccaatttatattttctttctttacaatccactttaacgttgaggatatgcagtcccttaatttgctcttggtgttgtccacagatgtctagatgaggcattctttccaagcttcctaacagctctgataaaattgggatgctacagtattaagtgttaatgattgcatacttgagctcagcttttcagcaccttcatttgttagggaaaaaaagtggtcttagagttgtcaaaatacagaaagtccacaccccaataataatatactttttctctccagagcgcttcagactctcattcagctccttttacctacattttaccataatatgtacatgctttttagaatgtcagccatcagggaatgagccattatgtgtctagtacaggacctaaaacagtactaagtacagtatgtgttgagtacatgaaagcttgggtgtttagttcctcagctcaaagcagattaaagtagtaattaagagaagttactattacaagccagctgatgagactggtggggaaagtggtggttaacagtctggcaagggaggaaagagaaaaccttttataaaagctcagtggtgtcgttcagtttagcatatgatagaataggtccactaacatcacctctgagagtgtgttgaattatagtgcagtattaagtatggcctattaaagaaatcatgacaaaatgcttaaaagtgttttaccagtgcctaggtacctggaaaactcagctgatagtactgtcagagggtttcatatagcccttttattatagagactggttatacatcagcaaacttttggtattttgtccaggaatctccacacttggagaagttgataagataaaagatcattctctttcaaagagaatgtttcatatatatatatatgtgtgtgtgtatatatgtgtgtgtatatataatatatatacttttttttactgagacagcgtctcactgtgtcacccaggctgaagtgcagtggcgtgatcttggctcactgcaacctccatctcctaggttcaaatgattcttctgcttcagcctcccaagtagctgggactacaggcacgcgccaccatgcctggctaatttttgtatttttagtagagacggggtttcgccatgttggccagtctggacccaaactcctgacctcaggtgatctacctgccttggcttcccaaagtgttggaattacaggtgtgagccaccgctcg

SEQ ID NO: 77096 - DNA, 1051 bp, Homo sapiens
tggtataaaacatatgtttaacattattttgttctccagtatcatattctgtgagaccttgatcttgccagttggtttgacttaaccattagagcccttcaaaatttagtctctgtggattgttggaaggattagtggacttttacttattcatttagccaatattgaggccctgctgtttattggtcactgtaaacatagtggtttatatgctgagggagcttacaattagtggtggggatgaagagacttagaacaaatataggcaattgttgaaccagtgaggttttggtgaactaggagaactaaatagatattataaaaagtaaatcagtgaagtacaagcactgtagttcagaagagaaacagatcgtgtagtttttagtctttaagattatatactctaaatctttgaagtctcacagggctggtacattgtcttgtactgtgataggagcccaataaagtaatactcagtggatgtacttggtttgggtcttgaaggatagttatagtgttacaagttagccagggggagataggattaccaacatatggaggggagagaacaacatatgcaaagagggtaacccgcaggacagataaagataattcaattagttgtactagagagtaactaggggctagcagtgggaaataaggcaggaagggtaggtgagggcaactcaacacattttactaaattgtgaaagaccagtaagttgggattttatttggaaatcttcagtataccgggaaacacactggattgtaatttgtctttttcttcattgtgatctgctcacagggatcatagtccacatagcacagtaactggtatgaaaacactcgatatttgctgaggatggagactgcagccaactcaacaacttctctgtccatctcaccaccaagtctggtacattatggctttatagtcagtaccatagctgcttcctaaatcttaagcctttaaggaaatgcaaagtagttcctgtccacaagaaatctggtgaccctgtctttctacagtctaagatagagaatccaa

SEQ ID NO: 77097 - DNA, 1054 bp, Homo sapiens
gatttagccttgggtaatcaggaagggtgtaaagcaaggttactgacacttataaatgtctgtgatccgatttttggctgggcatggtggcttatgcctgtaatttcactactttgggaggcccagatgggaagattgcttgagcccaggagtttgagaccggcctgggtaagatgggaagaccccatctctgcaaaaaatataaaaaatgaggcagacatggtggtatgtacctgtgatcccagctactgaagaggctgaggtgggaggattgcttgaacccaggaagttgaggctgcagtgagttgcgttcataccactgcaccccagcctgggtgacagagcaagaccctgcctaaaaataaaataaaattaaattaaaaagtccgatttttggcagatgaaaaagttggtagtttgatttggaactcatggaaactttctgaagttcatgattaatcttttcctatattttgaatttttaggacaaggagactggctttcacagaggtttgggttgggttcagttttcttcagaagaaggacttcggaatgcactacaacaggaaaatcatattatagatggagtaaaggtaaatttatttctatgccagatacatacatgatatacatgtaggtactatttaattatgtatcaattaaatagatcataaatgtggaatgatggggacttggagagatttgtaactgaagctgccttaatgcttgttaagaatggtggggtggaggctgggcacggtggctcacgcctgtaatcccagcactttgggaggccgaggcgggcggatcacaaggtcaggagatcgagaccatcctggctaacacggtgaaaccccgtctctactaaaaatacaaaaaattagcctggcaaggtggcgggcgcctgtagtcccagctactcgggaggctgaggcaggagaatggcgtgaaccccagggggtggagcctgcagtgagccgagattgcgccactgcactccagcctgggcgatagcgagactccatctcaaacaaacaaacaaacaaaacaacaa

SEQ ID NO: 77098 - DNA, 1040 bp, Homo sapiens
ggcgatcacctgaggtcaggggttcaggaccagcctggccaacatggtgaaactctgtctctactaaaaatacaaaaattagctgggtgtggtggcacatgcctgtaatcccagctacctgggaggcggaggcaggaggatcactggaactgggaggcggtggctgcagtgagccaagatcacaccactgcactccagcctgggtgacagagtgagactctgtctgaaaaaaaaaaaaaaaagaatccaaagttgttatgaagttcatgtgctaccagttttttaatgaagactttttaatttgcagttcagattgttgaaaatgtgagctgtacattagcaagggtttactgtaaacatgttatgattcagcttttgataaacaatgtttacacttttatttaatgtcatccatttttccacagggtatggacagtggatttgcaggtggagaagatgaaatttataatgtttatgatcaagcctggagaggtggtaaagatatggcccagagtatttataggcccagtaaaaatctggacaaggacatgtatggtgatgacctagaagccagaataaagaccaacaggtgccaagccatacaactcaatttcagtgtttacactggtgaaagcaaagtagttcatagttttttctccttttccttagatttgttcccgacaaggagttttctggttcagaccgtagacagagaggccgagaaggaccagtgcagtttgaggaagatccttttggtttggacaagtttttggaagaagccaaacagcatggtggctctaaaagaccctcagatagcagccgccccaaggaacacgagcatgaaggcaagaagaggaggaaggaataggcacaggtctctccaaagtgaatgaactcttacccataaccctaatgatgcaagtcatatgggggaacactttgtaaatggtcaggataaaaaccaaatctgggtgccagatcccagcactactttttattactggagaaatgggggggatagaaaattctactttgaatta

SEQ ID NO: 77099 - DNA, 1011 bp, Homo sapiens
gtacagaaatacagttagaaagagtaagttctaatgttcctagtacagtggggtgaatagttagtgataatttattgtatattgcaaaatagctagaagagaagaatagttaatgataatttattgtatattgcaaaatagctagaagatttagaatgttcccaacacaaacaaatgtttgaggtgatggatatcctaattaccctgatttgattattacacattttgttcatgtatcaaatatatataccccataaatatgtataatgattatatatcaaaaataaattttaaaagcaattaacattgataaatttgctttatcacatatttgcccatctttctgtccatctgtctgtccgatttactgcattgcatttcaaagtaagttgaagacagcaatacattttacccttaaatattttagccgcatgcttgattctagaattcacattcaaaaattaaactaatatcatttattagacttaaattaattgcaagtaaggtttaaaaggctgagtgtgactacaaagaagtttggaattttctaaggttaaaaaatattctcttgttcagaatattggctgggtgcggcagatcacttgaggtcaggagtttgagactagcttggtgaaactccatctctactaaaaataaaaaattagcccggcatggtggtgcacacctgtaatcccagctacttgggaggctgaggcaggagaatcgcttgaacccgggaggcagaggttgcggtgagctgagatcgcgccactgcattccagcctgggcagcaagagcgaaactccgtctcaaaacaaacaaaatactaatggggctgagtgcagtggctcacacctgtgactccagcactttgggaggcctaggtgggaagatcactagagcctggagtttgagaccagcctcgacaacataagtgggaccccatctttacaaaaaatttaaaaattagccaggcatggtggcacacatctgtggtcccaggtactcggg

SEQ ID NO: 77100 - DNA, 1033 bp, Homo sapiens
ctgggttcaagcgattctcttgtctcagcctcctgagtagctgggtttacaggcgtgtaccacaatgcccagctaagtttttgtatttttagtagagacagggtttcaccatgttagccaggatggtctcgatctcctgacgtcaggcgatctgcccaccttggcctcccaaagtgctgggattacaggcatgagccactgcacccgacctaaagctgctttttaaagtggaaaaaagtatattactctgcaaaatgacaataatgttgtggaggtggggtgagtaacagtttcaaagttggccatgttttattcattgtcaaagtggagtggtaaatgtatatcattatacagtctctgtttttgtctatgtttgaaacttttatgcaagaaaaaggaggagagacttgatatgatgactaaaagggaggaaactatatcactctctggttgtgtttttatacttcaggattaataagaaaattccccggggaccaccttctcctcctgcgcctgtcatgcattctcctagccgaaaggtattctttgctgtagtccaaaatatttttttctactcatggttattaattttatagataacctccctatgcctatacaggtgcatgtcaccacactgacttgtagtttctttttttatttttcaagatgaagtttcaagaatgcttatgagaatgtatataacatgttagctgtaagttttgttattagtaatgcaaaccctacttttaatggaatggacagggtctgctgtttcagtttaaggatgttataggaagtgaatatatgggttcattaggtccctggtaatttgactttttaagatatgttttgttaatcaaaagaacaatttttcatccaaaagaagtcacatcggccgggcgtggtggctcacgcctgtaatcccagcactttgggaggccgaggcgggcagatcacctgaagtcgggagttcaagaccggcctgaccaacatggagaaaccccgtctttactttaaaaaaaattagctgggc

SEQ ID NO: 77101 - DNA, 1057 bp, Homo sapiens
tccatcctcctcaggtcccaaagtgctgggattataggcgtgagccactgtgcccagcctatgctattttctttttttttttttttttttgagatggagtctcactctgtcacccaggctggaatgcagtggcacaatcttggctcactgcaacctctgcctcctgggttcaagcgattctcctgcctcaacctcctgagtagctgggattacaggcttgcaccaccatgctcagctaatttttgtatttttagtagagacagggtttcaccacgttggccaaggctggtctcaaactcctgacctcagatgatctgcccacctcggcctcccaatgtgctgggattacaggcatgagccacccggcctggccctatgctattttcaaattatattttttgtttttagaaattaacagttacttgtggtatatgacctaaatcacaattattatttatagttttccatttataagtaatagatatctttataatacttctaaattttgaggcgttttacttgactaaatctgcatagagaattgaatcacatacagatattgaggaaaaattcagagctggtagggctgctgtcattattcttttctctgttttataacctatgattaatcaaaaactgctaaccgtaagttgcctgctgggattattatgagtgttttttcctcagatgcaggcatactaaataggtactattttctagactgcttatctgtgaaactgaacacggcaccttccatgttggaaaacatatgaggatgggttatttgcaaactaataccactcaagtttatattttgactgtaactcataatttatgttcttttatccctcttgctgtctgctttgtctaaatattttgttaattttctgttaatactttgcgaaaggaattgaaaatgtagtctagcttaagattgtaatagaaggaaaatacctactgaaagcttgaactaattacacctttagtttttatctgctttcttcagatacacaccatctcagcaaggagtggcattcaactctggagctaaacagag

SEQ ID NO: 77102 - DNA, 1036 bp, Homo sapiens
ggagggaggctgaggcaggagaatggttttaacccgggaggcggaggttgctatgagctgagatcacgccattgcactccagcttgggcaacaagagcaagacttcgtctcaaaaaaaaaaaaatggggggttttataattaattactatggaggaatcttgctcttcagatgtccttcactcagccttgtgagatactagaatcttattgatgctcatttgaagggttattaactttggaatgcccaaataaggagcagcaaatgactcttgtatgctaaattagtattgacactttatgttgaacatacatgactaccagggagccatttacttagaatcctttccttataaccgttgctatggagaagtgataaactcctcatgattaactcttcatagaattggtatttttttcttgtgttgttatataattttcagcttagggttgtataggtttttccatgctgagaggaaataagacttttgaggtcagatagtagctgtatgatcttaatgtactgaacctcactcttttcagtagagtgagctttatggtcccttccaaaatcaacactcttagagtatggtgacactaataactcacatatcagtagtacgtgttttgtgctaaatcatcttaggctttcttacctgatccctcttctcactcctgagaaaaacaagctggagattttagtgtatagccatgagatagttttttctgggaaatcagtagcttatagaaagttctgtacggcctaaaatataaacttatttatttattcattcatccatccattctttaaaatagagataggtcttgccatgttgccctggctggtctcgaattcctgggctcaagctatcctccaaccttggccttccaaaatgctgtgattacaggcgtgagtcactgttcatggcctataaacacctttagcatgtaacagaatatctctaaaattcatttatttattcatttgtacaaaaaatattgatcaaatatctccagtcattattataaagcacagga

SEQ ID NO: 77103 - DNA, 1366 bp, Homo sapiens
ctctgattatgaatgtcagtgtgatagaaattctggttatgtgctctcaagatgtatatttccctcagaagatgtatcattttctttttgcttattatctatcactgctttgtggtcactagagaactgtaccatttgtctattcctatatcaaactattaaatatttacaagaaaactaatattttataaattcaggaattacggaaaataatgggaaagtaaaagataagagagatgaaagtggttttcatatttgggctcctcctcctcctcctcccctccgataataccacataaccctgaagagacaactttccttcagggaaaactccagtagcacttcctttgctgatttctttctcttcacctgttttcttacctttaatttgagaatgttaatatatatctgatatatagattaaatatatttttgcgggtataagacaaaatttggttgatttgaaggcaatgagggagaaggaaccatctggaatagctctttctatctctagcttgttgccaaataacaagcttccggtcgggcgcagtggctcacacctgtaatcccagcactttgggaggccaaggcgggcagatcacctgaggccaggagttcgagaccagcctgaccaacatggagcaaccctgtctctactaaaaatacaaaattagccaggtgtggtggcgcatgcctgtaatcccagctactccggaggctgaggcgggagaattgcttgaacctgggaggcagaggttgtggtgagccaagatcgcaccattgcactccagcctgggcaacaacagcaaaactccatctcaaaaaaaataaaaaataaaaataaaaagaacaagcttccttggcagcacctattctaattactcaggatcctttacattaattaattaatttttattttttttatttttgggatggaatctcgctccgtttcccaggctggagtgcagtggtgcgatcttggctcactgcagccttcgcctcctgggttcaagcgattctcctgcctcagcctcccaagtagccaggattacaggcacgtgccaccacatccagctaattttttgtatttttagtacagacagggtttcaccatgtttgctaggctggtcttgaactcctgacttcaggtgatccacctgcctcggcctcctaaagtgctgggattacaggtgtgagccaccgcgcctgccccacactctttattagagtttataagaggaacacccaactagatcatatcttgtcctatgtattccaaaaaacccacatgtaggtctttttgttgcttttttgtcagctttcctctggtccttatgaatgctggtgtgtgaaggccagtcatatt

SEQ ID NO: 77104 - DNA, 1057 bp, Homo sapiens
tgtgtacacagaagaaaatctgtctttggcaacagggaagataggggtgcaaggtatacagacataaaacaattacagaacacaaaatgtgcatttgtgtaatactaaccttagtgcaaaaagaattgaatggaataagttatgtgggctggagagttttctccccaccctcgtttctaaaatttttttgcttttttttttaactttattttttgagatgcggtctcgctgtgttggccaggttggtcttgaattcttggcctcaagcagtcctcctgtctcggcctccgaaagtgctaggattacaggcatgagccaccatgcccggcatctgaaatttttttaaaaaaaaactagaaatagggtgttactgcgttggccagagtggtctccaactcttggcctccatcaatcttctcacctaggcctcccaaagtgctgggattgcaggcatgagctaccatgcccagccaagagtttgtttagtaaatgttacaggcagcaaacatttgagtgctccccaggtgtgagacactgtgtcatagactagtaaagttatgaggggagactttgtggaaaaggtggaatttgaaatggacacacaggaaaaatttctagagatgtcatgggtattttttatttattttattttttgatatagggtctcactcttgcccaggctggagtgcagtggcccaatcacagcccactgcagcctcaacctcccaaggctcaggtgatcctcctgcctcagcgccctagagtagctgggactctagacgcttgccatgatgcccagttaatttttgttttttttagtagagatggggttttgccatgttgcccagcctggtcttgaactgggcttaactgatctgatctacccatctcagcctcccacagtgctggcattactggcgtgagccaccacatcatctggcctgtcatgggtattgcgtgcttaaaattgcagtggcagaatgcgatctttaaatggccagtcttgaggactccagagctttccatacctaccatctggtgttcctcagtattcttt

SEQ ID NO: 77105 - DNA, 1138 bp, Homo sapiens
gctgttgaccaccctgggtgcctcagcccttgactccatgttggaggacgtggtattggagttaggagttctctgatgctccgcagtctctgatggccagtgattctgtgcttcagcaccttttccttcattccttctctctcctgctggtctacgcggttggcatttagtgaaaaaggacagtgccggacatttgggtgtagccagggatgggtacgacctcattccagtcctcacagtccagggtcatgggaggttcactcatcatggtaatacatggccacatagtgcccaacgagcttgcagaggagagagaggttgccttgggcagatggaggctttctgaagcaggtggcctctgacccagccccttagagatggatggaattggaggaggtggatgttggaggaagtgattactgattaataagctgggttcagcagaggtgcagggacaggaaagcataaagcatggaggtgaacagtgaggtcttgttgattacaatgtggcgttcagccggtgaatagtggagcagaggttgtaggattggggctgaggtcacattatgaagggcctagaatgttcttttcagaatgtgagtctgagggagaggaggacttggggagggacctgatcaaaagaaggacgaagagactgagatatacggagtggggtggggcatgtggtcgggtggttgaaggaatttgcctaataggctgaatatttagtaatgtgggagatgaggtcatctttgaaaagtggaggaagatatagatggggaggtttgaagtgggtgggaagcttggggatagagttatcgtggaaattaagggatgatctttgaattgtcagccacactatgctgttatctttggtcatgcacacacatacacacacgcacacacacacacacacatctatacctgcccccatgacatacagacaagtcagatcttgttacagcctatttcaagaaatggtccaagccgtgcgtggtggctcatgcctgtaatcccagcactttgggaggctgaggtgggtggatcacttgaggtcaagagttcgagaccagcctggccaacatggggaaaccctgtctctactaaaaatagaaaaattagctgggtgtggtggtgg

SEQ ID NO: 77106 - DNA, 1073 bp, Homo sapiens
aaaattaggctttgagggtgatagtgggtatgtattttttctaagttaaaaatgataggccaggcgcggtggctcacgcctgtaatcccagcactttgggaggccgaggagggcagatcaagaggtcagggagatcgagaccatcctggctaacacggtgaaaccctgtctctactaaaaatacaaaaaattagccaggcgtggtggcaggcacctgtagtcccagctactcgggaggctgaggcaggagaatggcatgaacctgggaggcggagcttgcagtgagccgagatcgggccactgcattccagcctgggcgacagagtgagactctgtctcaaaaaaaaaaaaaaaaaaaaaagaaaaaaaagttaagctactgcatgaaaaacaaactgtggtgtgcgtcttatagtgtgtaaagtgctttctcatatgtgatcctattttgacattgaatctcaaggttgctctgtgagcaagtagagcaggtggggttagtcccacgtagccgctaagggaacttggacccagactgagaagagaggtgccttatccccagatctcccatgcccagagtgacagaaccatgccattggcagggactccccctcctgtctctgtctatgctggtgaaatctggttaaaacaaacattaggaacagtcccaaatggaaagatagagttggaggcaggtggattgggggtgttgagatggagcgggccactctggtggctcttctcatgtggatatgagcagcaattggcagcccccacccttcccaaccccaccagcagcagctcactcctcagaggcaagggctcccaatcctgagcccccagacccttaggggccatctttcaatgtagtaatagggggcccagagcgattagcaatatttcagaaagcttaagggagatcatacatctccccatgacaggcctgcccagactaaatgaaatgtcatttctctcattttttggctggaattctgtcagctcagtctggctgcactgcttatcttgggctgatcaggagccctgattggaccttatatgtgtccttgacaaat

SEQ ID NO: 77107 - DNA, 1120 bp, Homo sapiens
ctttttccaggcacaagaagaagaatacctgttcattcttcagaaggacccagatctctttcagcgaggccttcaacttatggcagatcaacctccatgagctcatcctgcgtgtgaaggggttgaagctggctgaccgggtcttggccctaatatgctggctgttccctgctccactctgagtggaattgctctccctgccccattctggtgtctttccactcctcagcccctcatcttgcctccacccagctgctccatttttgccacatcgtggcccgcagccccagagtcactgtccatgtcaccatccttctcctcctttggaatcctctccgcacactgtggcccttgtctcagggcccacaagctgaactgtggcatagctctctcttcttctccaagaagactcagcagcctacattcccattcctggtatgtgccattgggttggatgtccccactacttccgttaacccttcccattgtcaagatgtgccacgggtgccactgggggcacactgaacttgtagggagtgtgattttgttggaggtgcacatggtctctgaatttgacagagaacaccttccctttccttgccatgtcaccctccagaggaagtcacacctcagcgaggtggtttggcatctggggccaactccattacagctatgagctcactgctgtcagtgacgtttggtgttttctgtactgtgtttcaataaaaactccttcaaggttgcaggatttgtccatcataactcactggcctcccacctgaccccaggcacgtgcccttccagaatgtgctcatggtcctcgccaagggcttatggttcctcttggttgctgcttcctcagggtttcccagggagatctagggaacagaaggccaggggctgtttggtgggattttccttataggttgggagttcacctacaatgcccattaggtcagagtggacctgaatcgagtattggtgtgatcttctgcttggcttcttgctcctgtaatccttccaacctgtggggccacttccactatggggccacttcctgcttcttgggggtttctcttaccttccaagactcagactctggttggaggagttaagaagc

SEQ ID NO: 77108 - DNA, 1062 bp, Homo sapiens
gaaatgatgccacaaatggaaaattccacacctagcctcatgtaataggttgcagtcaaaacacaggggcacagcaagcacgcagcgtatttaacattcgtaagggttaaaaagaccctcccagtttccttcagctgcgctatatcttttctgcgcatgcccagattccccaggcaagcatgcctacaaagggtaaaaaaatggcacttgtgcaggctgaatcgccaatcaacagcaggttttccacgacatcctatatgcattactcactgtggtttttttttgtttgtttgttttttgtttttgcttattctctgctctgtaatataaagatgttgttgaaaatgcaaatacttgaaaatcagaaaaattccgaaatccgaaacacttctggtcccaggcattttggataagggatactcaaccggtacttatatttccagttccagcaggatctgccccggagtagatgttcagtgcatgttttagaggagagataaaagacagataagtgtgtggctatatggctctggagacatttttaggctcagaaacggaaaagcagtttttgatatcctacttagcatagccagttttaaaagaaaactcaaatcacaacttttgctaaacatttttgtaagacatgcagcagtttatctcatttttcagaaagatgatggcatgaaacattgcagagagaacagggcttgttttgtgtgattggaagctgcattttctgaattagtattatagtcagtcgatgagatggcaccaactgttaaatggttgttaaagtagaaaagaggtataaagactatgctgtcagcctgttttctcatatgctatggagtaggcactgtggtgctttctggcaatggcaaccaatgtccttatcaggcaatgaggtgaggagggagagatctctgttggagggacagcttcatacataattaggggcaattattaatgagactttaaattccaggacttatttgaacccattagaatttcaaaagcaccaatttagcatatctcacaattttacatgttcattttggtagg

SEQ ID NO: 77109 - DNA, 1058 bp, Homo sapiens
gtttgtgcaagtctacagctgaaggcctgagtgtgtgttggccgtcatatttgtggattgtatctgtcatcatcacatgcttccccaggactatccactggatggttaatgtggaacaaaatccttgagattgtaatgttgctcccttaaattctaagttggctttgcaatgtgggtttttagggaaggtggagagactcataatgataaataacatcagttgttccctgattgttgacttttcaatgtcatcctcagtaagttgtgcttcaccccctataggatatggcaggtcagtctttgctgagctttctcgacctgccaatatttggctaatgtacaagccgattgtggtttggttgcctattcatcccaccagtgatcctttattttaagatatttggcttgagaaacttgcttagctcacaggccaatttcttgtcatttagcgatttattttcttacttgggctaagcgtctgctataaaaatcacttagaattgtgtacttctgtccctctttgtttctttacctttactatttcctctctctccacattgcctttgcaattcacaaccctttctactaaagtgatgtttggcacattttgaagtttaggtcataaagtttgagcttcccaaggttcggctttttcagctgatatgtctggtgatgcagtgttgctgaagcagtggataatgtgcttttcatgtgtcttgtcgctcatattaacaaagcttcctaggccctatgctatagttagatggtgccagttttttagtatagataccataatgcaacttgatgcttgtcagcctgataagagtgctattgattctaagcttctggtgcatgcacaatgaaagaaactgtatgcctttggacttcatgttactgatgacattataactaagaaagtgcatactacactgcatggttctggacaacacaagcattggaatagtcaagaaccgtatgcttctttgtctctatagcagtacatcagtagtagctgatataacatcagtgacttttgttttgaagttatccaacgtact

SEQ ID NO: 77110 - DNA, 1035 bp, Homo sapiens
gtgcaagtgtgtgtgcgtgtgcacgtgcacaccggtgtggtttatatcattgtatcctgacgaagcacacattttttactctcaggtattcttcaaataaaataaaaagtttaattctcgtgttttttttaaatgtcataaattgagtgtatttattcttagcttggaggtctgttagtccatgtgaagtttaattatagaaaactcgatcaaataccatgatacattaactaccttctgcaaaattaattttttaggccagttttatattcacctaggtttatttttctttttcttcttaccttgccagcatttaccaaaagaactgttgctccagattcagcttcaaacaaggaagatgccacaatgaatggaacaagttcacaacccaaaaaagaggaatatgggagctaaaaaagcaaatgtaatttgttattttacatgagtatgttacaaataataacatctctattcttacagcaatttggcccagattatctaacagacatacctgcagctttggctctttggtattgccaaacattgacaaaagtgacaatactgttggtccttgtgaatggtaaaccaatccaaataatatcagatcatgaatgatgtgcagctaatttatttgcaacttatactagcacagaaagaatgatattttttcactttgtattttcctttttcaagtgtggtcagtcacattttcccaaccaaaatttggatttctaattgaggccttttaaaaattactggctaaaaagaaggaaaatgagtttcccttgaggcaaaagttgccagcactttagattcagggagcatttatatacaactgattttttgaaaaattttctccctaataaattatcatgtgttataacatgtggagatgtgcatatataacattagacagtccactttataaatgctcaggacttttatatctatcatcttaacagtccacaactgcataccgtagctgaaaattatttccaatcatccatttttaatagcaataaagaattcataaat

SEQ ID NO: 77111 - DNA, 1185 bp, Homo sapiens
cacaggtgggtgtaacagtgatcagctaattaaagactgtgtaataagttattgacttatgatcaacaggaccttgtgtccctgaagcaaatgtttaatttcagatatttctcccaaatcttgagaaccactcctctttcccttttaactgaaataattgctgagaactcttttcttctttataatggcaacatttaagaatctctaatatactccatagataagtaactgcagattcatctgtttctcagtattacctcatagtctatttctgatgttcactgaagcaggtttgtaaattaatattaatatgaaatagtctatagaaagtttcatagcatatcagttgaaagcaattatccaggaagaatttttgtatctgagtcagtcttgcaaatgcatctcatatactttttaaaaggaaataattcttctattttcaaaagatacatttatcttgaaaatactattatatatgttcttatttgactgtctaaatctacagtttgaactgcttcttacagtggtgcatctgatttttagtatgtggattctgagagtattaatcaattttttataatgtttggtttccttatgttttctatttcagagtacccaagtggccttggaccatctggagtctgtgcctgagaaactgagcctactagaagatttcaaagacttcagagtgagaaagagttggcttgtctctttcagtattttatctgagtgagaacacttgacatcttcctgatgtgcaaagaaaagtatagaaaaggaagaaggaccaaaaaacattgggaacttttaacataccaccttatcagggtttattgacatttgtgaagttagaattgaaaacaatgcaacttatgtattagcacaagataggaagatatagactttcactgtactactagaagctcagttgggcccctaaaactttaatgataatttagaaaagcctaagaattaaagggagttacacattacactgacaatagataacttttttggttagcaattttaatttgtgaattatttgggtactgtttgttttagagatatggtagttcccaagttatctttacactatgacatatgaactcaaatccacgtaaatttcacatttcatatttcatggccatttattgatagacctctaaccacaaagcatttcattat

SEQ ID NO: 77112 - DNA, 1071 bp, Homo sapiens
ttacctgtcaccatagcaaaaattgctaaacacagtatcttctaggaaaccttggcttatactgtttgttcatattttaacatgcaatcacttaaaaagaattgtttttttgcaaacgctctgaaatttctttcccttgtgagtacattttatgttcagttttaagaaatgaagtgattacaattaagtagattgtagatctcaagaccctccttcttgtaaaacagttgtaagtgcctagtttattgttcagcacacagagaacattaaactagtcctcatttgtctttgtgtgttattttttctttatatcagggagtggcaagaatgatatgaaagaagacaatttcaagaatcctctgggaaagagatgattcttttatttcctctgtcttcccttctccatcaaatcattcttggtgttttcgtattgaaaggaaaaaaagaaaacccaaatcactcatttggagaaaatactacatctttttaagctaatagtaagataatgggttgactgtaacataattcacttacatgtagaaataagaaagcagtaatttgaaatggcagattctgtatttcatatagttcctctcttaaaaaaaaatactgtgaataggagttggaaaatacctagaaagccttctgtatctcagttttcagtgaagatatgttacctgttctcaaattttatcattgctttttaaaggagatctaccacttttgactacaatagtgttatatgaagacaaatagaatttgttgttgacaaaaactcttttagatgttagcccaaatgtagacactgatgtcatagtgccatgttaacttaacaagcatttttacttaacaagccttatgtaccctcttaccccaatacacatgtaaacacttctaagtgggcatctgattttttagaccgctcataaaatacagtctagaaatagaggactcctctgatatcccaagaaatacacacaactttgaacactggggctcataaagaatgtgcatcaacaccgtgacttcggtggcctattctctgctactgtttggtgtggttccagtgag

SEQ ID NO: 77113 - DNA, 1013 bp, Homo sapiens
agctggatttttgaaggttttaagatatacctgatagtctctgcttccgtctgctttggcagcagtcgtcagggaaacactttgctacaagagccagaagagtgtttctaagtgttcaaaaaaggattaattatgaaagtaaactttaaaaatataggcatagttgatctcacttatttttgaaataaatctcaatgccacaatggtaaaaataaaataccttgccggatttctgtttagatctgatctgcctgtcacaagaaattcatccatataggaggattagctgttcacatggtctttcaacatccaagtgctgtgtgtggagtaatggaaaatgattaatttattttgtcattctctttgagaacacaggacatctctaaaaaagaaaatagccctttattttgaggacagagaagattaattatgtttacctcaccaaggcgcttttaaataaatcaacctagaccctaccttagccagaacaatgatcattcctaatcagagctctctatcaggaccctctgctccaggttaaatatggaagagacaaatgtgattacctacttgagggtgtcttgaggacttggggccagggctttgcaggattcagggaaatgattagcatttctcagtatctgccctgtgttgggtgtccccatcattgtccagcagggccaagctcctatagactcatccataggaaacatgttgctcttcagagcactcactcctatgccatgtcattaggtccacagaagacttggttctcatcttcctctctttaactcggtctatactgtctatctgaactttaccatcccctcattcttctttcagttctgttttttgtttttattatttctttaattttgagtctgttgagaaatattctctgtccctcaaagatagtcgatttttaaattctgcatttaaaatataatcttgcagtatttttcttgccacaatatttctaagttctaaatgtatctttatgtatgtttatgata

SEQ ID NO: 77114 - DNA, 1691 bp, Homo sapiens
aacatcaaacagtaaaaggccaaactgtcaaaatagcctgtccattgttattctctttaggctcacttcttaattattttgctagctggtcttccataaatgattttctggagcttttgtgatgtttttctctcctagcatctcactgctacctatgctttctatcacagcagaggccttgacatggttggttgattgctatcaggcattaactatatagtggctttagaaagccactgaaacatagatagactcgctgacttaaagtatgtggattctatgaagtactccctttacatcttcttttccaagaacttctgattttcattttatccctttcatttctaactcaaacctcatttttctgtgaaatacttcaaagctcctacttctacattagtttttgcttgaagaagagtacgtttgttccagaagtgtaggaattaagtgacagggtaaggtaaaagcctgatactctccaactctgttggatgggagttagaagacctgattgtgaattctggctttttcacatgggcgactcacttaacctctccaagcctgtttcctatcatctaggaaatgggactaattcttatcctgcatgtgtcacagttttgctcagaaggtcaaatgagacaatggatgggaaagtccttttctaaattttaaaaataatcatccccgatgtatgcattacctttaccagccacaacagcagtgtgtggactggaaaggtttggcccattaatcaggacatttgcattctgtcctagtattgccactctggttatgtgccttagcactctgtgttatgttaattttacctccaaaattcagctcagttattttacatgtaggctctaagaaatttagatttagagttcttatttaataaccccagtaattttagttcaacacaccctcacccccagattcagttgacccggggtaggacccagtattttttaaagcttgccagatgattgtaatgtacaactatggttgagaatcactgatttatgccatcttcaacatgtccttcaagaattgcctttagtgtgtcccctaaaacctggtgttactctgctttcctggattttgtcctactcattaacacagacttaatttcatgtcttttctgctgatagcatcatgtcttctctccccagtattttttctttttaatctattgaaacaacagttgtaagattctttctcacacattattttccataactgtccaaggatcaagggagcttcattttagccttttgttaacattaaaatttgtcagatctaacttcaaggaccagtttgctcagtcatgaactcgccaaatgaccaattctcttattttaacaaattacaacaaattgactgatttacaaaaccattatctttggaaactatataaacagttaaaaacaaattagtggttattgtttatttttatggtaaatcagtgtaattgctggtatattgattaagattatgtaaactggctctctcatcttccttttctaatttttcctcttactactcttgtgttaatcctttgttgcatcacactcattgcctttcattcatttctccattcagcatgtgataaccaactactccatgcaatggattcagtaggaagcatggttccttcttataggcactgcactggagggtggcatgggaca

SEQ ID NO: 77115 - DNA, 1033 bp, Homo sapiens
tcatactgcctttctaacttccttggttgataatgtgttttataggcctgttctaaacaatattaagaacagcacattctctgggtaaaagctcttgctttatattgtgaagataatatgaatgtatattgtaaagcacaatggcagtatctttctgtaaaatacaacacatgtaagaaatgctttctgctctctttaagagagcctatctgggtgaaagctcagagtaatgatagtatatttgatatctttttaagatcctaacttaaccataaaataagatattcgtattacactcacaatatatagtggggggaatagtatattttatacacattttaaagtctttaatgaaaaactaatatggagaattttcattttgtgcatctagttttaacaaattaccttcaatctttagctgaaaattattatatgaatagttttaaatgatggaaagtgatatgagaaaaaatagtatctgattaatagtcagaaaatctagattctggtcatgtctccaccatagccaggcacatgaccctggccaaattatttaacctctctgaatttcaattattattatttttttttcatgattgggctggactagatcatctttaaaagttcctctcccagctgggcgcagtggctcacacctgtaatcccagcactttgggaggccgaggagggtggatcacctgaggtcaggagttcgagactagcctggctaacatggtgaaaccccgtttctactaaaaatacaaaaaattagctgggcgtggtggcgcttgcctgtaattccagctacttgggaggctgaggcaggagaattgcttgaacccgagaggcggaggttgcagtgagctgagatcgtgccattgcactccagcttgggcaaaaagagcgaagctccgtctcaaaaaaaaaaaaaaaaaattcctctcccttgtaggcttttgtctaatataggaggaattaaaaatctggggtgttcacaaaatttctatgttgccagtagttactatcaaacaac

SEQ ID NO: 77116 - DNA, 1087 bp, Homo sapiens
tgatttcatatgacattttaagggacagattttaatgaacttggtagactcttcaactgataaagtactttatagttcataaaatcaaatatgctgaaagctatctcaagatcatttattattctctcccaagtcagtgcttaaaacttagaaaaatgttgttggtccatatttggttgagttgttattaacagtacagaaggtgttgcatgtagagcatatatcatggtgctatcaatatgcaaatgtttgaaatttcaccattccattaggagtatttacagtagattgattttagcagtgcagtagttataatacctgaaaagaagatcaccttttcatcataataagaaacttggtttagcttgccaccaattatctatctgcttaggtcacagtcacatgcccatttttccccgtcttcctcaacttttccctctctttctttaatagcaggtaagctccttggattagaaactgcattttatttgcaaatgcgttgccagggtctgtcagaaatgtttgatatatagtagacaatcaataaacatttgtagaatgaaagaatgactgttaaactgcatgtatctcaacctcacataagactgtgctcaggaataaatagcattagtccagtagttgtgagaaattccccagaagcacggcaatgtattctttatttcctagaattcctggtcagtgctatatgctatttggtgtttcacagaagctctaaccatcttcactaaatgttaatgtaaattttcctgggatggaaccaccttcagccaaaatagaatgggttgattccctaaataaagctaagtgattacatgggaaaaaactttgattgagagcccctgctcatgggccaaggatgggactcagcagtggaaatttattgggctcaatatgaggcattgtgttgacaccaaggaagaaaaaaggaaagtaaattgtgatcaatgccttcaaggaatttgtactctatttgagtaaagaagacacattcatttaaatgaattaaatgatgaaagataaaaaccaaaaaaatacagtccatgaatgaaaaagataatgcattttc

SEQ ID NO: 77117 - DNA, 1041 bp, Homo sapiens
ggaaaataaggaaaagaaagctcatagctttgcttcgtgatttgaaatttaaagggtagtctcagaatttttggtgtcagtttcatatagctacctagaagtatgtatagggattttaaataaaaccctaccttgccgctcaggctgcattttccagtctgaaatctgtcccaacaaaccaatagacccccatttctgtatctttctcttcatcttctttgttttccccacttgtattcttcaccccacaaacccgtacacataccccacttcaatataaatacaaccgcagcctttcctgaacaatgtcaaaactgaagtataatggtcaataatctcctcataataaaaccacaaactaaaacacccaccagagaacacagcagaagaaagctacagaagaacaactggctgccctcaggtctctgtcaaggcaatagtagtaaatgacagaacatattggaaatgtggatcaaccaccttgagtctgtttttaaatcctgtgattgtttctgcttctggttctatcagagatttgccacacccaggttgaaaatcaggcaacaaggaccattattgggcttccctgtaggctagaacatgacatatcactttaaattggcttttcttcctaagtcaaaatgttggtttttttttttttccttgacaacttttcagacaaaatctttaagcctcgctgttttttttttcttcaatatgtgtgttgtgttattttagacgctgaagtaggttgtttgaaaaggcacataagcagccagtgaaatgaatgaacagaaattgactacaggtatctaatgatggttacagtgaacacaggatgattgggaaaccagtgcaagctgctccaatgccacccatcctggagtatttgatgtatagacaaacttctttcactgacttttaatagatagcatacaattttatatataaatcacagatgcatttggtatattcaaagccaacttatgctacattttaaagctttttttgatgttgctacactgagatagtgatttttgt

SEQ ID NO: 77118 - DNA, 1037 bp, Homo sapiens
ctctcaatacccagtagatggctaatcctcctggtaaggaaaccgtgtgagaaactgggctattgatcgaccaggtggataatttctgtggttttgctgtcagtcttttctgccgaactgtagcatgcccataaccagtacttttagagattgcaggtagaaatgcagggtggggcagccacgagtccattttagagttccctcggaattgctttagaaggatgagggtgacagggaatgctctgctctctcactggatctcagaaagaactgaagcaattcatttccccagaaattcccattttcttgggagatactaaagtacatttttagaaatctcaatttgaataaattgataaattaggattaactgtttaaggtttcattaaactagaaagtaatacagtccctactcatccctaagatgactcgtgagagttataacagaatttttattattctggaaaccaaaatgtaatgcatacccacgtattcttctcaaggtgcattcctcaaagcttaggcaaataactgcgtatctctatgtcttcttctgaaatgtgatttaaaaataattgttctaagcaatggcataaacaaaacaaaatacagtgttgtggggatggaaggttgggcgaccctttgccactttcaggcagaggtaacttaacagctcattaaaatctctattttctcgaaaggtgaacaggcttaccaaccttaaatttggtacaaagttacaccagaaagaacgcattagcagtctgccttggggtcaaacaggttctcagccaattaggtttacacccttcaatttactacatcaagagacctcatgagagcagggacccactctcagtaaaaaggattccactgaaattgtagtgctcattaaaccttgtcactctgttttacctgaaatttgcaacttaatattaatcccaaatttatgacagtataaaacttgaaaatagaataccctacgaaagaagtattcttgtgtctgaatatatcgaagttgattgactaggtcattt

SEQ ID NO: 77119 - DNA, 1046 bp, Homo sapiens
ataataagatcatagcacagggtggtatagctgcaggcagaaaatatgttttcttaatagcaagttcataaattaatgtagggcactgagacaccatggctgtatacatgcattaagacagagctctcttcagttgacgaccttcccttccaaccactaatttctctgggatggtgccaaactcttagtcaaatgtagcttcaatgcatcccaccctctcagtgtgaaatgataattaataagactttatggatgaggtggtgttccacttccagttaataacacctattattccagggtgttttaatttggttataaaaattgactgtaggggtggaacttggcttgggagcttgttttaagggcaaatggtttgtttttaatttttctttcaaaagaaaaaggcttttctttttttctaaaggaaattttgtgttgcattgagttatataagcatgagaccaaattcttaaaatattggtatgattacagatttttaattgatttgatgtcatcctttggtatgtcaggtaaagctgagagatgtcccagggcttcttggctagcttagagttggcaggctcccgcgctctgccatgtcctcagttgggatcagagcgtgtttcttttacatggcttctcacacttaaacattaaattctcttctcaggcaacagtttatacaagctactggctgaattgcatttgatgataagaggcaactcgtttttacattgtattttgatgggtattttactttcttattacagatctactggaagagacccaaagaaaagatgaagaaatgggatctctgcaggtaaattcttaaatagggcaagcatgcttggtatgaaaacatttgttttttactcttttatcctttattattgtcacattcacactggtatagcaaatagggtgacaaggacaatgtcagaactataaagttggaatttgcttcctttagaagtctctgagagcactgatctaaagcaggaagccaaatcagcctctatgctacttttgataggaaattttattcc

SEQ ID NO: 77120 - DNA, 1057 bp, Homo sapiens
tttttttttgagacggagtctcgctctgtcgcccaggccggactgtggactgcagtggcgcaatctcggctcactgcaagctccgcttcccgggttcacgccattctcctgcctcagcctcccgagtagctgggactacaggcgcccgccaccgcgcccggctaattttttgtatttttagtagagacggggtttcaccttgttagccaggatggtctcgatctcctgacctcatgatccacccgcctcggcctcccaaagtgctgggattacaggcgtgagccaccgcgcccggccctgtctcactcttaataaggacaattgtgattacatttagggatctcctgaataacccatgctaattttttcatctcaagatccttaaaatctgcaaagtctcttttgccttgtaaagttatgtattcacatattccaggaattagaacctgactatctttggggctgattattcaatataccagtgttaccatttagtattttatgactttttaaagagtaatacaggctcacttgatattggcatgaatgagagaactaatctgatatggtaaaaatttcttctgtacaagagtaacaaaaagaaagaagaaagagagaaagaaaggaaagaaagagaaaaaagaaagaagggagaaaaaagaaataaggaagaaaaaagaaaaagaggaaagaaggaaaagagaggaaggagagggaaagaaagagaaatgaaggaaggaaggaaggaaaaggggaaggggaaggagaggacggaagaaagaaagattataggaataaatttaaccaaggagatgaaagatctcgataacaaaactacaaaacactgacgaaagaaattgaagaggacacaaaaaatggaatgacatcccaagctcatggattgcaagaattgatatttttaaatgaccttaccacccaaagcaatctacagatgcagtgcaacacctattaaaatactaatgatattcttcataaaaatagaaaaaaaatcctgaaattcatatagaggcatgaacaacccaaaaacctcaaatag

SEQ ID NO: 77121 - DNA, 1030 bp, Homo sapiens
gacatgccagtcaagctaataaaatgtacagtagtgttttaaaaagtgaggaaactgataaacagatggctatatgggatgtttctaagaataggaaaggaaagactttttgtcacatttcactatttaggataacagatgcattagtctgtgtttctaaataaaacttcaagcacatgtctgaaatcatctacttactattcaaatagaaatttccctttggaggttagtttgatctgtcaaaccaccatatgggtctgtaatagtataaagttctctgaattttctgttcttgcaatttaagctttttcactagtacgcttactcccgaagctagactgccttcaagagagctgtgctgaggatatttcaaactgttttatacacacacacacagcctgagtgagatgaatgggttaggtcacttgaaaaacttttaagggaattagaatacaatctctggtatgggactttcattttatagcccaatgaggttattgctctagctctattacatctaacaccaaaaacctcagtgagcagacatggtttttacttcattaagtaggctttttaaaaatggactttctaccttctgagccaaaaaaaaaaaaaaaagaaaataataattaattaaaaataaaaatggactttctaaattgcttttctgagtattttaatatctcattttattcttccaaacctgcctgtgaataatttctaaatatttctcttatgtacaatctaaataaacatataacttgctgaccttattagcagtatatctacaacaaatgatattcatttaatgtattattcattcatgaaattagccaccaaatgttaattgaacatctacaatgggccttacaatgtcctgccaacagcattagtaatgaggtactgtacataggtggacacttcatgtgatgcgttcttacatctttgagcatgaatatttattttaatcacgtctaagagtctttcaacaaggttcttacatttctttattttcacttacattcttaag

SEQ ID NO: 77122 - DNA, 1052 bp, Homo sapiens
atggcaatgtaatttttatatcatgtttatattgtgcctatgtgtgtggataggcataggtggatatttctgggctaaagactctacttagtgttcatcagattctcaatggagatggtggctaatttgttgatgagctttaaattcttttaaaaatcatgttattatgaataacaatagaatgacagtctttgcatatatatgattttatacatttctgattacattcctccaagtggaattattgactcgaaaaagcatgagtattttttagtttcttaatacaaagataaaaattaccctttgagaaagtaggcactgcatgttttcttttacagttgcccatgggtaaaaaacagaagcccaaataaaacatgttatggacaattattttgacagcgtttgtaagtttaccttctgttcatattacataaagtaacatattacaatgcgtgctgatggtgacttttgtgattctgtattacaacagagatatggctttgtctttttgcatctagattggataactaattttcgttatattggtcagtccttacactataaaaacttgcagaggttctgccctgaaaacaaatcatatgaacttaacagaaatatttggttgttggcttagggagctggagtttttttgcctatacaattcagaaggaataatgtatattactgtatcaagtgaatttttattgtaacttgtggttttttccatatgacttaatttcttgccaaggcagactttggggtatttttttagagcttctttttctgctaaagaatctttcataatgtaaaccgttacactgactacccataaatactattttaatgaatttacctcacatctaagtgtaaactctaatgcctataaaattttaaatatgaaatattatgccacatcatcatactacttaatcttggtaacaagtattcaattcaatttacttacagaattttatgatttcttaaaaatagtgggttaatttacaatgaattgctttgagtttatagactgtaattttcattcattacttttc

SEQ ID NO: 77123 - DNA, 1050 bp, Homo sapiens
ggctcaacctttaggaggaaactaacaagtcaccagaattaagttcctttgttcgctgataaatctgctttacataagacaatacctgacacataatgtatactccttattaactggatggattgattaatttattgaaaacctactaatgtcagtcattgttattgtgtggcgctgtatcctctacacaagaagaaactcttcttgcagcgtaaattttagcctcaaggactatataacaagttaacaaatgcaataacagggtcatgtttcagttctgggatgacactagaaggacctagttttttgtttatttgggggtttttttgttctttttttacccccagtggagttggcatttggatgcattgggactgcgtgatagtgatgatgtcaattcatcttataatgtactgtgcattgaattctgtgtgtggggtctattctcattcaaaatcaaagagaaattcacttagcaagtgtctcatctataattgagtatggactccaaggagaacattgcaatgaattttcacggacagattgcggaagtgatcagaggtgtatgagataaagccagaaacatttctataaggctcttgagaagcaggcattataggtagctagaacgagcaggccaaataaagggattgatcagagagaactggcttctacgaaaagaggagatattttagaagacactgtactaagttataaatttggaggcctggtcgtctgggagcaaggtcatatattagtggcctaccacaaacattatggtgaacgcacactgataaaccaggcagtgggaagcaactggtggttcttatctgaaagagaaaatgtgatgaaaattatataagggaagttatcctgacatctgtgttgggaatataccagagaggagagaaaatgtagagaaggaaactgttggaaggcttttgttacaattcaggcatcgggaggtaagctgaagtggtacctgtggaaatggaaaaaaagacatgtgagtgacaattgtaggagaatagggaaaagtgggggcaaaac

SEQ ID NO: 77124 - DNA, 1051 bp, Homo sapiens
tctggtacggctattttaattacttataatagagttttctttcactgttgggataattagtcttgagtaaggagaaaaaaatccttttttgaccttttaatattacgttcacattaggtctcagaaagcactctttcagcagccataaatactttaaaaatcagtattaagccgtagaaacttttaattcaacaagcatttgttctgtgcatactttctaccaggcactgtatccgattctaggaaaaaggcgcaaagacaggttctgcacctttgatagggcacaggccatacaacatcagtagttggtgactgtagcatatggtaccagggaaactggtacttgataaaacttgaaaaggcaggtggaggccaagtggaaagggcacgctggccctatgttaagaacataaaacattagcccttgaacatcaagaagtcacagtattttttatttcagaggagtggtttaaagattcagttagaagcagggatatacatgggcagttgcattagagaatgaggaggcatccacctaaaatgagagcagtagttatacagaaggggtaaatgctggagatatgaagatggttaatggtttagattgtgttactattggttatggatgcagagagaagtagaaatttctggaatgactgtaaggtcctcggagagggtctacaaaaaagagaaaactaaactcgggaacatgtttgtgaagggccattatataatcaaatttaattctcataataatggcccttcaaagtagctaggaagcaattctcaaggaatgtaaatgcattaattaaagctgtgtaactaggtggtgacagagctggatatttatctggcttcaaaactcatgctcttcaatctctgggaaaatagaagacaataacaagtttagatttagatgctgtttttgaagtacccttaagatatgtgggccaagttttctaataaactattggaattttgatcgtaaaatcagcaaaagggtggtttcttttgggagggccaatttgggagttctttttatatgggtact

SEQ ID NO: 77125 - DNA, 1205 bp, Homo sapiens
ctgaagctcctggctttaaccaaaggtcctgtgtccctttctctactggaatgagcattttgggtctccatatcttgtgggagctgaaagccctgtccactgcgtcagaatctggaaccaagcaggtcctgccatgctcatctttggaggtctgtgagggtttgtgttcatgcagatgtttgctttgtttggggtcctggaagtggctttctggcttcttgtttttatatagtacttattcttggtgtgtttttgaaacaaagacggacagtcaaagcctgaacttactatgccattctgattggaagtttattagtgcttacttttttctattttatttctcctcttccgtcttttgtgaagttaattttgttcttcgtcatttgttactttctatccctcttaccctgctttagttttctccttggactcatggtttattgtttttatgcgtttggtctttttttttttttttgtctctctcttttcctacttgaatatatgctttgtgaggacagtactttgttcattgcaatatccctaacatcttacaaagaaagtttccattatttatgcagtaggctctcaacagacatctgtagaatcaatgaatgagtgatggtgtttttgtcccaagttgactcatcatttttggatttctgtttgatgtgtatttcagaatatgatgtgataattcttcaagaaatactggttctgactggggaaggggcccatgaccagaggcctgtgagtgttgttgatttcctgggaatcaagtcctttcctacttcttaaagggcagacattaggaaggcctgccttattttgtttcatagaaagtgtgtttctctggtgttagaactccaattcgcacaaggcagcttcaggctttgtcctggcccataggctagagtcaggcacttccctatctttgtttcttcttccagtgtcagcagaatttggatatctaatctatgcttgtccttctttattcttttcatactattgttttatttaaaaggattccttagaggtttatcctggggccacataacatccctctgcagctcattttaactaaacttgattgaaccagcttaatagagttgtaaaattaactaccctggtggttgtcctctcctgatttttaaataactctttgactttgcaattggaaaagccctggaattactcatacctcaaag

SEQ ID NO: 77126 - DNA, 1027 bp, Homo sapiens
gatattgcaagaaaaataggcctagaaacctgtaatttataattggcaggccccagtcttcaaggtcagaatttatatgtgtcatctctttggtgtaaatctctgtttttgcttttaccgaattggaattgtgaaaggtgcttttaaacttcagaggcctgtcagttttgatatgtgaggataattttgaagacataaaattctaccccacctgtcccctctacgttccccactaccccccacccccccatacacaaaaaacccaagaaggagaaaacagtttactatatatagacaatacaataaggagatcagtgaattgtgaacagtaaaccataaagcaacatcctctgtaatcaatcagtctttctccatggctcattaaaggaaagcatccaatttacccagcttgcaaaaagagtggtgaatttcagtttgaattgtacacatatctacattttttgtgtctgttattagtagattgcctgtttatttctgttcattccccatggcttgtccttgacagagaaaagagattttaacttttaattgtttataaagaatagaagagtctatgagtttatgttatgtgatggtttgatatgagacaaggtttgagaatgactgaattgatcttagcctgatactcttccctagatgtctgtcttgtgatatttttattaatgatgacacatgtataactgatgaggaagtctgtcagagaacataaattgtctgacaccactagtatcttacctacaatccaaggccttttaactataaagaggtaacctgtcagccttattccctgtatttatttcaaaaagacttaatcaatttaataggctgcctttaataaatctatttgcttttatttatttagtggaaatgtttagctttctagcttttaatgtgttatgtctgataacttaccatctgacaaaatgctgaaggtccttatctatagcatgtccctgcattctttctggatctctgtttgatctacttatctacaacatcctagaga

SEQ ID NO: 77127 - DNA, 1200 bp, Homo sapiens
acttttcagatagttctaataaatttactaatgttctctgatttatttattcaaatgcgctatgaggcaagcaaagattcctctcacttatttttctgtaaatagagacagaatggtaacattgttattatttctaaattaactttgacccatgttttgaaacagctggcatcaactcacagcaaagtgaatgtgggtttccaggagatttttaggtgatgccttaatctgttaaaacaattggggaaaattatgcaacaaacatgaaaatttgttttagtataacattagttatctaggtttgggaactattgcaatgagcttcttgctaaacttgatgctatttaataagtcagaataaagaatgttcatttcatgtatttttgtttgttacatggacacggaataggctagtgaataactgaatttatacattctttatacttgttggcaaggctgtttccaaaatgaagacaatgcagcagggagcagagcgttaaggttggtatggattctggaccagactacaaaaaccagtcagcataattgttggaagaaatttttgagacctgactaaggagttactatcatctgggaacattttttgttgctattttaaataaaattaataaaatatttaatttttttctatcctacatagagtttagagactcaggcagtttggtagaggatagatattgcataatgatattaaattgggaccatagcaaggatgtatcttctaaaagagctaagggagatttagacttagataatcagatggaaacttgttctgttaaaagtcaagccagattaacatgaagcaactatcagaataaaggagaagaagtaaataaatgacttaatgcttttaatggagggataaaaattgttattaattcccagactatatattttatttttggcacctggaaaaaatctaatacgtttttatgtttttaaagagtaagatgttttatcaggtaagattaggcattcagtagtcagttgtttattttcgtgcatgagtgcgatctcattttgagggagagttcagtattaccttttcgacttctgactggttattttttcttttaaattttattttagattcagggttacatatgcccttttattgcatggctatattgcatgatgctgacgtttgggatatgatagatcttgtaaccaaagtagtga

SEQ ID NO: 77128 - DNA, 1026 bp, Homo sapiens
attgccattctaactgatgtgaaatggtatctcactgtggttttgatttgcatttctctaatggccagtgttgatgagctttttttcatatgtttgttggccacataaatgtcttgttttgagaagtgtctgttcatatccttcacccattttttgatgggtttgtttttttcttgtaaatttggatgaagttttaaactgatgtcatgtatcaggaagaacctaaaacacttttgacggaaaacatggaactttcttctctatccccactcatcctcattgtaaacatcctttttgaaggattaacatccaagataaattgaaaatggtttcttattcaattgcagtatttttcttttaaattactggtgagtttttcagatgtgtatctgttttgacaaggcaaacctaagtttcaaccaaattataagtttgattattcatggtgatctagctaagagacaacgtcattattaactgggaaattgtattctgaatttcaaacaactgacttatagatacacttaaacacatccatatatagggaactgcctctttatgatacttttttatttttagataacttagtattggaaacttctttgttctcttttttaaaataaagaagtatggcctctaattcttgcttcacaaaatatctttaagatatttgatgacttattttttcaagcaaatagttatggcagtttatttttaattttcaaattaagtttaatataggaaaaattagattttgattgagatttgaaagatcactctatgtctcattaaagaataaagtcaattttttgtgaatcccaaatacaatacaatcacttctgaaatagaacatacctgtttacaacctttgttctctcagaactactgcacaaataacatgtagatgtcgttttctttccaggagatacatgaaattatggccataaattgaaatactagcagtagaaaggaaatcatacctttttacaggggacttgaaaacaggttgaaactgataaatatcct

SEQ ID NO: 77129 - DNA, 1010 bp, Homo sapiens
gcttaaaatatttccataaaattatttcaaaaaaaatttttttgaagcataagaggtaatgttatatatacctttaagtcttttatggaccattgaaagtctattaatactgctactttcctaggcactttgaccaccagcaataccaaactacttgatattacctgaacacaccctgcaatttctttttttttttttttgagatggagtctcttgttgcccaggctggagtgcaatggtgtgatcttggctcaatgtgacctctgcctcccgggttcaagcgattctcctgcctcagcctcccgagtagctgggattacaggtgtgcaccaccacgcccggctaattttttatatctttagtagagatggggtttcaccatgttggccaggctagggtcaaactcctgacctcaagtgatccgcctgccttggcctcccaaagtgctgggattacaggcatgagccaccatgcctggccacaccctgcaagttcatatcttggctctttggaagtgcttttcctctgcttcacatttcatcttcaactgatggtaaactaattatttctcaaaactcaatgtatacctactttctgaaacattgcttggtttccaaccactctctctagacaaatggagaaatttctgagcagatgtttcccaaaacatatcttctcctttatggaacaaagttttttttttttcttttcttttctatttctttcgttccacattttcccatgatgggcaacttctttttcataggcacaaatgcaatccctgcaaaaaatttattttttcttttctattccaggtttttcccttggaaacatctccactgtagtttcttttctttccttctcattcataagctattactaataagatcaccttaataatttaagcaacaaactattcttatttatggttaatgtgcagaaatcatggaacctaaatctcttgttttaaggaaaacaagttttttttttttttttaattttactttgag

SEQ ID NO: 77130 - DNA, 1063 bp, Homo sapiens
ggttgataatattacctggtaagtggttgtatcaaatgaactgatatatgtaaagtgattgaatagtatctaggaagtattcagtaaatgttaattgctatttttatgcaaatgtcttcattttggttttactctcattagacatcactcagtccagggcctgaactgggaaactgggaagggtgacaataagaatatggtgaggaatgcacacacaaggaacaataaatcctctttgagcagctataatgtcaagggcaaatggatgtatagggaaaatgtaatttctttaatttggtctataacaaatctgattttcctcctaaaccttgaacctttgattaatctttccttcaagaaatatttgtttagtgcctactacaatgtcaggctctattttcgaaactagaaatatgaccgtgaataaaatacacaaaaatccctgtagctgtgtttcttacattctattggcaggagacagacaacaaacaaaaacaaatacataaattatagagtatgttagaaggtaataattgccatgttgagaaaacagggaaggagcttttgggggctgagctgccagtgaaagcaaagtgtaattttaaataagatcagagtgggttccattcaggaagtgccaggggagccaagaatgaaagaatgtgagcaccagaatgtattcatgtgcacatcttggagaagagcatcccatccagagagaagcacccatgcaaaggcatcgtggctgcaatgtatccggcctgtttgctgaaccacaaggaagccagtgtggctggaacagggtgagccaagaggagtgtagttttggggtttgagagaaagaaaagggtcaaagatgatggcaaagcttctgcctgaacaattgaaacatagaagtcccatgtttaagatgggaagactgatagagtaggaaagaaaattagtaggaaaaagtgaactaaacgttggaattagtttaaaatttcaagcggtcccttttagtctgtcttgggccaagaaagcttagtttcttaaataacctccttgatgcccaggaagagga

SEQ ID NO: 77131 - DNA, 1011 bp, Homo sapiens
cgggaagcagagtttgcagtggctgaggtcatgccattgcacgtcagcctggatgacaagagcgaaactccgtctcaaaaaaaaaacaaaaaccctaaaaataatagtaataatataaaacttagagttttattttattattttatttatttatatttttatttttttattacaggcgtgagctaccacacccagcctaaaacttacaattttaaaaaaattgactagaaggactactagaacagaatagaaaatctccccaaataggcccaaatactgaaggaaatttagtttacaatgaagctagaatttgaaatcagtggagatggatataccttttaataaatgtgctgtaacaactggatatttatatggaaaaatataaaaattagatctattctgacaccattcatcagtataattttaaatgggccagaagtttaatgtaaaaactttaattattcaaatactataggaagcaaatgcttttataatgtggctacagattaaatttacatgactactagctaaaattcagaggcaatcagggagtaaagattgactaatttgattgcatagcagttttttaaaatggcaaaacattttcaccataagcaaaataaaaaacaaataatgggtgcagcacaccagcatggcacatggatacatatgtaactaacctgcacattgtgcacatgtaccctaaaacttaaagtataataataataaaataaaaaatggaaaataatcgaaaaaaaatggaaacagtatttgcaagtcttatcacagacaagaggtgatattcccatatccctaatatataaacaacttattaaaaaatccaaatgcatgacaatgtctgtgaggctggggactgtgaggaaatagaccctttcaaacattgcttgtaggaatgcaaaaatggtacaatcctctgaaagtgactcagaatctagttaattttcataagcattttttgactcttcaattccccttttaggaatgtatatc

SEQ ID NO: 77132 - DNA, 1678 bp, Homo sapiens
gggaagtggtatggtcacagctcactgcagccttgacctgacaggctcaggtgatcctcccatctcagccttccgagtagcttggaccatgggtgcacaccaccactcccagctaatttttgtattttttgcagatgtggagtttcaccatgttgcccaggctggtcccagactgctgggctcaagtgatccgcccaccacggcctcccaaagtgctgggattacagacatgcctggcctataattacttttataaaaataaaataattccatgtgattgatgtctttctaagtgttgtggtgcctttcagttggtttagggtggaaattgcttttttgataagatgatatttgagtgattggacaatactgttattcttaaattttttcttttttttttaagtcttgatctgctgcttttaggatgtggttttattattgtcgggtatgggatgtgggcagagagtatgatggatggggagagtagttcttggttgttggtttcatgggggctttgaaatgatatagctgccgttagtgtggagacaatgtgggaagtttgaggtttgcctgttagagagctcgggtaattttctagatccgttcttgtctgatattaggtgatttttggttggcagtgagaaattttgcagtgtcagtcatgccttcttttcattagttggacaaacacatacatgcactcatgtgtatattcacatatacacaaaaacacacctttctgctctatgtacataatggccttttagccacagcctcccttctgttacttttcttctgcctttcccagctcagaatggtggtgtttataccctaaatgagaaaagtagccttaagtgtgtgtgtatgtgtgtgtgtgtatgtgtgtgtgttttgccttgaatgggtgatgcaacctatatggactcatgaggaaattttaaaattccaagtgtatgcacaactggaattttaatccaagctttaatgaaaacatggccttgtttagtgagtggaatatcatacaattagatgtctgaaatttacattttgataactgctcacttctgctatagtggaaaagaatacaatattcagtatattcttccaagtagatttatcttctccaaatattaaaattggatcccctgtgcatcaataatatttaaagaattggattatcctaacttttcactactcagcagagtgagagagagaaacactagatactgaaaaataaaataggaaactgcagcattggatggctaggctccagttgcttttacatagtttctaataaccaagatttttcatgctgctgactcttgattctttgtgcaaataggctagttgcagaatgataaatacaatttatataaaattaaaaacaaaatcactatctttgtttccaaccttctcttttactcagtacacgtaagtaatgctgaatggaagttattctattttttaaaaagttatgctttaagtggatacacaacaatcaatctactatgtgcaaaacaggggagattaaagaacaataagaccttgtccctctcttagaatatgctacagtccactagtgtagatacttactttaatacagctttgtatgtgttgctgtatatattaatgaattgctatatatacagataatggaggcaccatctctgcttggatg

SEQ ID NO: 77133 - DNA, 1018 bp, Homo sapiens
ggttataaaacttttctgtcagaaaccatatttcatgtgaagaagagaaaactgtcagtgatagcagagaactaagccaacactcagaaaaaaacaaagacgtgaagcaaatgagaggttcgctggtgttaagcccatgtacctatttagcctgctttatgccagtgcccttcttgatcagatacagcttttcatgccctcttgttttggtttaaactgttggactttgctgtctctcctcacagagtcctgacagattaatgttctcacagaagagactgtcagaatccttttgttttcctgtgataaattaaaaaatactcagtatcactacaagatcacgtgaaactaagtttgtgtagtttggaaatggtggctccactcctgcagctactgtgtattctgtgttccaaattctcactgtcctttcggtttctgaaaacctagagaggtaaaatatctatatgtgatatgtgtataatacaaaatggttgtaaacttgtagactgtatgatttaattactaaaactgttgtctttttatgccatatatatttgaggtctgtcattaaaactagttgtttaaatttttctctgagtcaccactttgaaagtagtatttagaagcaaatgttatgcaactttacttttgctgaaaagatgaaatgtgatgtatatacctataatgtgaaatcatctctatattagagttaatgaattgacattgataatttatacagactttcattactactgaatcgtgtaagacttgttggtgatattattcacacctcatgtcattcacaccttcaactacatgaaaaagtaagtctcaccattttgtctttgttgagttatatgaaaatgaggatcaccagccttggcaacatggaaaaacttcatctcttcaaaaaaccgaaaacaaacaaacaaaacatatatacacacacatacacatacacatacacatacacacacacaagttagctgagtgtgatggtgcatgcctatagtcagag

SEQ ID NO: 77134 - DNA, 1051 bp, Homo sapiens
cagagatatcatatcatgaactttatccacttattcacgaattcacctgtttatttatttatatcctgacttgttcgataacagatttatgcagagttgatttaatttaaaatgtacatcattatggagctgtgctgtataaaagaaacataacaagacaaacatgagctacatgtatagttttaaattttctgataataaaatattaaaaaggtaaaaagaaagtgaaattaattttaaacatgtatttatgtaacccattatatcctaaatatgatcacttcaacatataatcaataagaaaaattattgacatattttacattttgtttttcaactgagatgccaaaatccggcatgtattttacccttagagcacacctgaattccaaccagccacatttcaaatgtttaatagtcatatgtggctcatggctaacatattgaacagaatagccctagaggatcatttatactggccattttttggtcttattctttttataagagaatcatctgtagtatgattgccagggttgtcgagttctctttgggaagtccaagatgatgaatgtaacctgaagctcatattctctaatattaatcctatttatgaaaaaatcttttatatgtaaaaattatttaagggatcttacaatatagacaatttatagccataataccaatatgtaagaagggaaattaaagatgtatagaaattattttcatagattctttgaattcttaaattttctacgtaactttttaaaaaggtagggaataacacgattatgcacctgggtaacagataaagataacgagcaaatcagaaagatgaacaactcaaggatatttatttaccttcatacttaggttttctctgtgttgtatagattgtggtagagaatttggatggttgttgaatttagagtttattcttaaattcgtagttcagatttttggtttagaatatagaggctagtaaatattctgatcaagtcaaggttattttccattcagactagtttgtctgcattgcttagatacttcg

SEQ ID NO: 77135 - DNA, 1050 bp, Homo sapiens
gaatttaaaatgttaattcagataaaagacaatttacacaaaaatttacatataaagctatgaaaaggagtgtatatatgtgggtgcatgtttttcaaaagggaggggttgttgatggagtagctctagttggttctacagttcttttcttatgtaggtttggtgctttcaaagaagcaaccacttaagggatcttgccttctgtctttcatgactatgaaatcctataaatactctgagggaatataaattacaggttacgggatcagtcatcaagaaaagattttctttgtgctttttgttgttaggaattttccctattaatacaaggttataagctcctgaagccttggctaaatcagacacatcatggctgtcatggtcatcagacataggagatgtctgttggtttctaaaccacaagagaaggtaacaagtacctctgttttgggggatttgggtattgggaaggaaagggtgagacatattctggttgcctacaaaaaggatcttatagaagttacttatttgtttttatagatagtaccttatactacttgttccttattcaaggtaaaggaatgtaattgaatggttagagcatttactggggaagttgtggttttgggaaacaaaagcattttcagatcacatttgttcaatttgtgatttctgaaagatctaccaatatagctgaaaaataccaaagcctgattattccatataaattaattaattagagttaatgttatttaagagtttgagatcttttctactgcatacttcttccggagggagatttttctttcaggattttaactttgtgaattacaatcttctctaattagcatgaacttcctcttgtaccagaattctagcatattataattcttggagtcagaaaacttttcctgcttggatattaaattttcatcagttatgggtcattcttgttggggataatgtgaaatagagggaacttgtgttctggaatagttaatagaggtaaaggtggagtaaattatctgcaggaaaaagcactgggggctg

SEQ ID NO: 77136 - DNA, 1053 bp, Homo sapiens
atactgtgaactcgggtgattagggaaaatttccttgaaaaggcagggaggatatgagaattgggtgagatttagatagaaaggtggatgagagaaaattggatataagaatacaatattcacatatgtgatatgtggtgggcactcattatgctttcagcatttgtctaaatgagttaactaatgatattcctgacaaagaagcaatgtgcacacagctcaggaggtatggaggtatttgagaataggaatagacttctccttgtagagagagaggatatttttaaacaggcaaatttgagaaagaggtcttcaaaaatattatttgtagcacagagttcaacaaaagtacaaattgagaaaaaacttttgtatttacaattataaagtcattgccaactttgaatacagttttactttagtaatatgacaaaaccagatgcaagggattttataaatgagttggcgtgaaggaagtcaaagcagctagcgcagatgaactattgaaatacaaggcaatgtttgcgtgaagtcatgtcgatgagtttgtgtctattgacaatcattgataagacaaaatggcccttttactattaaattaaagaaggataaatgagagagaattgtttccatgtaatcacatataaccctctttgaagtacattatgtagaacacgactgaggagaggaaacaaacagaaatgaaataaactgactttaattgaagctgtttgccatatggaactccacagaatcagcctccatatatcctagcaatgatagcacttgatagttgatttttccatcaaaatatttattgccaatacataaataaatgaatacatacataaaaaggcatataaatgaatgctagtttggaactggttgagtatttggggcaacaatttttctttttaaatccttaaattggggaactaaacttttggatactgtggtgaagaatttcatttatatatgtttatgtcagagaaaaatgtatttctaatcgactgttttctcttttgtaggttttttcatctggtcctgatatac

SEQ ID NO: 77137 - DNA, 1017 bp, Homo sapiens
gaaatcagaaaaatagaagcaaatgagctgttgacttctagcatttactttaatgtttacactttagaccatttttaggcagcttgtggtcttttttttggtgctacagatattttaagttgtgtgagtagaataaagttgtagtcaccacacattaatttagaagcaaatttaaaccagatactctaagtaaacactaactaggatgttatgagtaatttcctgtaagattcccatcttcttaataaaaacaataataaaaataataaaatggttgaaggcaaatgatacatttttaggagttttcatttaaagtatgtttaattgaatcacatgtaaccattaagcccagagtactccttgacttttacagagaataggctgaaataacagagtgcttcccatttatgaaatgtaatgtcagatgttaagaaaacagtatagaatgcaaaaatgaagtgaatatacaatgggaagggagaggatgcatttatatgtgcagctgtggcaaagagaagggaaaaaaataaaggtgcatagaagtacttctggtttctactttctgaattagaacacagctatgatgaagccgttttgaaattactcaattggcaatgactttcctaccaactatttacaatcaaagaggttgattttaagtgaattacaggagtaaagtcaaagtttaccagttgtacccactcctgacttggacttgattgagaggcctgctattaaatccttaactcactgagggattgataactacaagggtctagaggagaaggcaaacatgttctgcactttccattaaaatcctttactattagcttgatttcatttacttccacagttgtgagtgatccctgtagtgtgggtatcaggctaaataatggtgtataccattggttgaggtgaaaaaagccgatggaataggcaacatgaaagttctgtatcatatctgtttcagttaagcaatcttagctggctttggttgaccctaaaaggaaacataaa

SEQ ID NO: 77138 - DNA, 1066 bp, Homo sapiens
atggacaaagaggtatgtgtgtatacacacacacacacatacacacacacgcacacacacacacacatatgtatatatgtaaagaaatatggatacacatacacacatgtataaggtggccagtctggggcagataaaagcaagaaaacgaaataaaaatatgttttcaatgaaggaaaacccagtgattagtagcctgaagattaccatgtaagcaatgcaatgaatttgataaatgaggccttatgggttgaagggacagctctgctacaatcaaaaggggtggacgctttctaatttgcttaacaaggtggtatttttgcatgcccatcctcaacatcaatgtgtgatgttactgaggctaccaatacacacagccttttttttaaagccttgcttttattttgactgtgtggttttagattgtgtttcttgtcatgttattattacctggtaagctaagaaatattaaaactgcatcaaaattcatataaaccattagcatcagtggtagcattaatcagtgggagaacactgcccttgctaaatatccacagaataactgactttagcatattttcctcatgtattcagtggtgatatatggtattaaaatgcattttttctaacatctgattttgctttatcaaatgttatttttcagttttacatgacaaagagaacgagtgttatgcaacccacagatttttacatattcatttggtacttttattactagcttctaaccagggcaaaaaagctaccctgaaatattatagaaagaattttctcccatccctagtatcattaaaatttattgttccttttgcttacattttatggtgaaatatttgattcttcttttgtttcagaagaatcttactgatattaatcttttgatttttgtgacatttacctgtttactctatcagaaatatatttttattagtttcactggaatctgtgaatcaacaagtgttagtgcataattgaatcatttttgttcagccagtcagcattaaagtttacgtaatgaaggttttaaatgcctgatctatatggatct

SEQ ID NO: 77139 - DNA, 1072 bp, Homo sapiens
tatcaccatgcagggcaatcattttataacatgattgtcaggagtgtgataaatctgttcctcttcctgtcttttttttttttttcataacacgtgtcatatgatatagattccatattatttattttttaatatccccttattgaaatgaagactctctgaggatagggattttagtctgttttgcttctagctatatccccagtgcctacaacagttttttggaacattgtaaatatctattgaataggtgaatgaatgaatggataaatctttgaaggttaattattataatgtttttcaaaagcctttgaaatgcaactactactttcaaaatgcttatgatttaagatgaaatgatattgaaatagttgacatctgtaaaatgatgtagctattctatgagtccttccccagtcctagatagccttctggcattagtggatttggggtcttcagttgggattggcaggtcagaatggaggctaaaataggtaaaagacccttactatatttcattaaacctaagacaccttataagatgcatcattgctgttattactagatgcatatgctcctaagaaataaaaatgctgcctcctgcctatgaaaccatcataatgctatcaagtgtaagaactcccaggtcagagatggtcaaatgtggaagatacacattttaatgttgatgaactatggaatagtaatcttttagagttgatgaatatagaaagtagagtttgggatatggagaagagctgatcttatagaaaataaaatatatattacatgttgattgattggctgtgacaataacaatactaccagcaatcagtttttcaacattttgtgccggtcactgctctaagaactttacaagtgttaatcatttaatacccacctcaccttgcagattgtgtggtattattttctccctgatgaagcaattgggacacagaaggttaagtaatttgcccacggtcttacagcaggagagtggtagggaaaggatttgaactcaggtaattaactgtgttcttaactgctttgctagtctggaaaaaagtttaga

SEQ ID NO: 77140 - DNA, 1148 bp, Homo sapiens
aagtatttgttgaaaagaaaaatcagttccatttctcttttgatcaggaatcacttgattgctgcttgttaatcaagttgatttctagcatattggtaaaacttttagaataagagcaaaaggtaaaccacaattacaagggttttctcatcttattttagaattttctacacacacaagtacacagttctcaatttaccatttgggtggatgagacatcttccaggctgcattgaatttagcaaactggacaaatgcaaacctgtcgcccagaaaatgaagtttgtttttgaggcatttaaaaaaatgtttgccataatgtcaaaccatgattttaatcatgagggaaattatatttaaccttatttgagccatagatcatagaatctggacctggaacctctgctgttggggccaaaggagcttggtaaatgtttctagtttcatttgtccggaccttagtacagtggagatgttatttattgtttatccaactcacagcctcattccaacccctggaacccattcttattcggacacatgacctttttatgttacttttgttgccactaagtatttggaaactaaggctcaggagggtcagcttatgtgactcattgtaagtgctttatttctgaatttatcactttcttacaaagctttacaaaagtggcttaatgttaatgattctttaatggcttaatgttaatgattattttatttgtataaacttgcataaaacaatatcttctcatgtttaaacttaaaatagatatttacttattcttaaaatatgtattaatcatgatgatttagtgtaatttccaaatatataatcaccatcctggcttcagggaagctagactgaaggtttttttcttgattagagaaatattcaaaataaagttaaattaagtgtatttataaatctgtactatagtgattcatatcagcttgagataagtgcttcaatgtataatattatgttggtttatctggaaataatgtataaacactttattgggaacctaatatgttatctatgctgatgtttctgtcactctattgttacttatttttattttttattataattctgttttgctgccagaaggcaaaatgttatatatgattgctactaatagttc

SEQ ID NO: 77141 - DNA, 1123 bp, Homo sapiens
tcaacgtcagggaatccctcctcctgggagccaagaggaagtctctcaaaaccagaagggaaaggtgttttccccacatcagtccagctttggagacattctgttagtgacgtatgccccttcccccaaaaacaacaatgaagtgttctgtgtgctaacaacatagcttaaaaaaaagtaaaattatgcagttttataaaacttgataaaaaatagtatttcaaactgtgcagtcaacagaagtttacacagttatcaaaaatgcacacacttcacttggcgtctccagcaccttcagttttatgtgcctggtctgttttggcatctccattttctacagggctattcccctccttgccagcatcagcttttccctttttccctttgggtactttctctcccttctttgcaggggcctttttacgcttgggttctggctttggaggagcaggtttagctgacaacctcatggatcttctgtgtgattcgtccttcaccttggctttatctcctttagcatccccttcagcctttctcttgggcatggtggcggcaggatgtaggtggtggacgcgggatgcagtggtgcacgggctttggttggttaggggttcgttctcgcctcttcttcacactgctcccattttgaagtgttaagatttgacttccctgttggattttggacttgcatggggccagtagcccctttgttttggccaatttctttcatttggaatggctgtatttactcaatgcctgtacccccattgtatctaggaagtaactaacttgcttttgcttttacgggcttatgggcggaagagacttgccttgtctcagatgaaactttggagtatggacttttgagtggactgttgggaaggcatgattggttttgaaatgtgaggacatgagatttggaggggccaggggcggaatgatatggtttggctctgtccccacccagatctcatcttggatccccatgtgttgtgggagggacctggtggaaggtatttgaatcacgggggcaggtctttcctgtgcttgtctcatgatcatgaataagtctcatgagatctgatggttttgtaaagcagagtttccctgcacaagctccttt

SEQ ID NO: 77142 - DNA, 1065 bp, Homo sapiens
aaagcacctaattttatataacccaaaggaaatatttaatgttactcatctgtgtttctctttcatcttgtcagcacatcaatagaaaatgtcttttaaatttggttcaagatttggattgtaaagataatgaaatattgacatactctttacaaagccctctacatgtttaataaagacttacttgaaattgtctcagagcaatggtaattatacaacttttaaagtttgcttcatgggtattattttagcccttgatcctgctgatgaaaatgctaaaatatgattattttgctgaagtcacgtatttaaaaagaaagtatgttggatagatctaaaaggtagaaaaatccctttgctctatgttcataaccacacattggtcctccctcccttctttccttccttcacattgtttcttttcacttgccatcatggtatacattggaaaaaaatctcaaatatgtgagcactaaaaaaattatttgtaatagcctaataatgctcttattcaagattcctggctttccccttgtcctaacttagtagttattttacaatttcttatgggttaggggaagaatttgagtcctcttgggttagtttggtttggttgtatagagtttgggtgtgaaaaacaattggaggaaaggtttttacaacacagcaaatattattgactgcctgttacatgccagacactgttctaagtgctggcaacatagcaaagaacacaaatgcagccgattccttgtttctcacagtggatctaaaattgatgcaggctgggagcagtggcttgtgcctgtagtctcggctactcaagaggatgaggtgaaaggattgcttgagccaggagttcaaggctgcagcgagctgtgattgtgccactgcactccagcctaggcaacatagtaagactctgtctctaaaaaataagtaaataaaaataaagttgatgcagaaagttctttgagtttgtcttgcttctaagaataaatttctttttgagaatgaaatttttttttccagttgccattgcaaaggacatcacaaagacaatgt

SEQ ID NO: 77143 - DNA, 1349 bp, Homo sapiens
gatatattaatttcaggtaataatctccagatgagtaaggattagtaaattggttggtcatacacaatcagagatttaatagcatcatttgttgtttatgttgcaaaaaaaatattttgtagatgaagtagcttagttgaaaactctttttgtattttttttttttttttactgtttggagatagtgtagagatgtgaggaaaatttaaaaatgtgtgtgattttcttgaaataaattgcagtagaaatcaggtaacattttaagttttagtatcaaactggaataatatttgatgatatagcaatgtatatgtttttgaaagctataaaacttgaaacaacaggctggcaaagtctgttgagtaactgtcaataaatggattatgatagctagaatattgaaacatcagggctcagtactatttgaaagtacattcttctgtgaataaagaacaacccttgagccttacattttatcttttaaggggttgagcgggaaaaacaggacctggagaagcaaatgtcagatttgagagtgcagctgaacttcagcgcaatggcatctgagttagaggaagtgaaacggtgcatggagagaaaagacaaggagaaagcacatttggcatcacaagtagaggtgactttgctctttttaagtcatattcgaaatattttaattttatctcatggaattgcttaatgaaattttaatataaagatgtgttattttatgaactccagtgtgagcattgataatataaagttatattaatgactgatttacttatatgtagaaattcctatgggttcatttctctttcattcaggaccccaaagccaggaacctggatgattttcctttattattttacagagaaatcctttactatttttaaatttgaaaatatttttgttctaatagcaattgaaccctttctacagacagaagggaccttttttgtttgagagaacagtgaattattatttattttgcgggtgaaactggcagaatgcatagtgaaaaggtgttaccaataattcttctttggaaccataaaggttttcagacctctagttgttctgcatgaggtggaattgcaatgcctccattaatttagagttgtgtagcaatcatggatgatatggtaaccgtgaatggagtataactaggcagctaccatttcctgcttttatctagcatagatgaggtaattatcagtatatattaaaaatcaaaggaaaagacctcataaaaggaaatggtttaattgaaattacaattatgcaaattagattaaacatggatgacacatttggaaatagatatgtatcaatcctccctgtatctg

SEQ ID NO: 77144 - DNA, 1104 bp, Homo sapiens
catttacaaatagataaatatgtacattttcaggttggttacctatcagaagtagggaaagtagggctcatgggccaaatccagactgccacctgtttttgtaaatagactttattggaacacagctactcccattcatttatgcaatgtctaggctacttttgcaatacagtggttgaattgagtagttatgacagaaatcatatagctaagatatttattatctgatcctttatagaaaatgtttgctgatgcttggtttgtaggataaattcttctaagtttcctagcaacacataaactctgttgacactccctcctcccacccttgtaacatatgagatgtattagctacttgaaacttctgtgtgtgcaattacctgaatgttaaattcagttttgtacctgtatgctttatggtatgtgctttccctaaaaacaccccaactccttctcctttgcttggtgaaattttgtattcattctttaagtctgacttagttctcagttcttcctactttagttcctcactgagacagagctaatcccttttactgtttgtactgtttctgtataatccacatgtatgtatcagcgctcttatcatcctattgaaatgcccatatgtcttccattctaatatgtacaattttgaacactaatattctgaagtgggaatgtattttatgaatgatgtataaatttaatttgttagtgttttcttctttcattgcctccttttttttttctggaaaggaaaccactagaaagacagtagttttaaaatgacagacagtatatgttccagttgttgacattttagactccatagagtactttatattttgtctctattcttgggatgtgtattattctgttctcacactgctaataaagacatacttgagactgggtaatttataaaggaaagaggtttaatggactcacagttccacgtggctggagaggcctcacaatcatgatggaaggcaaaggaaaagcaaaggcatgtcttacgtggtggcagggaatagagcttgtgtaggggaactctcctttataaaaccatcagatctcatgggacttattcactatcatgagaac

SEQ ID NO: 77145 - DNA, 1017 bp, Homo sapiens
acactaaaattgttaaaaatattttttaaacaaatggaatgcatttcagatattatgaaagacagttccaagtataattttcccctttaagtttaattttgttctaacatagaaacaaaccaaagcaaacacttttatagttaacttttgaaatgtgtattttcttaactttctttttcctcattttattaaagaggggaatctgtagaaaagaatatttgtttccaagaaaactgttagctatctaggccctctaaataatgtagtaaaattcccaaagatggggaaaaaaaggaaacaaagtgaatattaattagggtgatcaggaattgtttatattttatccccactgaagtgttcttatgagcagactgtaatttatagattttgtgtaactcatatccatgtcttcttcagccctaatacataataaattctagtagtgactttcagttttgtacatattttgggataatttttttccacctctttcattccaggcactaaagaaacaagaagctaaagcagatgagcatgagggggcaataaaaaataagctaagacaaactgaaactgagaagaatcaagtaagattttaaaagttatctttcaaagaataaagtggtttggggccaatggtatttgttgagtgccttgaaaagtgtccccaggatcctttagaacattgtgagttctttatctttctatgtggagtcaattggttcaacggctcttctacttgctaggacttgctcttgaaaacagataagcaagttgtttgctaccttgtcatctatgaccattctcctttctgagaggtgaattaaactttactttttcttgttggaaacatttaaagaacttgactttgttgcagggttagaaaagacctgtcatttggagactgaatattttggttatattcattttcattatagtggacagatatagtaagcagccagttctgaaaacattctctatttatattaaatatcaatgatctttgacatatgttca

SEQ ID NO: 77146 - DNA, 1069 bp, Homo sapiens
aaactgctcttaggagacaaacaagctttaaaggacaaaataacataattattgaaattcattggcatgtgatttttttttcttcttttataactgcttttactgggtccgttttaatataagtctaagttgcttgatttaagtcaaatggaaaagaaatccagtgcaggcttacacccttaaaaaaaggtagtaaattagttcacgtttattattaaggtttaaagaaatggcttgtgattttgatttggttgatttaaaaatatctctctttgagtattatctgtgttttcagtgtttacaggtgcatcattgatatatttaatgggtcttaagtgtcagattttccttctttgtctttcattttaaactaggtaatgtagaaaaactggttcaatattctaggctagaatattgcatttgtgtttacttgttgactgactcatggtatatagaaagcagagctagtgttcaaactcaatggcatttctagatgatatagtggaaatgtagtaatttgctttggattgttccttagtatctcactattgcttcttattgaaaacaatagaatttaagttatcattgacaaaaatttcttaagacttacatatacttacagtaaaaggagaaattgaaaaaaggagacttaaataaagttttaggcagcaagtagagctataatagaaaagtacattattttggaaaatcaatattataaacaacttatcagatgttctaaggggaaagtaaggaagaaaggagtagcacaatattattttagcaaatttctaagtatccaagagaattagagtttcttttattcaaccaacttaaacatagaaatttggatttttttaatttaatttttttgagggtctcactctgttacccaggctattattaccaataataatagttgcattttattgcacatttgctaggagccagacattgctttatgtgctctacagatatcaaaccatttagttttcaccactaccctataagtttggtattattatttcaatatgaagaagcagtgccctcagttgttaagaggcaggca

SEQ ID NO: 77147 - DNA, 2379 bp, Homo sapiens
atcctactaaccgtgagctagtgcccatatgacttttgttcttcttttatctcttctttccccactggtaactattgagattatattcactttctaggttcttgaagagtcattacttattcttttagggactctgacttctctctttattctacttaatccttcagcatatgtgtaagcgtcttgtaaagcatctgtaatgctattggggaatagtagaagtttatatgttaaataaatactctgattgctactgtgagttgtgtttaagcctgacacatattttatgttcatgccaaatattactagatctcaaattatgtttaatcacttttactttgctatgtgtacttatatgttcttgccaatattgtcattgtaaattataacaaataaggctagcgtgaatctgtgtgagtcactttgtgcagcaccatatgcaaatagacatttaatgccgttaatgctatgacgatgatgaaaaatgtctgctgcccctgttgactgaacagctgcctgacaatagactgagattttctgtgtgcaggatttgttcaatttctatgttacgcttttcttgaagagtggaatgtttctatctatgttttcagtgaatttatgctaggccatctgtttataaagcccatttccatcattatcaattaatatttattgggcaactactgagtgcatagtaatattgtacaaacaaaaaccgttttgctacagatagacttattcattggcttagtactgttttatttttattagaaaatagtgaaaaacaaaaaaaacccttctaaacccaaaggcataaaataacatcctttaactctggacactggaagatgttgtatatttacagagctttctgttcaaagatatacaacttgagaaattctaaattaaatttccataattatctatgatcttctatttgtcaacaatcctaactcagtggccctgcatttagaaagtcaaatgaagtattatattactctggatttctaataaaactatgcatctctttttgagaggaaactactcggataaaaacagaccttctactaggagcatttgttttttgattttgaaggaaatcctggaaagtgcacttgttgggctcacatttaactttacttgcaagattttattaagtaaaagattgcataaaaatataatctgttccagtaaaagcaatggcatgttagggaataatactcattaccattgttgcttttgaattaaagaagttaaaagacttgtatgtctttttagcatactggctttttcatgaagtaattaaggttttgttttgcagattggcaaatttataacatttgaagaatgaaatcctgacacttgtcaacaggggtttacctttgagttatttttgtagtcatggtattgaatttttgctgattcattcatagtctctggtctagttagccttctgtgaggcccttggctaggtttagggtaaagattgtgtccacgaaacagagcaaagggaattggtgattaaactcatgaccttgtttgggttcattggcactggatgccctaaacagtggtggattccgtaggtatgggcatagtggaaccaagaagtttgttcattggagaaaataggtcagaaaaagcatccatctcttccaccaagataattcctataagagcccttgtggattcttgggattcttgaaataataaacatcttataagaagagaaaaatgaaaaaaacaaaaaacacatctaggccattcttaaaataaaaccttgagctttatgtttaaataccatagatatctttaaggaatgttattaaggattactgttactattagaaatagtatttaacatatgatcaatcctacttaactacgtgatattggatattaccttttgaaaaagaggaattgttgtattttgtgacttgacttatgtgcttaccatttccatcgggaaaatacacacatttcaattcataccaagttttttgaatttctcccttactttgatatccctcaagtatgtatggtatcataatagtatcaatattgaattccttttggacttttatcaagcatttctacttttcacctaccaaagtgtgtggtgtgtgcggtttgttttattttttattttttaagttgtagttgttggtatagaatttcctttccttggtcatggctgaaaaataaatttctttgaacaatttaagtaatacccacctagctatttttaaattagatattggttcagggatttagaatgtgaatgcgttgttttgtttttttttgccttgaaaagaaacttaatttttttttgttttggtttttgttggcacagataatcctcaactggatgaacttaaa

SEQ ID NO: 77148 - DNA, 1016 bp, Homo sapiens
atatttgtgtttatgattgagattagttttccttgcactgacgtttttggttttagaagcatggttacattagtgtcataaaatgaattagatggattccttcttttcctatttcgtggtttagttttgtgtaagagagggattatctatttcttgaatgtctgttgaaacttacccataaaacaatttgtgtctaatatctttttggtgctgcagattactaattttttttaatgtttattgggttgtatagcctgtttattaagtcaatttggtaattcatgtttaaagtcttgctagaaatagtattattttattagttttctttttgactggctttgtttattgcttcattaacttctgctcttaactctgttactctctctttctcttcatttaaaggattattctgttttattttttaggcttgaaaattgaatgcttgattgatttttctgcttttttaaaatgaataatgaaaatttaaccaaattaccatatgctttgttatacttttatggtaattttttttcaaaatcttttataatttgttacaattttctctataactcaaaacttatttaggaatgtcttttggtattttcagagatatatgtgtgcttatttttaaactctttttattgtttttaatttaactcctttgaaagttgttgaaacttccattttgacctaattctatgaccaattttttgtaagtactccagagtaagaaacaaatatttttctgtgttttggatgcagaattttatgtgcttgtgcatgtcatacatgcatacatacacacacacatatataaatttaataggtcatttgtgaattttgttgttctgttcttctgttttcttagtacatatatctaaagcttctcattattatagagattatcagtttctccgtgtgatttgtgtcagttttcttttatctgttttgtgcatgtggtatcttatgtataattaaattacttcttggtcaattatttaaaaaatattacctag

SEQ ID NO: 77149 - DNA, 1106 bp, Homo sapiens
aaactgcacgttgttctgccagcaatggttgagtgtagctctttcccccacattcttaccagaagtagtggttataattctttaagtttttgccatctgatcagtataaagtgttaactcatttttatgtttattcacttttctctaatagtgaatttgagcatctattcacacacctcttggcagtttgcatttgtgcttacatacagtgcctatgtatgacttttgctcatttaaaaatattggattatttgggatttctctctttccccccggggattttttttttaataggagagaggaaaggatctaatttgctttttatatgactcatcagttgcttcagcatcatttttgaataaaaattggttctttccactctaatttaaatgccacatctgttgtatatctagtttcctacaatatctatctgacctctatatgctttgccattgatttgcttgtctagccctatactaatataattctttcttaattattataggttttattatcttttggtaaatgataatgaaaatctcttgtcctattccatgaaaaatcatgctggcatttttattgcgattgtattaagtacagactaatttaaagagaaggtcttttctaatgttttccaataatgttttataattgtctgtataaatgtcttagacctcttttgttagacttatttttaggtaccttatggtttttctttctatctggaatgggatttttttttaaaattgcatctctaattggttatttttagtatacaggggtacaactggcttcatatatggttcttatatccaacaattttgctcaatgcccttattagtccttataatttcttaatagctttactgacatactatcttagtgtatagataatcatatcatttgaaattaaaggcaatttagtctctttataattcttttcttttttttttatcttattgcactggttagaacctgaagtctaatattaaatggaagcaaagatagcaagaattcttgtgttacttctatatttgtatgattcttaagtgttaaatgttgtatggtgtttgcccctactttttagtgctaacctttgtcgcatt

SEQ ID NO: 77150 - DNA, 1595 bp, Homo sapiens
ttgaaattccctttaagtgtttctttggtctatacataaaatataaaaagtagaaacaacaagaaacacaaaagattcaaaacaaatgggaattcttttcatttatgaaatgatttttctaagagttctaaaaatacacttatgtgtgcttgtagatcgttaatctttattaatcgacagattttttaaagtttttttcactgttaattgaaaattaggaacaaaaattgcaacactgaaatttaatgtaagctgatagaaaaatctgcttttgttttctgaaattccatttccttccatttcacaaaagaagacatacccttgtaagttggtaattactttgaagaggatatgttgttgaataattagatacagcatgtgggtaagctttttttttttaaccttgatttttatacatttgttctcaaagcaaattatatctggtgagcataagaatagtactaaagagacaattgttcttttctgcaagagaaaattagagaaattttctgtacttattttcttctctctttgcagaatgcacaaaattacaaagaaagagggagaaaaagattgcttcccaccacttttcttaagataccagagcctgggtatttccattgaaattgtcaatttgactaaaagcttcagctgtgatttggaattccatctctgacaatacaataggagatcactattgataagaactatttaatttcatattttgttactttaatataagcagtgacctatacgtttttaaaaagtggttttagattataaacagagtagtggaagctaggaaagattaagctgatgtattttcctgctcccatgttaaatggcttaaactgttccggaaaggtcatgtttaaggagaggaaacactttcccttctttttattaaaaatacttatggaaattcctataccatatgataatagtaattgatgcatttttttcctgtttatggtgaaaaattaaatccataattgagcaggtgggcctgaacttctagccactgtgctcttttgccttcttaaaatgtatctttcaatgttaatgaaaaatatgacatttaaaacttaagacattaagagtttttatttgaaattataggatgcagagatttgaaggtataatatattacagggaggcattctgtggttttggctaaaatctgctgctgttatctcacgggtccttaggtcctcagagctttacctattcccatttaatgcaaaagcacagtgttaatcattggaaattggtcaagggaaagccattttccttttctgtaggggttttaaagaattgttcactcatttctgtttcttgtcctgatttgaacaaaagggccatgcacgcccaggaatccacttccttttttgagcctcagctactcatgtgctattgaagtcacatgaatgccagattttctttcttttttttaaaaattaattaatttattattattatactttaagttttagggtacatgtgcacaatgtgcaggttagttacatatgtatacatgtgccatgctgctgcgctgcacccactaactcgtcatctagcattaggtatatctccca

SEQ ID NO: 77151 - DNA, 1030 bp, Homo sapiens
atagaaaaggactaattaggtcgaacaatttatcattaattggctaacaaatgcaatttttagcaaaattggtattttcattctaactcaccagagggcactcttttctagtgtattacttttaactctgatctactgaattattatatcatacctcaaaaaatttgaggcatttattgggatccaggtgtcgattatttggagatcagtgatgactttcttttgtaactttcagtaagctttttggccagctatttcatgttagcgtcattagaaggggctttgcaaacaaaacaatcttaaatgctttaagcagtagtgtatctgctataaaactatcttctcaatttagtctgttttgcttgctagctctataatgctgctgtttctctgaattcttattaaggtttcagatcgggtggagcggcggcttcaggaactggagagagagatgcgcacagaaagggagctggtggaaagacgccaggatcaactgggactcatgtccctgcagctacaggaggtttgtgaaaaacactttcatggaatgtaaatcttgaatttggatgtttatttagccatgttaaaatggttattgcatgtgacagtataattcaacccatctgagaagtattaatatcacatattggttatagttcagtgtatagaatcagacctccctggtttcatacttgctgtccatgtgacattagttgggcaagtttcttaacttctctaggcgctagttttgtctgtggaaaatggaaataataatagtattgacctaattagattagtgcaaggataaatgaattaatgccaatacagctcttaacatactgtttgtcatatgctcggaaaatgttaactgaaagtataattattctgattaatttttctgggcatagactagaccaggggtcatcaaactgtggctcacaggtcaaagctggcccattgtctatttttgtaagtagttttattggagcacaaccactcctattcattgatagattgtctgtgggtgctt

SEQ ID NO: 77152 - DNA, 1237 bp, Homo sapiens
taagtaagtaagtaaagtaagtaaaatgtaagtaagtaaagtaagataacaatggaattttgtagtatgaattcttgtgctttcccaacaatgagacacattaataagtatatatttttgaaagaaataccttgattaatctcccaggtgaaatctagaatatttagataagaaccatttcttttgtgattaaaattaaatttgttgtttttcttctcctcaagttctgaggtaaaagaatagtcaaaatcacattgatcttaatgattttcttctcttgtacacagtctactagatttgctctttcagaattccttttctataaagagggtgtgaattggttgaggggcacaaattgaaaattatgattctgagaatttatggttttgttgctgacttactagggaatcttgaatacggatttacattatgtgcttcagattttacacaagtaaattgcagttggatttgagtttctctcagtggtgttaagatttacttaatatgtgtgaagtacattgatattcaactcagccatgataaaagttgtacattttacaaactgttgacttagttgattgacatactactaagattgattaggaaaaaaaagtatttggaataattaattcagtccattttctttctcaaggataccagtcggaacctgcgacaagtggaccagatgcttggacgataccgagaatacagtaatggacaggcgggtgcgatagaacatgtgagaaactacatttgtttgcattttctcctacccacctttttgggaatgaagtgttttggggaatggggctgtgagctaaaggaaaaaaccattgtgaagtgctttagattttaaactgatttattattttatagtttaagtttaggttagcttgtcagatggattgctaactagcttatataaattagattctattgaatttgaaggctttacatcagagagagtagaattcaagacatgaatttaatggagacttggtaaacttgggccatggagagacccctcatgtagagttaagaattttaaggatggtttattttaaagtaatatgtgtttattgttaaaacaaaaaatgaaaaaatcctctctcaaagcccctttttaattttttaaaatttctattgctgtagtggaacaagtggttttttggtttcatggatgaattgtatagtgatgaagtctgggattttagtgcacctgtcatccaaatagtgt

SEQ ID NO: 77153 - DNA, 1819 bp, Homo sapiens
tttttatcaacaatgtaaataatctaacttttattttttattataatgagatttaaaaattttacttagtttaacatttatgaaacttaggtaattaaagtccttagatagttgctgaatgtttcatatgcttaaaaaaagccatgcaaatttctcagatatatctcaccttaaatcttgatgtctctgaaggagttccatcagatgcaggagtttgaacatcttttattgctcacagtaacttaactttatagctgaagtctttgtgtgtgtgtactagtgaaactcatgccggaacttgtgattctgtcttagtaaaagtatgtaatcctagtggtggtgagagatcattcttttttcttgtattgtatgacgattagagataatttagtttatgttgttcttaattttttttaataccagtaagattttctgctttagagttaaattcagatgcccccgtatctttacttattaatatttatcaattcagtgcagtgtgttttataaaaaaagactttgaggtacccatgcctatgggaacagtataaaaacatagcctggagagttatacatgaaatcatgctagtgattatccctgggaaaatggggcaggagtagtactgggtgaaggaggggtggttggaaggtactaagactttatttacagtgttctaaatattttactaaaaactctcaaaggtacatatgtcagaatgataatgtttattagttcttggtgatagatacatgcatgtttattagtctgtactattttgtatcttaaatatcatccccaaatttcagttataattatttttagtcatgttgaaactcaaattgtctacgtattagaagtgtctgacatgccatttatatctggtgaagttgtcttcagataactgattattattaaaattttgatactcttagaaatatcaagttatctcaaagacagttattttgttccttgttctcattaacaactattatagtaagcacattgtctttttcaatattaactttttattctgcctgatttcttaacttcagtgatttcttaacttcaatcaagtttccagaattatgacttgttaaaatgaaaattattatgctttaagctatagaattttgatatgaaagagacagatgccaggcataattattattttctcttatataagagataaaaggaataaggaaacaaaaaccccttaatctgggaccagtggattgatttgtttcagggctttttattaaatgcattagtatagatatgtcacttagtttttttcctggtgcctagttaagattttatattattatttgatatttcccttttttcttgatatttttatgctgacatgaaatgagagggagttgagaagattatacacacatgtaggctctggcctgcacctgctctctttagcactttttgttaattgttaagattgttaattctcaggataatcggacagcagaacacagtgggaagaacatagtgttgaggacagagaaagccagctgaatcttgggtttgcattctacttataattactgtatggagttggatattatttaatatcttttagcagtagcatcctctatgaattaggggttaatagtgttcactttaataagttgttatgagaattaaattgggttgtcttatgtaagcatctgcatagtacttggcagaatagcagagtcttagaaaatgttgatttttcctgctttcactaatggaaaatgcttgatgggaagtactgtaacttagagtaaaagatgttatgttatgtggcatagatttatgaga

SEQ ID NO: 77154 - DNA, 1096 bp, Homo sapiens
agctgcagaagagtgttcactgctttttctccaattgaaagaaatacctttctcagctttaaccagaatttagatatttctgtttctttaaattgttattcaagagtttggtcattcttcaaatttagcagttcttccttttctttcagcaatgtgtcatgctgaaatttcttatgataatgagggtaaatttcttatctaattgaacttttttcttttaaatctttaaagacaataatgaagattttccttgagcatacataaatgtttttcttcttctactcttaataattcgtctttgcgcttcaaattataatagtgattaaacataacttgtgaaccatttttaattcgttctccaaagtagattttgatgcataagtgatgttggtacacattaatatatttttatatcctccaatttttatgttcattctagtagtttagaatgtttctttaagtgagtcatctttgaatctagtaactgcacttcagtaaaactacacagcgaaaataatatacaattaaaataaattttctttcagttcataaggcatgataagtgtttcctttggtcagtgaatgctcttcagtatgaaatagtaaagattggcactgtgatcccgtttcttcagctcatcagttggtgagaactagtggcatggccctacctaggtagatgccaggggactaggaaataaggtcaggaagttgccatggaggaaaaggacacagttaccaagaaaatggaagttctgaatatagagcttttatttaatcaaattttccaggtcgacagcttgttaatctgctgtcagcctgttaaccggctatctctgaagaggtctttaaatttgtttttgtttcttttaagtacacattatagttttctttctgattatactccatttgcattaatgtatattaatgcaaatcattgtagaaaattcatgaaatgtaggaattttttttttttttgggatggagtctcggttgtcgccccagctggagtgcagtggcgtgatcttggctcactgcagcctccgcctcccgggttcaagtgattgtcctgtctcagcctcctgagtggctggga

SEQ ID NO: 77155 - DNA, 2000 bp, Homo sapiens
ttgcagcattgatttgagtattatgtaaagtatctagcacagtgcctggcaccctgcaagtgctcagcatttgttgtttattttttattaattatgcagattagtgttgtctaatacaaatacagtgtgagccactcaggtgaatttaaattttgtagtacccacattaaaaaagtaaaaagaaactggtgaaattaaataatagtttatttagcgcaatatagaaaaatgttttcaatggagtaaatataaaacttattgagatttttacttttttttttttgaggagtctggctctgtcgcccaggctggactgcagtggcgcggtctgggctcactgcaacctccacctcttgggttcaagcgattctcctgtctcagcctccggagtagctgggattacaggcactcgccaccatgcctggctgtacattaaaaaaaaaaatattttaagtcatcaaaatctcttgtgtattttacatgtatagcacatgtcagtttgacctggcaagagctagagctcagtagccatgtgtctagtgactgctgtactggacagcactagagataaggttaaaactttggcagtttcacattggcacacataaatttggttgtgcctatgactcatttcatgggtgatggtggctgttttgttagaagagtgaagtgtgcactgtgcctatgttctctcagcgtatcttgtctgccattgcataacctgggtctctttgaactgtttcttgacagtttattttgattaactttttcagaataccttttttttttcttgaaatggtttatagatgtattcccagatctaccttttatgtagacaactcccagttctctggatcacttcctgtggattcttacagattgctttgaaagcagtcacaattaattgaaaatatttctgtccacagctcttttctacaaccaaaggcattttattcttatttatttaattgtagcactgagtatgggaagaactgggcatcttataaaatatttcctttaggagtgttagactggcttggaagtataattgggtcaccacattcagcagtaacatgttaactgtattacctgacttagttaccaacttttagacatgctcatacatagtactttttggctagacttgggctgcggttcacactggagcatgaactctctggcaagccccagggatgcccaggcatggatggaagtcaccagtgacaatatgtgggctgggcacttggatgtgaagaattgtagtgaggtctcttgggcttttgaatcattctaggagcattttctctattctgtgttatgccatagtctgtacatagggacttaattttcatatttcattatttaaaaatgtttaaagttgtaggtatgtcttacccccttgttttgtttatttgtaggtggtttggggaaagtgtaggggcaaccaaagatcatcggcttgactaggccctttgccctgaacctcatgaagaaatgataggaggcagacatatgtgcctaaaaagagcgttgagctcagagaagagcaactcggagttttgggggtgtgctttgtaagtatgctttctccctgagtttctgagataacacattttttgcatatttatggtagaaaagactatgccaagaaatagagttttgggagcaagaagccccttctaatatatggtttaaaaataaaatatcgaatgattgtgtatgcagtgttgcaaaaattcagatgaacaaagtagataagttgagatatcctttataaccttaacaaaagcaacagtgatgtacctgtttctattaagcaaggaattgagaacctgctttgtctcaggcattctgtcagacaccttttacaggcattatataattcctttaccatgcttatcttttacaaaggagacagttgagtctcaggttatttaatttgcttgggattctggagccaaaagagtgatcattgttcccaggtcttctgactccaaatt

SEQ ID NO: 77156 - DNA, 1023 bp, Homo sapiens
ttttctacttccccatcttaccgtagtcctgggggactccttttgtcccccaaggagtaaaattacagtcaaggccaaggaagcatttttattcactttctaactggagtttgcctcctacaaaggaggctggtcctttaacaaaaaaaaaaaatagagcagggcaagagggcgcggccaagggatcaggcttttatccgggaaagttacccgaaggccagctatatggcatcctgggatttgcagttccttttcgggactctctcccttggtaattccttgatcatgaggccgagatggactacaactcccagacggccaagcggcggcagcggggtcctgtactcttgctgtggctgggcggctagttcaagttgccatagctgcgagtctggggagagcacagtcggttgagtcgctgcgtttggtcagttgcaccttctgggtcactggtagccgcgggagccgggtggggcctaggcgatgatccggcattaaggagctgggatcatcctccgtctcaggtacctgcccccacctcccccttgccctttttcgaccacttccccgtcttactgtagacgttttagtcccacttcccctcgtcccaggggtggggacctcagagcggcgcgggatctggggtggggccgtggatgggtggagtgtgtgcagaggtgaggggagacggcgcgcctgtcatcccgaggcctccctccctcggcaggggtgtccgcggtcaggtcctggccaggttacccagcgaatctggactacattgtccttcctttgggagcagcttgctctaccgctagcatctgtgaagctttaagggacaggagattggactcattcggtaggtcctccagaggaccgtctgacatttgcttgcctgtcctgcaagcaaatttgattttttttttaatacctgttttgtagtcacagaaagcgtgctactctcgggaacgctttattagtgacctctctttcccgtgccatcataggatttgctccagccttagc

SEQ ID NO: 77157 - DNA, 3531 bp, Homo sapiens
cttgttttctctgttttctgattgtatctctcaatttttaaaatgttgtttttgtttagatacacagaagtaaaaacaaatggaaatttcatctcaaggatggcattatgaatcttaatggaagagattatatattttccaaagccattggagatgcagaatggtgaagagttgctttttttcttttataaataaaagaaacttaaaaaaaatgtaaagcggacagtttgaaacttggggcatatgccaaccaaaacttcgtttctgcatgtcagaaaagtgcagtagaagcaaagctactggaacaaagatagaccttgacaacatagacactacttactggcaagccatggaactgtagcacctagggtttttgggtgggagggttggggttttgtgtaggaaaaccataattgttgattttaaatacaggtacctgccaccggtaattagcatgtaaagctttgtctatattccttcctccaacttgggttcaatcagaagatacttgttggaatgaactgaagaaacttcccttttgatagattgaactgaaactgcttattgtatgtggttatatttggtaaaagttgcgtgtgagctttttacaaaagggtaagaattgtgttgaattttaattcacttgtataagaaaacaatttaaaactctcataataggtcttaaatatttttacttgctattctccctcagtgatatatacctcttcctttccagctttatgaaacatctatttaagatttaaagttatcagtgatcatagtttggagataaaatttgacccaggaatgaatatttattttaattaggttttcatacttattaaatgtaattaaagacttgggtcttgtctgagttcagtggaattgaaaccacaactttaatttccttacagaaaaacttaatttgtttcttttagtgccacaccttaaaaagaaaccccaaactagctcctcaggaatatagttttattttgcaagcataccatctagctgaaattgtatacacatgaatatatgtagacttttcctgttgggctgaagtgtgtgcttataaatgtgtttagtttttaagctaaacattcagttaacagtctgtgcattgattagcatagggcaggtggtgaggacctggatttttattaaacagtttagtaattataaaagtttcttgtgtttactagtaaagaattttaaaaatctattctaattcaacaagtttttaaaatcaactttgtaatttgaggggaaaatttggggggaagaggtgggtgggccactaagttacctctctttcatttggtggcccttccaggccattgaaaataaagacgttggctccagtttgcacattgggaagaaagcatagaaatttgacttgtatattaaaaataatagaaatgtaatatgtatattaagaatgcataggtctgtattctgtaaggggctctgaagaacaatatggcactgctgtgttcagtgtgaattcactgcctgggagaactgcaggaatgcttgtcttcaccattgtgttcttacaacgaattcaactttccatggtttatcttgacaaaatttacatgtgtttaggttacttgtatattgatatatttttttaatcttcagtttttgtcttccttttgcctttgtgttttcagaagtaacacatgaacactttttaaagtacattacagagaagaaaactgtgagctattatatagtgtttcttttttaacacaaatcttttaactttaaaaaaaggcaaaaattttttttttctacttcccacccagcttaccaccttgatctctttaacttatgttctaaactttggtgttaatggtggtgtctagcatgctagtagttagattttatttagatgccataactggtaatacagcttttattttgactatattaatttagttttttgaggggaagtttgtttattctgtgactctcaaagcacacagaggttttaaaatatatattattaagactgagagaagaggaaatgggagggagtaacatcacagaagtgctgttgttcaactgttcttcaatatagttgctagtaggtttgtatttactcagtaaggaagtcagtgacctgaactacctataaaaattcagcagtgctgcagtgttgcttaagtgaaaccctttggctatctagtagtttttatgctactgaaacttggattactgtatgatattcagcttgtcttgggccctctatgtagacaaacattcatattcatagtagtgttgtatactggcctgtttttataactttatttttcaaatattaacaaccactgctttcagagtggttattttgttatttttgaagcaggaaataaccatttgtatttgcacctgcgtattgcatatgaattatggtatacttggcaaatgcttttcttttacctgtgaaaattctgaaagctggtccaagctacattgcataccaaattgtgctcttatatattatttgcatcgtgtcctttttaatcaaatagcatgttttagttttattatagtagcttttgctgtaagaatgtcacttgcttatcttttattgtacttgaattcttaatcatgcttttaacattgtatttaacaaatcatttcgtattaggttccattaaaatgtcattcctttgaaaaggcaagggatttccactttcagaatttgaaaatgaaagtagcatgtttatctaaaggcagaaaatagttcggacttggtattatgaaaataagtaatggtttctggagaggatttgtttagatttgcacagatggcgatggcaccttttacttaaattaacattaatcaacagtgctaaggaaaatttacacaaaattacaagataaaacatggaaatgtgtgcctttcagtatacaaactcttgcttggtggccatttgggtaatcagaccatttgaatgcctgagagcatgtttaatttctgtggagtgccacatatggctaaaacaactctttaatgtgcaattaatttctagagtaaaatgtctgttatgtgagggggatctttatgttgggcttttctattttttaaatgttcacatttctttctgttaattaaaatgccatcataatgtcacatttacactgttgcctcttttaaaagcaaagccactttcttgttctaagattacatcaagacttgagcagtgtgtagtaattaaaatgtgtgcttaatgagcataatagattctggttttaggaaataacatatagcttttatatgaatattttcttttgctataatgaaagtcacagattttttttttcctggcttttatggaggaatgaaaagagttgtctccctctaagagtatactatttttgattctcatagcaataatgtcaccattcttatcagagggtaaataccccttgtataggaaaacagacataatttcctcttgggagttctctttatgacttagcattttcttctacttgagaaaattcctgtttttccga

SEQ ID NO: 77158 - DNA, 1025 bp, Homo sapiens
atgactcggcctatggtgatggtattaaagttggtgagaagtagttggattttggatttgttttgaaggaagaatgttaacagcatttcctgactctgagatttgtggtagaaaagaaaaaggaatcaagaatgactcttgagattttttgatgaggattctgaaagaaggatggtgataccatcagttcagatgaggaaaagctgcatgtggagctggttggacatgccaagtctggtatgtccgttagacattcaagtcatcaatcttaagatgctacatttagcatttatgtagtgtatttagaccagagatataattagttcttaatccaacagtctttaccctacctgctgttttacctttattgtgctttgttttgctttaataagtaagcaaagtttgaatccagaagaagaacatgagagtagtttccaaataagatgaaggttgtttgattgagtgattttttttttttaagtctcaaaaagcagagctaggatcaataaatggaagttggagaagcagatttccgtaagggtaaactctgaaagattttacaagagagctgttccaaaaaggaataacttaatttgaaattctttgctcactgtttctaatcgtatttaagcagacactgcacaaccatttgccaggaatatgtcatgaagaatgtttgcactgggaggttaggccatggaattttaggaatgagatctcagaaaatatctgtacctggccgggtgcagtggctcacgcctgtaatcccagcactttgggaggccgaggtgggggatcacctgaggtcaagagttcaagaccagcctggccagcctggtgaaacccatctctacaaaaatacaaaaattagctgggcgtgatggtgagtgcctgtaatcccagctactcaggaggctgaggcaggagaatcacttgaacctgggagggggaggttgcagtgagccaagatcgtgccattgcactccagcctggataacagagtgagactctgtctcaaagaaaaa

SEQ ID NO: 77159 - DNA, 1049 bp, Homo sapiens
ctcactgcagcctcagcatcttgacctcccgggctggagtgatctttctgcctcagcctcctgagtagctgggagaaaatatttgcaaatcatgtatttgataaggatctactatccagaatatataaagaactcttaaacagcgtaacaacaaaaagataatgcaatttaaaaactggcaaagaacttgaatagacatttctccaaagaagatacacaaatagctaacaagcatatgaaaagatgctcagcatcattagtcattagagaaatgcaaatgaaaaccacactgagataaccactttacaccttctagaatagctatactcaaaaaagaaagagaaaataaatgctggtgaggatttggagaaattggagcccttgtgcattgttggtggaaatgtaaaatggtacagctgctgtgggaaacagtttgatagtcctcaaaaattcagtatagaattatccatatgacccagcagttccactcttaaatatatacacaagagaactgaaaacatgtttttcaacaaaaacttgtatgtgactgttcatagcagccctatttatgatatccaagtggtataaacccaaatgttcatcagctgataacagtggaatattatttagccataagaagaatgaagtattcgtatatgctacaacatggatgaaccttgaaaacatgctatgtgaaagacatcagccacacaacgccacatattatatgattccatttatatgaaatatccagaataggcaaatccatacagacagcagattatagattgccaggggacagggagaatggggagtgacagcttaataggtaagagtgatgaaatgttctggaactaggtagtggtgagtgttatatacactgtaaatgttcattgcacctgaattgtacatgtacaaatgctaaaatagtgaatgttgttaacttgaattttacctcagagatttttttttttttttttgagacggagtttcactctgctgcccaggctggagtgcagtggtgcaatcttggcttactgcaggctccg

SEQ ID NO: 77160 - DNA, 1426 bp, Homo sapiens
tgctcaataaatgaagcagttatctttagaaaatccttattttctagaaatttgataaaatagaaatttaatgggtcactacactagttaaactaattgcttttgtactttggtagtttttaactgtgtatgaaatatggccattctggtgaatcttaagcatttgtttctatttctgtgtaccatacttgatcctcttaactagttactgttatgtggttttcttttgctttaggtgctggctcctcttcctggagggatttcaccacagacaggtgtcatcatccagcctcagcaaatcttatttacaggaaataagactcaagttatacctacgacagtggcagcacctacaccagcccaagcacagataactgcaactggccagcagcaaccgcaggcccagcctgctcaaacacaagctccattggtcttacaagttgatggaactggggatacatcatctgaagaagatgaagatgaagaagaagactatgatgatgatgaggaggaagacaaagagaaagatggagctgaagatgggcaggtggaagaagtaagtttctagtaacatacttaaaataatctacttgattatttccttttttagttggtacaacactgataaattatatcctgtttttttcagagactgttaggtgctgtacaacataagattttaaagataaagttagattgttttaactttagtaaggtttttatattctggctatatttatcttcataaaatataactttcatatagctggtaataaaaaatgtataacaaattaaattgtattaatatgtgtagtaaagagtacaggtaattctaactctggcttacgcatttataatgtggcttaaacataagacattggtagataaatagatgtggttaatcttttgcttcagtaatttaaaaagcgtggcaacatttggggagagagcaaactcaagaaccaaatgtcacaaatttattaaatatttaaaaccttttggtccatgttctataccacttccttaaaaacctatgtacccttaatgtctgtgttcttctagaagcatataaatatgcctttgttttcctcactatttcagcttagttactaggctccaaaaactatttgtcccaccacaattttcactgttaattgccttcgttagcctaaaatgcagtctttttgtttcttagtacaaagttcttctaaattatctaagtaattttttttctgaagaaaacatagtttattattgaatattgaatagacacaaatgaatagaaatgtttcaagataaaaatcatcctggtgcccaccatctagttaaaataaaattccattatttaaagtgccttagatgcctctccctaatcccatcattcctaggccatcaaagtacctttgctcatacatttgtgttgatt

SEQ ID NO: 77161 - DNA, 2540 bp, Homo sapiens
tttgttttgaaaaggctatatagtgatggatttcctaagttaaatctaaaaggtttatttactaagggatttattattttatatggtacaatagttatttgctttctctataaaacatgttctttcaaagacatgtttcagattagtttttaaaatatatcttacattctggagttttttgtatactttggcaatctgaaaattcagctccataggaatttatgtaagcctaaatggactgaattagatttattttaagttaagagtggatatataacatatcttaatttatattacttggattaaagctaagaaaaagcaaatattcatagactgtgtccatagtgccttgtactctgcaagtcattttatagatactgtttcactggcatcttataagggctttgtaaaatagcccttggctcagttttacagctgaggaaaatctgagcccagaaaaggctaagaaacttgatctgtattttctctcatgacaaacatctattcagttataaaacttcctgagcattctaattcagtgcatctgcttttatgggagaggacactagaagtaaatgaaaagttcattttaatatcatttagttactcatttgcctcatttgacagtatatatatgtgtcttaaaattggtaatgacacacagtagaagagtatttgggttattttactgttgatatctagtggtacttttcatacctaattttaatgtgtactttgtatcaaataattttatccttttattcttttttgatgactgttcttcctgttgccttcagacctggcattaggattttaggtcatcataaattaaaatttgattttcttcactcagagaatattaggataatggagttatctgttctctgaaatttgcggaatcaaacatgtaattccttttacgcttaagtaacattgccattatttctgatttgtattttttccgacttttgccggtttaccactcttcaggcaacctggtggtcccctgctttcaggaggccaccatattgatgccgaacttatttggacacctgatcagcatagcacatacagcccagaactcctgggctcaagtgatcctcccaccttagcctcctgagttgctgggactacaggcatgcatccctgcacccggctgatttgtattttttaaacagctgatgaaagtggcatgagtctgtcagctgtcatatttggaagaaaaggactatgtagatttcaaaaactagtcacaactttttgagcttacttttattggattagtaactcattgtaacagtggtatcattgtatcagtaaaacagttaaccttgagttaagacaaaattatgtttgaaaatgtccagtttacttaagaatgcatagaactatttatgtttagatgttaaggtaactcactacttcatgttcctaaattcccttgcatccttaggaattgccacttaattttttttttttgatatggaaccttgtcacccatgttagagtgcagtggcgtgatctcagcttactgcaacctccagttccggagttcaagtgattctcatgcctcagcctgacacccaactaatttttttgtatttttagtagagatggggtttcaccatattggccagtctggtcttgaactcctgacctcaagtgatccacccgccttggcctcccaaagtgctgtaattacaggtgtgagccaccacgcctgggcttaaatattttttaatgttttctagtatagggtgggtatatcacagctgttatttgccatatacatttataatgtcctgagatgaaatgattgaaagcatttgagtgcagaaaacatgaaaaacatgaaaaaagttttcatcattgtatgtaaagtgttcttgtgattataaaatagcctcatggttccttgtttgcatgttcgcttgtttttttgtagccacagcaccacaagttattgttccagattctaagttgatacagcatatgaatgcatcaaacatggtaagactcagaatgtagcagtttgattggctgtacttaattctaacccacattgtaattatgcctatatatgtcctatattaactacttgaagtttattgaagactcaagcaaaacagctgttttagtttcctgaatattggatctgaagtttagcttggtacctagacattaaggttcataaaattacggaattgtttaagaataccaaaagaatggtgctttgtgagagttattccattccctactatttccgaaaaagttttagggtacctaccaagcttataatgccaagtatggttctgtttcaggagacctagtaattgcaagagggtgggaaggctaagaattgtgaacttttaaaaaatgaagatagactggatagttcagtataactatttttaaaatcaagcatttaaaaatattactctgacttaaccatagtatagtctaataagtcattatagtgtgtaaattaccacagaatacattttaaccagctgagttatattagaatttttatatttctg

SEQ ID NO: 77162 - DNA, 1196 bp, Homo sapiens
gctctagattgaacactaaacctggtagagaggaaatgtgttaggtagaagaatgaaatcgttgcacatgttttcttttcttttctttctttttgtccattatgatttttcccatcatagaacctaaggtgaaatgagaaaatagaaatggctaaacagaaaaggattgtcaattggcgtaatggaagaaggaaggacatttcaagaagtgtggagagttgggataactactaagaccttcgggcgttgccggttctttttctttatgtaggattggacagatggaaagttaggcttttcttctttgggggattgcatctatgtatctcactgttgtaaatgaatttatgttttgtatgttatttaagaatttatgttttatatgttgcagaaaattttgtattttctatttttataaggaaaaagttccatataaaaatagtttagtaatggttttgctattataaaggataatctttgattactaaagaagttgcttgtatgaaactcatcgcttaataataactgctgattaaggaattactatagaaagttcattggaagataaaaaaaagaaacaaaatcttcagtactctgatgtggcaaaaatgaggtttgatactttaaaattttgtttttgttattgtttcacttgggttagaattacagatttgttgtatttctgtgtctgtatcagtttttaaaatggaataactttataaagagattaataaaactgttgtattcatctgtccagagttatttttcacttagaaatctttaatgttctttgccttagttatgggaaaacaaactaatgcagtccagggcagtagatggatttcattcagaagagcagcagcttctactgcaagttcaacagcagcatcaaccccagcagcagcagcatcaccaccatcaccatcatcagcaagctcagcctcagcagacagtacctcagcaagcgcagacccagcaggttcttattcctgcatcacagcaaggtgagactggacttgttttcctacttatgacttggaaattaagtttgtcattatgaaagaagagaaatattctgcattttttggatcttgtcttttaaggggcacatggagaacctaaaaataaacaaaaacccctctgttgatttcgggctttttcccccctttctcttggctgagggatgtgtatgtaaa

SEQ ID NO: 77163 - DNA, 1041 bp, Homo sapiens
ttgggaacctagaagtgtaatatattttatccaggagctagatgttttgtgaaagtaggagaatccttcagaatttctagcccaccatgttgccaggtttagccacctaacctctgggcttgtgatgtgacgggctgcagtgaaggtctctgatgtggcctggagacattttctccatggtcttggggattaacagtaggggagtgataaggggattaacttggggagcagtaggtctcatcacattttataggtgagaaagtagacttggaatgtgctttgacaaggtcgtttagctaataaatggtagagccatgaacctagcccttttgcctctatgtgacatatacagtacttagcagtaagcaggaaggtaacagagttttgactagatcttgggttgttggtgaatggcacctgagatggttttgatggtcggtgacctgctctgatagcagcagtctagtttagagactaggaatttggactagtactgggattaaagggaggcaagtgagggtcctggggtacagaatgcagagacattcactctctagccctgactgggacattgaagtcagaccacctgggttatatccctattctgtctgccattagagtgatcttgaataagctacctaacttctttcttgtcagattctttttctgtaaaagggagataataatgtctatcttataggatttttgtgaaaaaactagtttgtacatgtatttataaagtacacagaatttagtaagttttagttattagtcaacacaatatacaaatgtatacctgaatcattttgggaacagaagatgaattttctccatgtaatttcagatacctggcaaagattagtattcctgattgttttcaatactatgttagtggctgggtgcggtgtcttgggtgcggtgtctcatgcctgtaattccagcactttgggaggccgaggtgggcgaatcacttgggatcaggagtttgagaacagcctggccaacacggtgaaaccccgtatctactaaaaatacaaaaat

SEQ ID NO: 77164 - DNA, 1550 bp, Homo sapiens
ttgtatagaagatgcagcatttttaggtgtagaaaatcagttctaaagatgttaggtaattttctctaggtcaaactagtggtcagtctagattgttatctactctcgcttttcacaatgaaaatctggagaattttccctatcgttaatagtagaatcaagacattctctcgaagagaatgagcatctttgagaccaaatgtttccacctccatttttgttatatatgacttttttagtacatattttataggtaacacactgatttttagtttaatggttagtttttaaatgacaaaaaatgtgacctactcaattttgaatccccagcttctaccacgatgtctgggcatatgtggttggcattcagtaagtatttgattgaagtgtttgataatagatacggcacctgaatctaactgaacaaaatagtgtaatattcttgttgtttttaaatgggccatactcttctatctgggttgtattggagttaaaaataaaacggttagactaaaatgagtttgttattttaattctctgcactgaatttcttcaggatctcattagaatttctagaatatgccctagatttaacagctggacagccagcattgtccaatagaactttctgcagtgatgaaagtgttctgtacctgtgctcttcagtatggtagccactagccacatgtgcttattaagcactcaaaatgtggttggtggaactgaggaactgaatttttattaatctaaacttaaatcactacatatggctagttgctgccatattggactgctcaggtttagacattcttgcttaataaaacgaactttaatttcatattttatggtttagaaagcctgtcattagctctagcccctctccctactttctggggccattttacaaacttatcaaaagcttgtataaggctgtaaaggaggcagtggtgaattagattgagaacaaagatgaatgatgagaatgcatgtaatttgagggttaatgaggtaagcagaaagggagatgataagaatatttcaacccaatctttgaggttatcttttgaaacactgcaggcctactttaatgtgtaaactgtgagaggtagaaaaaacacaataaaatacagccctggttttcagtaaatctatattcgaatgtaaatgtgttttggattggtgagtgtctgtgggtgggaatgacactgtagaaattctcttcaaagtgaatgataaaatcaacctgatttctagattttccaacctacctatgtccaaatgtcaagtactgtgggagatataaaacattttctctctttttaataaaacaaatgagaagagttgcctcaattggaagtatatctgaaattcagtttatctgcctctggttcagatttctcaacactggcattattgacattttgcactggttaattctttgttgcaggggctgtcctattgattgtagaatgttagcagcacaactggcctctgcccactagatgccagtagcactcttcagttgtaaccaaaaatgtctctagacattg

SEQ ID NO: 77165 - DNA, 1032 bp, Homo sapiens
acattgagagctggttttctgtatcttggattcaagtggaaatatttagattttttttattagcagttgtgttttccttgcattgtaatgactcatgaaattgtggaatatttttgccctgttgattagaatagtggttctcaaggtatagttcatggagccctggattctccccaagggttctttcagggggtccacaaggttgactaaatgcttaagtctggaaaatcatagtttgcccgtcattctttcaagtaaaagttgtattctgtgagaaaagtgaccagttaaattcacaattcaagtgcacaggtgcttttccttgagataactgtaaataagcagcagaaatgctttatgtatacttctcatttctgacaaactgaatattaaaaagatgaggactcaatgttgatattaagaaatttgattgtttgatattccgtaatgaagtgtgtttacagttgaaagatccatataattcactgaacttgtattttctgaatatccaatgcataatgttggaaaattcattcaaaatgcaagataaattaatggactttaaaagtatgaaaagttcacagttatatggtttcatattctgcattgtaactaactattaagaaactgtcacttaaaagtaccttttcttttcccaactacttaattgtaggaaggcagattttctttgtacacctccaccaaaacaaagcaaaaacagggtcagatacgagaatctagctattttcctttaagtcatttgtcattctcactcaattttatttactaaaatatggctattttcagaaaaatgttatttatgttaacatataatggatccattatttctaaacaaattagtgaaaattaaaaatttgttataatttctattagtataaatataggtggatgtaattcacatacagaaaagctctttgagggtctcagtaatttttttttttttttgagacggagtttcgctctgtcacccaggctggagtgcagtggtgctatcttggctcactgcaagct

SEQ ID NO: 77166 - DNA, 1473 bp, Homo sapiens
ataggatgtgggggaaaaaataggatgtggattgggctaattgttctatctcccactttgtagtttttaaaaaatattttatactttttgaaagttctttcacatctattctcattttactcattttaccattcaaccttctagaagccagcttctttacttcccgctcctccaagtagtatcaacggtgctaattgtaataataatagtaaacatttagagggttcatgttcattataatgtttcatagcattacctgggcagtagtagaggagaaatcctgggaaggaaatcagtataccttgttccttgggaccttaagacctgccattgtgagtgtatgagtagtttaatggtacagcttgaaagtacagactgggtcacacaacagaagttaggtgatttttaaacctgaatgttcattaggttgcagattattaccaggcagatgactcccggacataagattctccaaagtctaagatacagtggtgaggtagtaagacatacaacagagttcaaaccaagcatggaatagtagaagccagacataagcaacccgtaaagctattattgaacattacattaggtattttgactacaacataggaaattataattggaaattgtatggaccttgtagtcttaggggccttctgtttatgaactgcattaatcttaaaatttttattaaagtgtgcagtcatcaaatccagtttatggcaaatgatggtggtcgtatctttaaagtcatatatagatagttggcaaaatgactattcgttttgaatttgtgaaaacctgttatacattataagctgtgaaaaactgtctttttcaagtcttttatttttcctttaaagcctaaattatacagatctgtgattgaagatgtcattaatgatgtgagagacatctttctggatgatggagtggatgaacaagtactgatggaactaaaaactgtgagtttgtcttttttttaaaatattcctacttttcccccacaaaacattttctttagccggagatgaatctgtaatttttctataggatgaacgtatagttgagtgaagtgtgctggttttaaatcccaactctgccatgcattcttcctctgaccttaggcaagctacatttatatttcagttttcttatacgtaagatggaaattggtagtacttaccttataggtttgttttgaggattaaatggaataaccatataaaatcttagcacaatgcttgatagtagcattagcagttattattggatagttaacattctacattttatggtctaattacttgacatgtctggaagaattttgttgctttcttttttcgttttttatttttgagacagggtcgggctctgtcgcccaggctggagtgcagtggcacaatctggacttactgcaacctctgcctcccagactcaaaccatcctcccacccctgggactacaggcaca

SEQ ID NO: 77167 - DNA, 1159 bp, Homo sapiens
ccaaagggagtaaaagccgatcggggcctacttttaacattccacaattagtaacgtctgattcgtttgtttccacagtgggtacgctgcgaagactaggcttatgttacccagaggttagtcctctactaggccacgtactttaaataatttatcacgctagtggaaatgcggggtggaagaaaaccccaccagcctttggattgtaacagcacagtaactttccctggtttttaaaaatattgccaaaatactgcgactccatgtggccaacgtatagtgactgatcactttgaaatgcatgcccttgacccaccaactcgcatggcctctcgctataagagagcaagccggctgtgttccatgttcaattcaataagtgcaattcaataagcttttgacttgttctgcccaagcaaatcctgcctttatatcgaccttgcaagcagaacagagaatgctgtttggaaggcagaattcatagtacctagttttcttgtccctgggaattttgagggacttgaaatgtcgcgtggatgagtgagggagtttgtcttccagagacaaagcaaaacgaaacgtcaaagttctgtgctggtgaaaccagatttgaagaatatcaaaggcgtcttaccaaagaggaaaaaaaatgcatcttgccaagacttgaagaaagggattagagaaaccagaggccttgaatactcagaaaatgggagattgtgaatgggtgtagaggatatctatgaaccttgacatttcttttcacgccaagtccattcccctgttaacagttgcttcccagtttcctgcacagctgcatggtctgggacacttaaagaaaaaaatcacaggaaatcagtgttcttggtatattatataaagttatgattctatcaacatttgtaattcatttaatattcaggtgacagcccgaaaatttacactaaacaataccattcctgttaagttttactacatattgagaggacttcttgttacctccctattacatactcccaaacgctttgcacatggaatccctcaccttccacctagttttcccccctactattgatattcttgactaaaaggttgagtagtttcgccatcaattaaagttaaaaccactgcagacaggacagggaagaaaagctac

SEQ ID NO: 77168 - DNA, 1036 bp, Homo sapiens
ttctccatggtaaccatgtgcgaccgaaaggccgtgatcaaaaatgcggacatgtcggaggagatgcaacagaactcagtggagtgcgctcctcaggcgctggagaaatacaacatagagaagaacactgcggctcatatcaagaaggaatgtgacaagaagtacaatgccacctggcactgcatcctggggaggaacttcagtagttacgtgacacatgaaaccaaacacttcatctacttctacctgggccaagtggccattcttctgttcaaatctggttaaaagcatggactgtgccacacacccagtggtccatccaaaaacaaggactgcagcctaaattccaaataccagagactgaaattttcaaccttgctaagggaactcctcgatgtttgaacctttgttgtgttttgtacagggcattctctgtactagcttgttgtggttacaaaacaattagcacaatagcctacatctgtatttattttctattccatacttttgccccacgttgttttctctcaaaatccattcctttaaaaaataaatctgttgcagatgtgaaaagaaaaaaaaaaaagtcccacaaaccattcctggcaggcacaccccaaggccaactgagcaaccatgtgtgcatgcccccagccagagtaacaaccctgtgacctaaaccacagtgagccaaaccccaagttggctgacccactgtgtgcatacacacacacacaccaggcctgagaaacagtctgggaagcccaactccagcaaagccacatcattatcacaaattctctcagcctagaccactgagaaacacacaaatgccactagtatggattacagctgaagagactaaatggagagtacactactgtacatacctagaatcaaggtcaatgcaccccactgaactgacacccaaaggtttattggtacaaataagtgtttccctatgaagccttcttcataaaactggaaaacataacttttccaccagatgtgtagaaatcaatgtatgaacacatca

SEQ ID NO: 77169 - DNA, 1004 bp, Homo sapiens
tgatttctacacatctggtggaaaagttatgttttccagttttatgaagaaggcttcatagggaaacacttatttgtaccaataaacctttgggtgtcagttcagtggggtgcattgaccttgattctaggtatgtacagtagtgtactctccatttagtctcttcagctgtaatccatactagtggcatttgtgtgtttctcagtggtctaggctgagagaatttgtgataatgatgtggctttgctggagttgggcttcccagactgtttctcaggcctggtgtgtgtgtgtgtatgcacacagtgggtcagccaacttggggtttggctcactgtggtttaggtcacagggttgttactctggctgggggcatgcacacatggttgctcagttggccttggggtgtgcctgccaggaatggtttgtgggacttttttttttttcttttcacatctgcaacagatttattttttaaaggaatggattttgagagaaaacaacgtggggcaaaagtatggaatagaaaataaatacagatgtaggctattgtgctaattgttttgtaaccacaacaagctagtacagagaatgccctgtacaaaacacaacaaaggttcaaacatcgaggagttcccttagcaaggttgaaaatttcagtctctggtatttggaatttaggctgcagtccttgtttttggatggaccactgggtgtgtggcacagtccatgcttttaaccagatttgaacagaagaatggccacttggcccaggtagaagtagatgaagtgtttggtttcatgtgtcacgtaactactgaagttcctccccaggatgcagtgccaggtggcattgtacttcttgtcacattccttcttgatatgagccgcagtgttcttctctatgttgtatttctccagcgcctgaggagcgcactccactgagttctgttgcatctcctccgacatgtccgcatttttgatcacggcctttcggtcgcaca

SEQ ID NO: 77170 - DNA, 2016 bp, Homo sapiens
tttacataaaattagggcattctcaccaagtttctaaagatgatttctaaacattaccaaggtctaagtgctaattccccacaaaccatttcttatcttgtttaaatgagactggctttagatatcatgactcatatttatgtgtttaaggaattaaacgtgaaggagatgtataaggcaaccacaaatgtagaaaacaaatgtatgtattagtaatattctcccatgtattaactagaacaagaatgtgagatttttacatttcttctagtgtgccttagcaaatctgctggaaagagtctagttgttttgagaattgaaaaaaaaatgtgtctctcaatttgtcaattctaagcctgtaaaggcagaaactatccacagtaatgagtttggtagtgcctggagagaggcaaatgatcattggatgtaacaaaagctacaagagaatagactaaaaaaagaatttcaatatgaaaaagtaaaatctagagagatgacaaatcagcattgggtaccaagcctcaaaatacttgaactagaagccatctcttaaagttaaaagtaagaagctccaggaaaaataaagattgcatagtaaaaagggatagatggcaggattaattcaactcaacaaatatttatcaaatgtctactctggtcaggtgctgtgttagcagccagcttccctaaagggaggaaaggctagacacgaggacattgaggattgtttatttaaagtcactcataggcatgccataatggatttattaaggggaaattggggtttctgtgaatctttacaggacatagccatggagacaatcactatgttaagtaagttgctgttttcccaattgggcttcagtttcctgagacaaaaaagtgaggaagttggattaattgtttcttcaagtcctttccagctctaaagttgtgggttattttacaaaatatccattggtgccacctttcagtgactcttcctatgtttataagaaccaagaaatttaaattttgaagattggaaaaatcacctggtccatctttttccttttcacatctctctcttttttttttttttttttatcatttccccagacaacagaaacagacaaccttccaaatcctctatattgcagttgccttccacacacagatttaaaaagaggatcaaagagggtggtgaagatcaggtggaatgcttctttggaagttccactggcatcatctatcagaacaatggtgtgagcatgaagaggcacagacaggtctccaaaatagatgttaggatttgggtgctacctgacacagaagtaggtctaaccctccaagtactggggatgataggataatcaatgaggtatatatatatttgtcattttgtataaaatattgtgaaaattgaaggaggacactcagtaaacatcctgggactatttgtaagttatggcaaaaccagatgagagaaaagggacagtcccctctgtatcctcgttgtctcttagtaacatcaaattgtagttaaaaaaattttaaactatgtacaagctacaaaatagcatctctttcatggtatgtttgagtgtgtaattttagtttcttttctggttgtatttgtggtagtcagatgtgttggattgattccaactggacagagtaaggaattccagcatcctcttcctgcttgctcgtgttaccccacagatcaaaccctcaattctagttggggatgctgtctagccccacaccatgactgaagccttaagcactgttgcgcctccatgtgctttggatcagcaaccccagtggtattctaccagagcattgtgggaaagcagatgtatagtcaggtcccaacagcaaattgttgggtgtgagagttctaaagtataggggtgagggaagagaaggatatgaactcctctgaccttaagccagcattcatttaacttttatgtctacttaacaagagaacctggagaaaactaccgtattcaagagattaatcaaaatcag

SEQ ID NO: 77171 - DNA, 1085 bp, Homo sapiens
tcaagagctgtgctttcttttgagtctagggcctgctttttgactttacagcaaaaagataagaaatgtactcatgacatgtcagacaagacaatgtgaggcactttgtggggagaccattagatgatcccccttgcctgctcttgcagacatagtactagttattccttatcaaaagtttgcatttcattcatattaaatattatctggacagtttcattttttctatttggctcttcccttactgtgccttcctgcattattggcagggttcataatccttgagaacattgtttgatttaaaatattttttatttgaaatgagactgatttctattcaaatccagtggctgggagtaagagtttatttccctagaaacttatgtttctgataaatgggatccatgaaggcaaggactatatataattttttgtgtttccaacacctagcacaaagcttggaatataatagggttcagccaccttaaatgcttgccaggagggcaaacgtatactcatgaaataaaggaaaatgagtatgtattcaataaatgtttgctgaaagaatactgaccctgagactcgaaggctacttaacccttacttatcatcaaatactcataataaagccagcaagcatgcttttatttcctgaaggacttaaataattttgctttccttttactcctgcctccagagtcaagtaataaaacctgtcagcatttaggcacttaatatgctgctgaatttgaactacaatgtacctcattcacattgaaaaacatttttgtgccccaaagcatagtagcatagatgctgtccatagtcacggtgattgattgctttgttcctgcaagtcaaacagatccatgagcctgagccttgcccatttcaatggtcagtaggaaaagaaagcatttgatagagtgcacaaccagtcttcatgcagtaggtctttgttcttccagcactaaccgctgaccgttactttgcatttattttgtcaccacagtaagatggaggtctgagatagtaaggtcaaaatttgtgagataaagtcatgatttcagaggtgatatatattt

SEQ ID NO: 77172 - DNA, 1933 bp, Homo sapiens
aatcccaaggagtgtggagtgcagtgacaaagccttgcggcaaggaatcctgatcccagagtcatgatagggtgtcttcctgagtcatgatagggtgtcttcctgagtagctgaagttgcagtcaatacctgctgtggccactgcatgttgggaacagtataccagatcttcctgtttgcagttacttgtattttaccaggaaaccctgagaatggtggcttttggagaggctctttgattctggtcatgcctaaagcacgaggttcacctgactgttggagcttactgtataattaagcctccttgtcttgtctctgcttatctcacagcactggtatgtggtttgttgtgactgttacagtcaggaaaagaacctcccacatcagtgttagcacgattgccttctgatgttcatctgtcactcgcataactttctggcaaaggcagtcttgagaagttaattaagaatccatctctttcactctgtctagaaaaggttcagaaaaggtgcaaaacaaatttcctctttgggtcttactagacctttttgaggtgtctccattctttaactgttaagctttcaagacatttccctcctggctctagatcgtttagattggaacactttttccatctctctaaggtttcagtcacaggatttgctatcctgagtcacaatagacaatggaaaaaggcacaataggagactttttaattttgtgaatggacccacattctgcaaaatgggtgttgaggggaaggcaaaattaatcttagttttcttcattttggagaaaagagacattaaatataagatgatgttcagttcaagaggtagattcaatctcagtgaattcccaaattcacactgaaaaatacagtccacttctgattcctgaaacaaatatacataatacctgaggcatttgtaaggggcatttgggagttctttttatacctcatgaccaatagacagttgcatgtccctttaacccaactttataggaaatttaagctgcaaagataatttttaaagctgttttaaaattaagcttgaatgagctttcccccaaaattcagagtttgataatcacagtattggattggattgaaaaggcatctctagggtagagacgtggaaaagccatatttttctaatgttgggaacattatattctgattccaagagtcagaacgctcactccatcttctttttcttcatctgtttctgggacaattaatcttcttttccttcatccgttcctactcacctctgcttcttatttgtatcttagtgttttctcccatgaagaatacaagtcgggggacagaaagcacacttcattggatttgtagatgatgcagaaatgaaaaatatctccagtttttggctgatggattcaagattaatgtattcaatgaacaatcattggagtctaaatgtgtattgacactgggatatagaaatagttacagtattttgaaatatctgaactaagactgaaagtaaaatgatgattgaataggcattaatgagaaaccctatattctgggtttttaaaatgcaaccctctaagtacagagtggagtgtgtgtttgtggatgtgtgtgtttgtgtgtgtttatgtgtgtggtgttgatgggaacggtgttaggaagacctggtttcacggtagtttatagagaaatatttccttacagaaatggaggttcaatgttgaatcagaaatatatcatggctattcacaaagctaatgtagtcagctggtgttaataaaagccttacatgcttttattaaccctccatctagtccatatctaaatggagggttgagttcaattatgggtatcatattttaagagagacattaataagttgattgtgtccatagggaggtgaccagggttgtaaagggtctgatgatgcaagaa

SEQ ID NO: 77173 - DNA, 1056 bp, Homo sapiens
ctgctggtggtagcactgtaacttctaccttatccacggggcccctctgaattgacagaggaagagagaaaaccctgaactctcctttgacacggaagcccttggaaagagacaaccatggaattaccggattttcaagctggaagggaccttgaataacttagtcaagttatttatagatgagaaaattaaggtcgggaaggtgatgtgacgtatctagagagtcatgcagtcacatccagggtccttttcttaatatatcactggtgcctcctggtagatgaagccaaatagacacaaatattgaaataatttccaccagaagaacagatatttgcagtttttccagtatgtacaaacgtatctatttgtttcaaagtgatttctcccaaacatttaaaagtactgcatgaaggtttattattattattattataagcaacaaagacttatcggctaccctaagcaacaaaacaaattattggataggatagctcagagacctgaggaaaagactgatcaagagaagactttagacagacagcactagagtagctctggtcatagagactaatggatgtctcctcagcatgtagccttaggacaaatcatcacagactattttttgtttttgtttttttgtgtttgtttgtttgtttgtttttttgaaatgaagtctcgctgtgttgcccaggctgaagtgcagtggtgcgatcttggctcactgcaacttccacctcctggattcaagcgattctcctgcatcagtcttctgagtagctaaatttttgtatttttagtagagacaggttttcaccatgttggccagactggtctcaaactcctgacctcaggtgatccgcctgcctcgtactcccgaagtgctgggattacaggtctgaggcaccgcacctggccctattttttgtacttttgcaacttggctcaagagactaggggagaggagtgcattttgactgacgtgaccaccaagacaacatgtagcaccggggaagattatttcccaaaaggagagaaagaaaaagactgctacca

SEQ ID NO: 77174 - DNA, 1031 bp, Homo sapiens
tgagctgctttggaatgtactggattccagttaaaattctagtaatccctcattcctatacttcagttttccttacctctagagcccctgaacagtagctcatatgttctccttttccttttagacaattcctcctcgcttcaagaagatgaagaagtagagatggaggccatcagctggcaggccagcagtccagccatgaatgggcaccctgcccctccagtgacctctgctcgttttcccagctgggtcacctttgatgacaatgaagtcagctgccctttaccaccagtcacctctcctctgaagccaaatacaccaccaagtgcatctgtgatcccagatgtaccttataattcaatgggatcatttaagaagagggaccgtcccaagagcactttgatgaacttctccaaagttcagaagctggatatttcctctttaaaccgcacgccttctgtaactgaggcttcaccttggagggcaaccaaccctttcctgaatgagactctgcaggatgtacagccctcccctatcaaccctttcagtgctttctttgaggagcaggagaggcgctcccaaaacagttccatttccagtaccacgggcaaaagccaaagagattccctcattgtcatctaccaggatgccatcagttttgatgattcaagcaaaacccagtcacactctgatgctgttgaaaaactcaaacaactccaaattgatgaccctgatcactttggcagtgcaactctacctgatgatgacccagtagcctggattgaactagatgctcacccgcctggatcagcacggtcccagcctcgtgacgggtggccaatgatgttgaggatccctgagaagaaaaacatcatgtcctccaggcactggggaccgatcttcgtcaaactgacagacactggttacctgcagctgtattatgagcagggcctagaaaaaccattccgtgagttcaagctggagatctgtcatgagatttcagaaccccggcttcaaaactatgatgagaa

SEQ ID NO: 77175 - DNA, 1039 bp, Homo sapiens
gggacctgaggcttacagatcttatataattttcccactgtcccctacagcctgtttgtggcacagcacaagtccgctgtctcttgacatgctgtattccttgtggagacatttgcagtgtcctctctgatgattaaatgatgtaaacaccctctgtatcagtttgtcatgcaatcaactttatatgcaaagctgtgtattagcagaagttgccactatggattctgacaccatggtcattctcttactttaatgagtgtagtttgactagaaatgtcagtatagaaccagtcagccttgcaaacactttctgagttgttgcataaatgctttaacattcagaagcactaacctgctgcaccatccgaagggatactgagcctatttcgttatctatattaaaatcttggatccaagtgagactttccatcactacaggaagagcctgtgtgtattgagaaagttctgccattttgggccttctttattagactgtctctcttagactactttaacacttattgttagcctctgttccagaaatttgtagacagataggggtatctgatgctgattaaagtgagtattgctgtaagctgggcacagaggggcagctgatatggtgcatgcttacaaatgctgttctaaatggttttccacagacaggcacagtccagagtggctactactcccattagtcctgatgtttttgtgtcctcgcctccagccttctaataaaccactctgattgggacagccaactgccctcagtgcacagtgtcatgttatgcattggggcttgagtcatattcaagtgaggagggaggtcaaagctagcaaatcaccatgggcttaagatctaggcttaagctgtttagcctcagaaacttaatattattgtattgagaagcaagcatttctggagattgacaaatctacaataggagatgtatattgggcaatatgactaataacagttatttgttcaaaaactaaaagctactaaaaatggagtttcctctgcatgggctcagttctt

SEQ ID NO: 77176 - DNA, 1001 bp, Homo sapiens
cttagtgccatatattaaaatagagaacatcagccaggcacagtggcatagacctatagtcccagctacttgagaggctgaggcaggaaaatcacttaagcccaggagttccaggctgtagtatgccatgatcacacctgtgaattgccactgcactccatcctggacaacataaactccatctcttaaaaaaaaatagagcatatggcgcctgtagtcccatctgctcagaggctgagacacgagaatcacttgaacccgggaggtgaaggttgcagggagccacaatcacaccaccgcactccagcctgggcgactgagtgaaactccatctcaaaaaaaaaaaaaaaaaaaaaaaaaaagagtatgtatgtgtgtgtatatataaaatagagtgtatatatatatatatatagagagagagagagatttaaaagaatcaataggattctttggttgcaattaaaaaaaattaaaaaggagagtgtattgcaagttgagggtgggggctgctcacagagttgaaggggaagttaaataatcaagcagaaaggccaagctcagaaaaggccagagctagatcagctcttgggtcgctggcaaggagttatagctggtttttgctgagtaccactatcttcatgaatgagcaacaaccattttcagattcattttcattttccaaaagaaccaaataccaggcgaaaagttttgcattgatttgggttagcatgtgactacatcagggtgaggaaccttaactgacaatcccaccagtcaatctctaataaggtaagtcccttaaaaatatatcttaaacgagacttaaaaaggactaaccataaaggaaaaaattgataaattaaaccacatgtaaattaagaatgtctattaagcaaaagccaccattaagaaagttaaaggcaagctgcagcataagaggaggagatatttgcaataaatacataataacaaagaaatcaaatcctgaatatataaaa

SEQ ID NO: 77177 - DNA, 1056 bp, Homo sapiens
ttattagacgccaagagggatacccttgaataaatgccccaccttcagcatgtagaattctggggttaggttttgtctgctcagtgttcttttaaaaataatttctaggctgggcacggtggctcatgcctgtaatcccagcactttgggaagctgaggtgggcagatcacctgaggtcaggagtttaagacaagcctggccaacatggcaaaactccgtctctactaaaaatacaaaaattagccaggcatggtggtgggtgtctgtaatcccagctacttgggaggctgaggcatgagaattgcttgaacccaggagacagaggttgcagtgaactgagatcgcgtctgcactccagcctgggtgacagagcaaaactctgtctcaaaaaaataaataataataatttctgagtctgagctagattgcataaatccagagcaggtaagcgtaatgacagtgtttcaaacatacatttctgtttgggaagtcctttcagaacccatttatattcaatagacaaaagccattttcctttagcttctgtgtcctaataaaagataaagatataacagcttcagatatattatctgattatcaaccatgcccatcagatacagttgacccttgaacaacatgggagttaggaatgccacccccaagcagtagaaaatccacatataacttgactccccaaaaacataactactaaaatagccaactgttgactggaagtcttaccaataacataaaatgattaacacatattttttgtgttatatatacactacagactgcattcctacaataaagtaagctagagaaaagaaaatgttattaagaaaagcataagaaagagaaaatatatttactgttccttaagtgtaagtggattatcatcctcgtctccttcacattgagtaggctgaggaagaggaggggttgtctggggtggcagaggcagaagaaaatttgcatataagcagaccagtgcagttcaaacccctgtggttcaagtgtcaacagtagactattaattctttctcatttacaag

SEQ ID NO: 77178 - DNA, 1405 bp, Homo sapiens
attctgcttgctctcctagaatctggcgtctcttggaatgtagacagaatgggcttgcttgctgtggcccagagaccccatcaccccaggtgacagtgaccttacactggccacgtgagtgaggcaattctagaccagccagctaacctcagacacttgagtgggcctagcagagatcggacaaatccatccagatccatagactcataagcaataataaatgcttattgtttcaagctactgagttttggaatagtttgttatactaacatagccaactgatacgtagttccctggacatggtccccttatggggtctattaatgtcattataaacccttagttcaactcagtagaagagattcagtcactggatggaggggttctattaaatgggggtggtgggtcctcaattcttgtgattgtcagcattactctgagacatttttaacacagatgcctaggccttgtactagagtattcaatcaaatatctgtagatgaaggttcggaacctgtaatttttaaagctctggtaattgaccaggattaaaacccaataattcaatggtcttgtcaatcccttccattactgaaagatgcagtgattccagttcatctatacttaaacaaataacactcaggtggttcagagttcattactgacttgatagacttctagctgcaaaagtaaactttatgatcacctttggccaaaagcaaactaacccagatgctagatgggaaaaatccacagttgcatattgatggctagaatgtatattgtttaccattgtatctgcctggggtttagacatgatgcggactcatgaataaatcctggacactgggaatgtaataggaccttgctttgaggatcttagagtcaattgaaaaaaaaaatcaggtataaattacttataatgtagtaagaaaacaaagcaagcagtattttaaccattaaatttcaggtgaaattttactatggcatatgtaccagttgttgcttacaataatgctgctttacaaacaaccacaaaatctgttttatacaacaatgtgcatttcctaaccactgtgtctgtggtttgaggggggcaattggttgattttaggctggactctagaggcgggtagctttataccatgtctctcatccttcccttggcaccagccgctacctttagcatgttattctcgtggagatggcagagatggggctacaagccacagtgtgcaagctcattttaagcttctgataatgtcactaatctgttagcatcctgttggtcaaggaaagtcacatgaccaagcacagcgccagggcagggaaatgtatttcacttttttatttgttttaattttttattatattttttgagatagagtctcactctgtcatccag

SEQ ID NO: 77179 - DNA, 1088 bp, Homo sapiens
atagggttgttgagaagactgaatgaaaaaaacgtatttaaagctcttagaatagcctccctggctgtctgaggatagaccgccatcatgaatgacatggtaactatctgaactagaaagttcatgaccaaccaacgacttcagaggaaacaaatggtcattgacgtccttcaccccgggaaggcaacagtaccgtacctaagacagaaattcgggaaaaactagcaaaaatgtacaagaccacactggatgtcatctttgtacttggattcagaactcattttggtggtggcaagacaactggctttggcatgatttatgatttcttggattatgcaaagaaatatgaatccaaacatagacttgtaagacatggtctgtatgagaagaaaaagaactcaagaaagcaacaagagggacacaagaacagaatgaggaaagtcagggggactgcaaaggccaaagttggtgtcgctaaaaagaaatgaggtgtctagcagtgagctgtggagattggatcacagctgaaggggtaaaggtgttgcaatgatgttatctgtggccattgtggatttttcacaggaagatcaataaactaaaaactttcatgtgaaaaaaaagctcttaaaataatgactgatataataaatatgcttaatggatagatgtcagctcttccaataatttattattattttattatagttattatgacaatgtcttgaatccataaagagcaaatctaatctttttttcatatgacagcttcttccctgtttgaaaagtgctaaaatcctcagtcccagaaagtctgcttgtcaatttagttctacagaaatggcaaaaagttgtagatgacagtaagttcaaggcactgaggtaggtttagtatactcaagcccatgtggggaacatatggtaagatatttttaatatctgagtaataatgccttcttcccaggaatttctatccccaaaagagaggtttttaaagagtagaagtaaaataaatctaaaaagaaaatggttgggtttctttgccggttcaaaggtaatccttgctttatgatgcatataaaattttgctt

SEQ ID NO: 77180 - DNA, 1064 bp, Homo sapiens
tctgccatacagggtccttctcaggctgtgtttatgttattgctatcaggtggatttaccatacgggtggctaaaatcgtctgcatccctgatgtttgtatcccacttgaacttaagagtccagcattttccaaagtgtgtcccatgcaagaggccaaaaagatccagatgctggggccagtgtattaggtcacgctgtgccccctttgttggagatttataacatgtattcgcttattaaagactttgaaaattcccgaaattatatgtatgtatatgtataatttatattcgtatacatgtatatgtatatgtatacacacacatacatatacaaatgtagcttttcattaatctctactgcctacttggtcagatcgtggtgtacagaaacccaaacatacataaattggcaaagctgacttggaagtacatgccattttagcagtgttttctaacactgctaaagtgttagaaagctagagaaaccagaaagaaatattttgacaaactacctgtattagttaactttataaagttagccttactttgtctcttgctctgctgaacctcttggcctttttaaaaaatataaaattctagattcagcagactcaaaactatattttgccagactttctttgtatttaaaccctcataggctttaaaacaaatttagaccagatgttcttgattcatttgcatttaacggatcacagtggactcctgccagagcagtaggatatccctagagattttgaactcagtttctttttctcagaaacaagtgtttgtattctatttggattttagagtccagcatttcccaaagggtgtctcaaagtgatttcccaaagtgagtagagagttgtagcctggggaacctcaatttttgtgacaacaactttagatgctcagaaaggttctcgtcattatttaataagatcatcgcctgggctgcatgtctctgtacaagatataacatgtttctctgttgcctgttttgctgtaatcctgctgcagctcatagagctccaaaccagagtggagggcccagatttgca

SEQ ID NO: 77181 - DNA, 1064 bp, Homo sapiens
tcagataacaacaagccattttctaaagtggtttctagttactatcctaccagctgtacatgaaagacactgtggctccatttcctcagctgcacttaggattgtcatatttttctatttttgtgatcagggaagtggagaaagaaagggggaagggtaacaggatcttaatatatcatgtgatttaaattgcatttcctagattactaacaaggttgagagcatccttttttggtgccatttggatttttctttcatgaaatccctgttcagctatattcctgttggtgtctctgcctttttcttgctgatttctgggagttcctggtgcattcaatgtgtggcacatattatctcctatcctgtgaatggtcttttcattctccttatgtcttttggcaaaaataagttatttattttaatgatacagtttttttcaatttctcttttattattagtgctttctgtgtcttggtaaagaaaatatttctctactccaaagtcatgaatgcatttggctatattgtcttctaaaatgtttcttatatagccttcacactttgacattcaatctagctagaattgatttttctgtacagtttgaagtacaagtctagtttcactttttcatgtagatatccagtttttctaatacaatgttttattgttgtttattttaacatgaatacttataaatatattactcaaaactcagcttcattcattctaaatagtatgattctgcttgttaatatgggtgaaagccatgctataatttttttttctttccaacatttattttagattcaaggggtacatgtgcaggtttgttacctgagtaaattgcctgtcatgggggtttggtctacagataatttttcacccaggtaatcagcataatacccaataggtagtttttcaatcctcactctcctcccaccctccaccctcaagtgggccccagggtctgttgttttcttctttatttctgtgtgtacttagtgtttagctcccatttacaagtgagaacatgtggtatttggttttctgttcctgggttaatt

SEQ ID NO: 77182 - DNA, 1072 bp, Homo sapiens
ataattttgaaaactgctcaagtatgaataattccatctgttcatatgtgtgaaaatttaactcaaccctgtggagatggagttttctaccttaggagggtcctgtaggatgggttcccagcagacttgatgcccagtctgtaggcaagaagcagaaataaaccatgtggagggccagccccacctcaagaagtgtttctaacctggaaacccaaggagcataggggacggtgcacagcattagagtggtaaagaaaatggttcaattccaaattttctgccaatacccaacttgacccatcaatgaacctaaactgaatcaaaagctgcagagtacattcctattacccaaactaacctctcccacataagctaattccctcttgggtttcctcccatggattgtgtttaacaataaggatagagtaattggcagagctaaggccaattacacaggagagactaggcgttagccccccactcctgcccccacataatggataatgtagacattccccaagttacacagtcattccattcaggaggctgttgtgcagctcagattttaatttgaatccaaaatgtttgaatgcatgtgctgtatattgcaataataccacatatgtaactgcaggcattatgcagaaataacacagatgtttgcagcaagtagagacagtgtgagacttgctgcaatcactgctacctgctctgttcttccagtaatactaagctgagtaatggctcccaaagacattaggttgtcctccctggaacctataaatattatcatatttgggaaaagggtctttgtagatgagagtaaggattttgagatggggagataattctggattatctgtgggccttaactgcaatcacatgcatccttatgaaagtggcagagggcgattttgcttacacagaagagaaggcactgtgaagatgaaacagaaagaaatttgaaaatgctgatcttaaagattttagtgatgaagccacagccaaggaatgccggcagccaccagaagctgcaagatacaagaaacagatgcttccttaaagcctctgc

SEQ ID NO: 77183 - DNA, 1948 bp, Homo sapiens
ctgtctgcgtgagagatcatgaggggctgagccaaggcattggcagtgggattggagagggtaagctccagagctcaaactcgttctgaaacttagagctccttttccaggatgcttgacaccctcttcagatgaacagagtgtaactcactgtgggctagacataccattcctgctcccccttcctgagtgcctgtgcccctcagctcttttgctcagacccctcctttccggcttagggtacagttcaagaccacctatagctcaagctctcagaagtctcttaacactcttacttgctgctgtcctacttttggtgactaaccaccagaataggttagagagcagaggttattgttttaggttgctgtggtatctccctgcagttgacagctgcttgagggcagagatgctgttttgttctcccttgaccctcaggccctagaatgggcagaaacagtacatgttcctgatgactgtgccccccaactttgtgagacacaccggaggtactgatggctgaaaaattccatcaccacgcttctgtccagcactgtctgaggaaggcttatctcccttaagcacacttcttgagtcactctctgcttttaaacctcccacagcttctcatttccccttgaactctccttagcttttatggtcaatcaatcccttcactccatattcccccagtagatacctctgctctcatcagacagaggcttgttcagacagaaacacaccttgttaaggtctgcttctgatttttactgtcacttgcggtgatcccctgtccagaggcttccctcacttgtccctctgttggtccagaatcaaggacatccttcacatctcagaaacccacccagtcccatatggttccaactctcagagatctccctacggctaaactgtggcaattagaggactgtcataagacaaaactacttctatgacccccatcttatcagacaattgcattctcccttctacaaatttttgtataatgctgagaaagaagtagctctctgaaatggcaactccaagacttcaatgaaacttttagcatctgttggtcaatcctcctgctgatactgagtcaccactcatttgtggtgattctaaacctcattttatgattcacattctaaaaatggggtgaggtttttaccaagcaactaattccagtatgaacttaacctcacaattattgggttcttctgtgggtttccagctgcttagcacagcacttttcaaggtctgatttcttatggcttattggtgtggctcttccatggcaaatacctaaaatccattttatggatttatggtatggaatatgatggggggttccatgtgatcaatttgttccaccagtcttcattgggaccactcattgtctgtcaccagcccatgtctggtctgggacaagtgaaggaaggatagataaagttttggggctcttttttcgttcatacgttctgaggaatggtcttggtactttggccagaatgcacctatatctataatgaagaggatttagaatctgccttctgggcactgtagctgagcacatgactctacttagcattttgaacaatgactgaaaccagattctgcaaatgacagaaatgcagtggtttcatgaaatctgcattccagtcccaagacttctacgaacaagttacgcaacgttgggcgagtcatttaacaatagcagcagtgctggcgatggctaacattggtttggaatggagcctggggcacagtaagccctctgtaaggtcacctgctgttttcattgtcatcgttacagagggtttattacatccagtccttagtacttggcgtacattatcttgtttaatcctcggaattatggagtgagttttattattctttctgtacaaggttgaactgaagcttaaagaggttgagttatgagtcc

SEQ ID NO: 77184 - DNA, 1322 bp, Homo sapiens
tctccattgcctttatgacaaaacccagccttcttggcatggcctactgggccctgtctgacctgactcctagctctccagcctcctgtcttacttttctccttctggctcattgcttcgtcaaagtaaatcacctatagttcagaaaacatatctttttattcatcttctggactcagtaggggcataatacatttttaatgcagctgttttgagtggaggccttgaaaaaactattgctcttcacattccaagtcgggtaacaaaaagacatcctcataccgtctcagtgcttcatcccatccctgccccctgacctatttctaacattaatgctgaatctcaggccatccttgaacatgaacctcatttctgagcctctcgtcctcccttcacatcatgccttattcatgtccagatcccaccctgtctgtgacacacactgcaggggttggggtcagtgatgggtgatgttcaggtgtgaggttagggaggggcaggtttgggggtggacgtaggaatcagggaggttgcatacaccctttgatagcaaacaacagttttgcatgttaacgtgagtggttaagcatggctgagtgcaatggtaccctcttattgaccattttgtattgtcatgctttgttcttatagataccatcctgccagcttggaatgtccattttctccaccagtgacccctgcctcacagaactaatttctattcatctttcaaccacttgttaccttccctgttattcttcactgaccccaaattgggctaggtgtcactcctatgcacccatcgcactgctacattctcctcattgccctggtcacaccatactgtgattatttatttgcctgtctctctctccaaggcaggtgctggatcttagtcctctctctgttcttagaatttcacaagaacatccctagcaataggagatgctgaatgcttattgaatgaatgaatgaatgaatgggcgatgttctgtgacagacttctaaaaacctgcagatgctccatgagcataaataacccagagtccaataagacctattagatcatctctttatattctacgcatgtgacattgcataccagcattgattcttatccagattttaactttccgtattggccatctcttaggcacatctcaaaccctcttagccctacctgtctctgggccactggactgaatcattcggccatccgaggctactactgcaggtcctttcactacttcaggacccagatgaagtaccacgttgaagggtgtggaatctggatttctcatctgctgctaaaggatctagca

SEQ ID NO: 77185 - DNA, 1006 bp, Homo sapiens
tcctgcaagctgtggcatttcataacatacctgctctccacatttagaatttactttaaacataggggatgtcagtagtgcatttcatgtatcaaaacctcagactccactctaccaaagcagccaggcctcagtcaacagacatcgactctcgcactgtgccaagcccacccagtgtgtcctggttccttgtggctgtccctggcagttggagacacccacatgccccagccttcagtcagcagacacaaacttgggatgcgtcggtttcttgtttgtgagaggcctggttcacaaggataacatcatgatcagccaggggcccctgtgcagctgccccatgaggccactgcagcagcctgtgttttagcctttggccaggctgttttggttttatgcccatgcgtctgttttgttgggggaagagggaggggaaggattctcagaaaagggaaggacgtatcctccgctttgctgaaaacggaaataaggaattatcagttcagggtcagtagaagccacagtgcctggcttccttctgctgggctcctctggaataattttgttttgttttgaaaggcccgaaagcaacttgagccagataagttgttctagggtgacagtttttaacagggagtccacagatccctaggactttgagaagtgtgtctgtgaagtgccttaaattataattaatgttgcatgtatgtgtatttttccagagatgagagtctctggcttaaattataactcaaagagattcagagagctataattttttgtttaaaggctaagaaccagtttcaaggagaggccttcaagtctgagttgtacatcttggtcttggccctaacttgagaactcttcctggttggtgacttgtgtacgtagtgataacatcaagaaaagtgtgcagcgcaccttaggtatacctatagaaggtcatgttgcaggaagatgaagatagtttcactttttcaagtgctggaaagctggaaatctagaa

SEQ ID NO: 77186 - DNA, 1046 bp, Homo sapiens
agatgacttcttaaagctgtcctttcttgactgccatcggactatttaatctttgcctaaattatcaaaagcactgtttaatctgaatggctgcataacctcctacaaatgaagccattcagtgatttattagtaggtgaataacactggactctgatttggccctcttaacatgttcattgtattaataggaaagcactttggagctaaggatgtcaaacgtctatataaataaaatctaatcctattataaactctgtcaaacttgcaggcagttggtcctactccacttgcagtctaacctggaaaggtcaaatgacttgttgaaagtcatgcagaaatcccctggtgcttctataataactgaccctgcttcccctgacatttggtggtgtctagcttaagtcacttcatatctccgtaaggatggtgacactaagaatgacattaagatgacactagggctcctgtcatttagataggatttctcctactcatattatgccccatgggggctctcagctgtgaccccaaagggtccttgttaattttaagcttggggtgagatcattgtacacttctctttcaggcttctccctggctttcattgaaagaaggtaccattttagtgctgtgtgtccatgcaaacacaccatctgaatgaaagggcattctcaagcatatttcatgccaaatgccgagaagtagagtgggaccatcagtggctttctatctacctgaactttgaagttagacactagaccattgccagcttgatagtccttccattggctgccctttgaagttagctaactggtttaaaaaaaccaaatgggatactttaaatgaaaacagattttatttgtttgccttagaaacggaaaacatttatcttaagtttttttggtttttgtttctgtttttttttgagacagagtatcattgtgtcacccaggctggagtgcagtggcaggatctcagttcactgcagcctctgcctcctgggttcaagcgattctcatgtctctccttccccagtagctggg

SEQ ID NO: 77187 - DNA, 1057 bp, Homo sapiens
catccagagaagatcttaaaagttatacctgggaaagacacaaaaagcttgaccgaggggtaacacttgagctgagtgtagaatgatgagcaagtctcttgtgcaggcaggggtgaggtgggattggaaacaaggtagagcagagaagagaagacattccagactgagagaagtgatcaaaaggactgttacagtcagtttaacggtaaataacaagtaacccccaaatctcagtgatttataacagccaagatttagttccctctcatgctgcatgtccagtgtaagtcaggcatagttctacccctcacttgtcatcattctgggacccactgaggcttaagaaacagcttctctctgggacaatgtggatcttatttatgacaaagggaaaaaggacatgatagaacaaaactgtagcatctaaagtctgctcagaagtagcagccatcacttcagctctcatgctgttggtcaaggtaactcacatggcaaagtctgctgtccgtggtatggggaagtctaaaccagctgcagacagcaaggtatggctgagcaggaggaaaagtgctgaaggaaacaagatcaggaggtggcccagtggcagatgatgaaggaccctgggtcgggtgccaggggattgggactttatccattggcagggagcagccactgaagagttttgagttgggctttgacagggtcagattttcctgctgaacacacatttctagtggccaggtggagagaagattgaaataggtgagctaaaaagcaagaggcgatgagggccagggcaaatacggtggcctgcagtctctctctcaccatctgttacatgacttcaaattccactgctagaaactgatttagttggcgcttgagcagcttgccttcttcacaagttctctcctaaaatgcacgtgctctctcatcttgaagtcgttattttatatcacctgaagcagtggatctcaaactttagtgtgcatccgaatcacttggagggattgagaaaatgcagattgctgggcctggccccctgagttcctgaatc

SEQ ID NO: 77188 - DNA, 1091 bp, Homo sapiens
gctcagaagcattggatcttggataaaaagcctacatgatgcaaactgtggcaactgagatgtcagatctcaagatctcaaattgtacttgtgggagcacagtcagtgaccccagatgaccttgactgacctaaaagttgtgggggaagtcggatgtcagagccttaacaccagcaggtgaccatccaacctggggcaatgcctgcctgttcaccacttagcctctttctggcaagtcattagaatgtcctccatcttcattggctgcaacttgatgagctacagcctctttcctaacttcctttatgatgctagtttaggttggttataccagcttggaagtatgcttagattaagttacagcagatacacaaattagatgcaagtaaaaaaaatcagaatttctgtagtagaaactacgaaaaataaaaaggaaagtttttactttttgggtatttttttacgaataagaaaaagtgagcgttaatcagttcaaaaggaggtactgctgtgtaatgggctttgtacgttccttctcatgtcacttacgtcactacttcgccatcaaattgaacaagcttttaattagatcctgaaaattcactatgctagtagtttattggtagtattatattttgagtagaactctgattttccctagaggccaaattctttttatctgggttaatttcttttaaacataacaatgttaatgctgaattgtatattaaatcccatttctaaaaaccacacaattttttctcatgtaagttgagtggaatgtggttagttaactgaatttggaatgttcatataaataatttgttgctgctcaatccggtttcccactgcctcctctctaccgcccagtataacctcgttaattcacctctcggacttggaaagaatgtctcataagtcttgggagataagagattcaggtatcccaagtaaggattctaacttcgaaaatgaatatgtcattgagttttacacgattcaagattcaaacgtgggcaacagaaatctctgttcttggaaacagatttatttcaggatgtgaaagcccagctgtgggtttcagagtttgc

SEQ ID NO: 77189 - DNA, 3962 bp, Homo sapiens
cacacacacacacacacacacacacacacattgcaaaacgtttttaaaacaaattattttaatttctgtacttacttctggtgatgtaactttcccagttccttgcctgacattttagtgataataatggtttctatattattttcattaagattcgagatatgttcacccaacttgatatggaccagcttttgggacctgagtgggacctttacctcatgaccatcattgcgctgctgttgggaacagtcatagcttacaggcaaaggcagcaccaagacatgcctgcacccaggcctccagggccacggccagctccaccccagcaggaggggccaccagagcagcagccaccacagtaataggcactgggtccagccttgatcagtgacagcgaaggaagttatctgctgggaacacttgcatttgatttaggaccttggatcagtggtcacctcccagaagaggcacggcacaaggaagcattgaattcctaaagctgcttagaatctgatgcctttattttcagggataagtaactcttacctaaactgagctgaatgtttgtttcagtgccatatggaataacaactttcagtggcttttttttttcttttctggaaacatatgtgagacactcagagtaatgtctactgtatccagctatctttcttggatccttttggtcattatttcagtgtgcataagttcttaatgtcaaccatctttaaggtattgtgcatcgacactaaaaactgatcagtgtaaaaaggaaaacccagttgcaagtttaaacgtgttcgaaagtctgaaaatagaacttgccttttaagttaaaaaaaaaaaaagctatcttgaaaatgttttggaactgcgataactgagaaactcttaccagtccacatgcaattagacatattcagcatatttgttattttaaaagggagggttgggaggtttcttattggtgattgtcacacggtataccatactcctctccttcaaagaatgaaaggccttgttaaggagttttttgtgagctttacttctttggaatggaatatacttatgcaaaaccttgtgaactgactccttgcactaacgcgagtttgccccacctactctgtaatttgcttgtttgttttgaatatacagagccttgatccagaagccagaggatggactaagtgggagaaattagaaaacaaaacgaactctggttggggtactacgatcacagacacagacatacttttcctaaagttgaagcatttgttcccaggatttattttactttgcatttctttttgcacaaagaacacatcaccttcctgaattctttaaatatgaaatatcattgccagggtatggcttacagtgactactattataatactaaaactcagagaatcaaagatggattaaactcagtggttgatgaaagccaaaacctgtttgtactgttctatactattcaggtatctttttatttctgatagttttatattataatagaaagccagccactgcttagctatcatagtcaccattttctcactgttaacattaggaaaatcaaggctactatgcttcaggattgtctggttaaatagtatgggaaaaaaactgaagagtttcacataattacacacgtgaaataattaaagcttaaactgaatttgtatttcattttattgtcagatggtggtgttcaccagcctgtatcttgtctgagactgcattcgtatctgagcaggttttctatgcctactgatgtcagtatgtttatactaaccttcatgcttttttcccagaatccctcatctgccagaaaacttgaaaagtttattgcttgtagagttgtactgctttgatttttgaagttggggtagtagttagaactagatttaactagtctataatgaacatgaaggcttttatatatgaagttgtatacctttttgtgtttagagaattatgggaaacctggtaagcaaaactttcctcccagataattgcttccaaattcgaagagttagtcaccaagagagccatatgtatgaaagcgtatctgtgaaaggtaggaaacttaccccccctaagtgtaatgttgctttaggcaactcttgtaaatagtgagacttgtttggtctcttacatgtagagatttgagtgcagttggtacagtactttggtgtctccaccactgtcccttctccccgcttcaaaataagtgtaatccacggtagcagccacacttcctttagaaggaactgttataatttatttaaaagttgaaaaaccacccaagatgactaccaactttcacttttttcttctgccatccaccctcatttttcctttagcaagatttttatatctaactttccttccctccattgagtacgtgctttgagaaaacatttcttaaaacagtgtgtgccacctaaggctggatgggaaagtgcagtcttgttgttcatataaaaacacacttcttattagtttaccacttgcctttttctattgttaatgttctgaatttccttttcttggcttgtttctacttcattttaccctgggtcacttgctgccagcagtttgtgaatggtgtctttcaaataacttagttcttatggcttcacttaaagactgtctcaaaaatactttgctctcttcttcttttttgttcatgggacatggtacctaagcaaataggagttgggtttggtttttctcctaaaataatgctcaatacttacctaatcaaatggcatccatttgaataaaatgacaataactaaagctagttaatgtcagtgacattaaactaactccaggattcaggagttttaatgttagaatttagatttaacagatagagtgtggcttcatttgtccatggtagcccatctctcctaagaccttttctagtctgtcttcctgccttcgaacttgatgacagtaaaaccctgtttagtattctcttgtgcatttggtttgttggttagccgactgtcttgaaactattcattttgcttctagttttattttacagaggtagcattggtgggtttttttttttttttctgtctctgtgtttgaagtttcagtttctgttttctaggtaaggcttatttttgattagcagtcaatggcaaagaaaaagtaaatcaaagatgacttcttttcaaaatgtattgtttagcacttaactcagatgaatttataaattattaatcttgatactaaggatttgttacttttttgcatattaggttaatttttaccttacatgtgagagtcttaccactaagccattctgtctctgtactgttgggaagttttggaaacccctgccagtgatctggtgatgatctgatgatttatttaaagagccgttgatgcctccaggaaacttaagtattttattaatatatatataggaatttttttttattttgctttgtctttctctcccttcttttatcctcatgttcattcttcaaaccagtgttttggaagtatgcatgcaggcctataaatgaaaaacacaattctttatgtgtatagcatgtgtattaatgtctaactacatacgcaaaaacttcctttacagaggttcggactaacatttcacatgcacatttcaaaacaagatgtgtcatgaaaacagcccctttacctgccaagacaagcagggctatatttcagtgacagctgatatttgttttgaaagtgaatctcataatatatatatgtattacacattattatgactagaagtatgtaagaaatgatcagaacaaaagaaaatttctattttcatgcaaatatttttcatcagtcatcactctcaaatataaattaaaatataacactcctgaatgcctgaggcacgatctggattttaaatgtgtggtattcattgaaaagaagctctccacccacttggtatttca

SEQ ID NO: 77190 - DNA, 1046 bp, Homo sapiens
ggagatcgagaccatcctggcgaacacggtgaaaccccgtctctactaaaaatacaaaaaattagccgggcgaggtggcaggcacctgtagtcccagctactcgggaagctgaggcaggagaatggcgtgaaccctggggggcggagcctgcagtgagccgagatcgcgccactgcactccagcctgggtgacagcaagactctgtctcaaaaaaaaaataaaaaagaatgagccaccgtgcctgtcatctgttgtaaaatcttgagtgtttctaccccactttgaagatcactgtccagaactgaaaccagacgttgctaatactgattgaagttttaagtagcaaaaaattagtgtgagtttcagaagtcgcccttggaaatctctaggttaacagtgttaatgcatagatatatggctgtatgcagcatatctacacagcaaattagatgttatgttgggggaaaatgagttttttaattaagtttttcaatattaagcagttagataattaaacgaattttacccaagtaaagcttggcatttttgtttaggtgagggaaactcattttaaaatgaaaacctcaaaggtaaaataaattcgtctaatatgttcactaaatatttttacttattttgacaagaaatgcatttttgtttcttacctgtattataggatattcaccttgcgaaacgtttttatgacatggcagctgaagccagcccagatgcacaagttccagtcttcctagccctctgcaaattgggcgtcgtctatttcttgcagtacatacgggaaacaaacgtaagtggtccgtacctcttttcattaaaatataaatgatggaaggtctgtcctggaggtttgtttttcaaaagttgagaagcacagggaagagtggtcctgcaggtatcgggtgtgttcccttctcctcagctcaggtacccgaggaccttatcaggggagggataaatgcaggcataaagcagctactgcagtttttaggtagcgtttgacacttcctgacgctaaagcatttttcat

SEQ ID NO: 77191 - DNA, 1036 bp, Homo sapiens
aaaaaaaaaaaaatagtgtttgctcatcagtatgttaattcttcattgaaattagctctcactgagctcttactttttgtgtattgtatgcaataatgaggaatgtattcttgatgctgtgcggttttttgctaagactctcacagttgtctgtttccttccatgctgaatagaggcaattagagtttgttgaaatttatctgcagagtttttaattgtcttaaatgtgatagccatgacccacctcttctcattgtagctgtgttctcaatcaagggaacagaacatttaagtctagaaactttataaataaattccatatgtcatggaagaatctcaaaactttttcattattttgaaacatagtataaatcaatgggtattttcacttataactaaatcctaaagtaaggaagtttagatggaatatatcacaaaggtttttacaatagggaaatttcatcatgatttgcctcatgatcatactagtaattggggtgtggtaactacatttaaatattccagctgttccatagcatagaacttggtatttccctctgtttttgttaagcatttaagaacgtttcattcctcctcttttggttcttgctctgaattactgtcattgtctttaaaaactattttttacatttattgtttctttaacatatatgtgaataaagacagtcttgaccattctgtttttctttctcttggccctttatcattctccatacctgatgctctaattgtttagtgtttaaaccctcttcaagtaaaccttttagttacttcgtttcctgaacttaagacccacttgtgatcttatcctggggaaagtagtggtagaggagaaagaagaatgaatgccgcaagcagcttcccctttccttgttgaatcactgatctgatcctaagcaacttactaaccatttgacttccctggaatagagtgagaaaaatgattcatgttgggcttaaagatttcttctgagactaatatatgagctgattttatgtattcatgtttataaat

SEQ ID NO: 77192 - DNA, 1019 bp, Homo sapiens
caggctggagtgcagcagcacaatcacagctcactgcagcctcgacctctccaggctcaggtgatcctcccacctcagcctctcaagtagcagggactacaggcgtatgctaccacgcccggctaatttttctatttttttgtggagacaggattttgcgatgttgcccaagttgttcttcaactcctgggctcaagtgattcacccatgacctcccaaagtgttgaggttacaggcgtgagccaccgcacctggccgcaaatggtactttgcaattacaagtacacgtttttacttttcaaaatttttaggttaattaaagtagaatagcattttcaggagttaagactaaatctttttgttttttgagtcatgaacagaagccattttacgaccaaatcatttcttgttggtctgattttaattgtgtgccagatggtaccacttacttttgccttgtttgtgatcattttcaggttggtcttggacaactgcacctgcacggagggcgtggagtagaacagaatcatcaggtaactaccctgttcctagggctttgcatctcagttttagcaggaaatgatgttcccaatgtatttcttgctaagtcaataccagtatcaaacttctgtcatttaaacacccatcacaaatgagctttcaagatgtaaccaacccctaagaaagctgaagaatacaaatattagtacctactatgtgccattcactgctaggcattcaccatgcaatattggacaaaatagttttggtctttgaccttttggagctttaactttaataggagtattagatattttttaaatgatcacaccaaatataaattgtggttattcttacaaaggagatttaaaagatacaataattggttaatgggtaggaggtaccgcttgccagggaagacttctgtaaagagaagtagaaaacatttaagttgaccctggagataaggtccttccaggccaaaaagaacggtatgtgcataggcccagagacaggaa

SEQ ID NO: 77193 - DNA, 1050 bp, Homo sapiens
tgttttttacttttcatgattggctgtcttcccatttattctggtcatttattgctagtgacactgtgcctgcttccagtagtctcattttccctattttgctaatttgttactttttctttgctaatttggaagattaactcatttttaataaaattatgtctaagattaaaactggttctaagcaaaagcccttataatttttctcttatgagtaaaatgcacacacttcaaaaataaagtttatgacatctattttgattgctctaggaactatattatttatttccttgctcttagctatggccttcttgttgaagttgctgaatccattacctcaaaacctaacacttagcataaataaggtgttagtgtacttggatcaaatgacagcaaaattctgggtatgcttagctttatttgttccacgaagaatgacactgaagtacatgaaactgctgcctcctcacgtgaagttgttttacagggttacagatactgggctggcatcggcgtcctccagagttgtgaatctgccctgactcactatcgtcttgttgccaatcatggtatctatgtttccccttttaccttttaggaaaaaaaaataaatggaattaactttaaacatttctatttttattgttctatttgaagtattataaatggctcttttatgtggactcatctttaaactagttgaggttcagaagtacttttttctttatataattttgctttaggttctatttacgttgtgaaaaaagttcaatttattaatagattactgatttgcgatctatatagactactgtaaaaacagcttcctttaacaatgtgttcgtcaacgtttggcagctggaattgtacttctctctctctggaacaattcttctgattttcctccaccttattgttttatccctctatttcagttgctagtgatatctcgctaacaggaggctcagtagtacagagaatacggctgcctgatgaagtggaaaatccaggaatgaacagtggaatgctagaagaagatttgattcaata

SEQ ID NO: 77194 - DNA, 1010 bp, Homo sapiens
attcatgaaaaaccacccctatgatctagtcgcctctcaccaggccttacaggtgagagagattgtaatcaccagggattacaattcagtgtgagatttggtggggacactgatccaaaccatatcacatataatctgaaattttagttgaattatatttaaaaagttagcattaccaacagaaaagtaccctctaagagtggcttggtattggtatttctataaaaaagtgatttcagtgaattttatatatgtgtgtatatatatatatattttttttaagttttatcttgtgtcatgtaaaggccacacttaagtgtttttagaatcatgtttgggaatagtgaaagatcattcattttgtttgtatgactgcccaaaagaaagaatactaatggttgataattgatagaattaaaatccatttaaatgcatctgacgttttgtttttagctgaagaagaggctgctaagagacggcagatgcaggaagcagaaatgatgtatcaaactggaatgaaaatccttaatggaagcaataagaaaagccaaaaaagagagtaggtagcactgctaagtccacttttcccccatgacaggccattactgagacaaatagcaactacattctttaaaaagtgcactgccagagacgcagaagatttttttaagttccattacaaaaaaatgtaatataacttacgggcattagtagcattgcttttaccacactttagttaaggtaaaattgttatactgattacagtaacaaacaatgagtaaaatggcaatgattgactcaagttgtagtagtttctaagaaccaagcatgcatatactatttagaattcaaaatgacataaaacaaaaagaattgttgtcaagtacgttttttgtttttgctttgtaatttttgactggaatttaggaatttgtgcttggaaaaaacagaacaagtgattatctcgtaacatcttatgtccttttaatttcagctgacatttttatagt

SEQ ID NO: 77195 - DNA, 1020 bp, Homo sapiens
taataattcttagtttccatccttactatagtagtaaacaatacaaatactaatgagcactaaaatgggctactctaactcaagatcctgagcagacaaacagaataggtggaagcccggagtatgaaattagagatttatttttatgaacttagtaactcattctcagaaatagactaaatagacccacaagaattggatggaatgtgaagaaatacctgtttttgttggtggaggctgttggtcttcctacctttgtaacagatggagctaatgtcttttctggagaaagagagaaactaaacccccaacccattttttttttcctttcacttgatcttttctgaacaattgctgaatatagctaactttaaaataattctatgtttatttatccaatgtttgattattatttgctatacttttcacatgttttcttttaataataactaatttcccaacaagaaagattactaaattgtcttaaaatttctttgcagatgaagaaggcagccaggatgaatccttagattccaaggtatgtactaaaatgtgtattggccagtatttgctgcctgatttaaaaggatgaattatgtatcttagaaaggatatgaggtctgcaacttttgagtaacagttgaattaaaaaggacagaaaaagacagatggtattagtattagttctagtttttctggaggaagaaaaaattactgacctacaagagggaatagtaaatatttcatttcaacttgaatgtgctctgtgtgtgtgtgtgtgtgtgtgtgtgtgtgtgtgtaagtttgaagatttaacctgtgtcatttgtttccactttccagttctcaaaaataaatccagtgagctaatgcacttattggttgattgagctctcccttccaagtactaaccaagcccaaccctgcagtcagttatgagctctgatctttagatttgagggaatgtagataaaagcaggaagtagaagtataaggtatgttgggggcatgtggaggaaa

SEQ ID NO: 77196 - DNA, 1074 bp, Homo sapiens
gtgttagttaaattctaacttcaacagtcacccgcacttgtaaatcttgccctacgatggactacgtttcccaagagcaccccccgagttaatcacatgaagcgcattctgggaattgtagtctcggatgagcctctttctcccagtcttggactcacgcgctgattccggttgaacccaggggctaccaattagctggggccatgtccgtgagtcgtggtccaaccgagaaagctggtgtgggagcttcgtacaatgattggccaatgaatgacccccggggcggagcaatgggggtgggcggggagaccatggtgattggaccagaagcccgcgacggcgggcggggattggctgcgcgctgggtcagggaagcctgggaaggggcggaggaaggagactagagcaggaagagcagcggcgaggcggcggtggtggctgagtccgtggtggcagaggcgaaggcgacagctctaggggttggcaccggccccgagaggaggatgcgggtccggatagggctgacgctgctgctgtgtgcggtgctgctgagcttggcctcggcgtcctcgggtcagtatccgccccctcgggctgaaggcccagagcctccgccccccagcctctacagccggcggggccgtggggactccaggctcgggaccccgttctccctgggcacatctcgcactgggctgtcactcgctctttggctttgcttggcctgcgccaaaggggctatttaggaaggtggagtggggtggaaaaagaaggggcggtcaccctgcccacacctctctcccacgtaacaaactttgcgcgactcttctcacgaacgcggaattgactccaaaggaatgaatcctgatacaggagcccgagtggagcttcctcgaccctggggtagaggaagggtctggtctagaactctgggcttgggaattgtaagttaaataattgacaaacctggagctgtcactttggggcagaggaggatccatccagaccaggatgttgacagtagtttgcttaacacctgagatggtccctggtctgtctgtttaaaaacgaaga

SEQ ID NO: 77197 - DNA, 1051 bp, Homo sapiens
taacacatggtgtgaagaaaaaaaggtcaaagtttttcatgaaatctgtgttcacttgggctgctgaggaggggtgctaacattctctactgtctcacctagcagaactttcctcatctttaattttgacccgagtttgtgagaccttttggtttggatttctgtgcagggctgtattcccagagggatcagaccacatcacctcattagtcatatacactgatcttcacagcaaatcgtgtgcccaccaaaagccagtggttaaggaccacttggggcccagagctctgaagggccaggtttatttccacatgctgaattgttccttgacctcaatttttccctctcacagcagggcaccatgtggggaagaatgcagactccggagtcctgccagcaggacgtgtgaggagctgggaaattactctacctctgagctctccacagaactagcacacaagctcttttggaatagctgggtgttcacattaaagagggggttggaggaaggggcaacagtgcttggagaataatacttgttacacagctgtagctgagacccctctgcttatcatgaaagcttcaggcattcactttccctcttcctcgttgtaattgctccgtatctaaggcttcatagacctgcagttcctgtggagagtgggctcatatttgagagccagatcccttgacccaggttgtctgaaagatgcgcttccaaaggttaacatttcattgagtggctgacaaagcctttcaaaggatagctatggtccaattttagggggtgctgtgaagaccctgtctcctggtggggtctttattctggtgtctgagatcacaatagaggctgaagtttgcctgagtgagtccggtgtgggcttctttggaatcttgcatatgaaaaggtattgggtatctcaaaggatgagggtctttcttactgcactcatctaggtgggcagttatttatttggggtacctggctccctctctacctctgtagatataaggtcagcttttggagggcaaggcttgcattatggacatc

SEQ ID NO: 77198 - DNA, 1011 bp, Homo sapiens
catactgatggaacaagccacacttggcctcatctgaaccttgcagatgtatttttcacttaagaaatttctaatgtcaacaagagacccattctcctgaatgacaatgctgagtaggaagtaagcatacacagacttcatcctgtagcatacacagacttcatcttgtaatggaagcctagtgtaatgttctggatcctgttctgtacatgactatggatagtgtgaaccagagcaaattcctgtcttatttctccactgtgccaacttgaagcctctgttttctttccaagtagaccgagttctacattaatatgagtgaagtctctctgcagagttcctctggggcccttcgtaactgtgagtccattcagagtgatattgacattttctggaatgtttaatctgattcctgagaatggtcttcattctcatgtagaagcagcaaagacagaatgtcttaattcttttttgacctctctactgtatttgacactgctgactcgctcttctttgaagacgtgcttgcgtcttttggcttcacaagggttcattctctttctttgtgtccagatgctggaagaagacttttcatgctattcttagagacagggtctcactctgtcacccaggctggagagcagggacgcaatcagaactcactgcagcctccaactcctgggctcaagcaatcctcccacctccacctcctgagtaactggaactacaggtacacactactacatttggttattattattttttctttttttgtagagattgggtcttgctatgtttcctgggctggtcttggacttctggcctcaagtgattctgctgcctcaacctcccaaagtgccgggattataggcatgagccactgtacctggccatgccttgttttttaaggtgctttttctttcctgtttctttgagctccatattcacatacacaactgagttctgcacagtttctcttagaacttgcaaagacattttaaactcagtaat

SEQ ID NO: 77199 - DNA, 1777 bp, Homo sapiens
agtgggctgggtcagaggcaagaagcttccatggctagcttcctaagtattttttttttttttgaccctcaagactgtgatatcgataagattctcttgcctgaatttataatccccaaacctcaatttactctctcctcatgcatccctcaaatggttcccctctgtagtactttcccaatattgcagagcagaggttaaccacccacgagccttcctcacttttagttttacaatgaacagtacggagtttttctgctggcagttatgacttcagaatcagaatcaatcttacatacatttaactctattttacagatgaggaaatagaaatccagagaggctaaatgacttaaccaaggttatacaacagctctgctgggactgagtagagtgagaacccagacatcttgactcctaaaccagtgctcttcccactataccatgatactttcaaaagcaacatgctggaaaagagagagaaggtgcccattttctgtgaataatgttcatcaatctttacattacttgaaaggcagagcaaactgtaagagatactaagtaatggaggctaagggggcactgtagttttaggcaagcaagtcaatttttctttttaaggattctctaaactcgccataatggaaacatgaagcaatagcagccgaagggacagaacacttagaagcacagaaaacatgtctcattcaatctacctttcccaactatgttaggttagccttgggatgttaaacctgccaaattattcccaaggctcagcctaatcaattttgggacattctctcccaaaaggagaaatcacatctctccagtttctcacacaaaaaaagcatttgcagcattgtccaatcctagcctttcctatttctgggccctacctggactacagggagtgtgtggaagtgtcaatctaacgaaagaaataaacttagagccccttttcaacctacattaccttctcagcagcccccagcagaatcacagtcatttttggctagcaagctgagaagatctgactaggtgcccatttcatccctgcctataatatataaaagtccaatggttgaggaaggggaggagagggggtctcaggttaccccgcaagcttgctggtgacgagcgaggactttctctggggcagatcctgtggggtgggatgtgatcaccagtcaccaggttcttgtctggtcctgcacttggcagctgcttattcttcatcttggctttggccatgttgtagtctcctgagtcaaagtacttttgccctttctggagtctcttcatgaggaagtcggagcctccaggcttttgtcctaggcttgggtatttggcctttagctttgcctcttcagctctctcagggagaataccttctttctcctgcgtgtcctgcttctcctcgccggcctcctctgcagggttctcttcttcttgcttctgggacatggcgggaccgggactgtggagtgtaaggggcccgggaaggcaaccggagaagggaagggggagaggaaacggggacaacctgcgctgctgcttcggctcctatcactagggttgctcagttaaaatggcggcctttgcccctgttctggcttttcaacagtataggtttagtaaaataatggcaatgacacaacagcaataacagtccaagagcagttggcatggttggtttaacccctagcggattcagagcatatttttaaatttattaatttggtcaatatagttgctttggaattcatttaatgaa

SEQ ID NO: 77200 - DNA, 1129 bp, Homo sapiens
aaaaaatttttaaatgtctgcatactatcaaaattatgaattctttgagagcaggtatcttgacttattcataattacatctcccagaaaattaaacacaatatcttccatatagctgatgttcaagaaatatgttttgagttgttctcagattctgacattcaattttgattggacaataacatttaatccattagtgtgtgattttacgtgcataaattcagaagaatgcttgacgaagaaaatattttaataaagagtatataatcatgataatctggataaatttaatttgtcaactgttgttaaataattatttataagtagtaattagtaatacaaccaaaatgtaattgaattttttcaacaacatcattaacattaaatcccaaataaatataaaattcatataagtcgtggttagagtaactgttttttattctctatcactttctttcaaagcaattcagtagttaacttgatgagatgtgggagatgctgtgtgggggcatggaaaagtgggacctgctgttctgcttgatttttataacattcatatacctttggaagaagataacctcacatatggcttctttctatgataaatagctgtcacaataatgacagccaatgagccaaaattccagccacagccaaagtctgtgtagatgtgttgctgaaccagtcctccttgggacaagtcactgaatgacttcatagacagggcagtcttactgcagaagtcatttctttacgaaaagctatccattcacagtgggctgaagatgatgactatcaatcacctcagtgagctgctatcacagaggcaaatttctacccaagtaatgacacatatatattcattctcagataaatgtaattgtgattctttgcctagttattatggaggtaaaatcccctggtgatacaaaacacatttaaaaacataaatcttaaaatcaacagcagttccccctaaaacatccctactgtatatttgtacaaccttgaaagacagtgagatgatggtgacttttcttaaaatcaacattttttactgttttcattcctttaatgcacatactcatcatttatttgtatatctggtaaagatatctgcattgaatag

SEQ ID NO: 77201 - DNA, 1236 bp, Homo sapiens
ttgtccttagcttagtgaccacatcatatatagtaacacagagtgtaattgtttgtattccttgcatcatctatcgtgttgtcttgagcatcatatatgctgtctctacaaacatttgtagatggatttactgattggaaaatgcctttatgattgaaaagggttctgtaaatccaaaacgttttatttctctttttcttctttaaagtgttatttatactaattaaaattctattaatcgacacattccatctaacagactggttggtagtttcttttgtttaatcagactaattaaagaggatgaaattaatgttgtctttctattcaatgcagatatctttaccagatatacaaataaatgatgagtatgtgcattaaaggaatgaaaacagtaaaaaatgttgattttaagaaaagtcaccatcatctcactgtctttcaaggttgtacaaatatacagtagggatgttttagggggaactgctgttgattttaagatttatgtttttaaatgtgttttgtatcaccaggggattttacctccataataactaggcaaagaatcacaattacatttatctgagaatgaatatatatgtgtcattacttgggtagaaatttgcctctgtgatagcagctcactgaggtgattgatagtcatcatcttcagcccactgtgaatggatagcttttcgtaaagaaatgacttctgcagtaagactgccctgtctatgaagtcattcagtgacttgtcccaaggaggactggttcagcaacacatctacacagactttggctgtggctggaattttggctcattggctgtcattattgtgacagctatttatcatagaaagaagccatatgtgaggttatcttcttccaaaggtatatgaatgttataaaaatcaagcagaacagcaggtcccacttttccatgcccccacacagcatctcccacatctcatcaagttaactactgaattgctttgaaagaaagtgatagagaataaaaaacagttactctaaccacgacttatatgaattttatatttatttgggatttaatgttaatgatgttgttgaaaaaattcaattacattttggttgtattactaattactacttataaataattatttaacaacagttgacaaattaaatttatccagattatcatgattatatactctttattaaaatattttcttcgtcaagcattcttctgaattt

SEQ ID NO: 77202 - DNA, 1007 bp, Homo sapiens
tgttatcatgccacgcaagatccgtgacaatctagatctcaaaccactcctcagacctcattgttcagcacccatcccctgtaccctcatgccaaacatggtgaggcatggccctcttgatactttgcctttcccatgctgtttaccatttacctagaacattatcgcatactctccatttggcaaactcttcctttaagaggcacgtggatgacactttccctcctggttactcctttctctgggcttctacagagttttgtttgaactttgattggttctctgtttatattgtattataaaatgtgtctgcttacatgtctatctcgctcattagactttaggaactttggcccattcatttcatctctgtggtgctaacagagttgcccagtgtaccgcattctgcaaaaatgtaattgagttagtaaatggaatagcactgaccagacctggaacacaagaagatcttcataatccagtgagaaggactgcttcctcagaagtatttttttattcccatagattgattacccagtggagggggaagtacaaccaccacctttctgccttactctgagcaggtttgtcagacaaatattggctggtaaacccaaccttgatcagcagcaagctttccaaaccacacatgaggcaattcatatgccacactggataggtctgtttaaagaataataatttcgcttgatgatacacctttcttggcactgagtaaaactatcggttacgtagatgttcacacagatgtggttttccacagaatgagaaatttaactcagcattaactttgtgtatctgtcttggcataattaacaagagcaaagcaaaggtcttgtgaaattttgtgcatttgctctcttctttattttttgcttgttattattttgtttatttcatcctaggcccattatttcctgatagaggcctctgaggacccagggctctccagagaagggaaaagaaggctagaaatcacaacgccttaa

SEQ ID NO: 77203 - DNA, 1040 bp, Homo sapiens
cccgtattcatggcaggggttgttattaagcatgtgttggctaactgattataagacagttatgtgcagacagtaggcctcgctattcttttatagctcatttttcctgcatgttgctaggcacagagtaagttttgtgctttagtccctgtaagtatatggtgactggctgacccactgggtccacagaaacacacattcatgcttctcattcaatacatttcgtgtgtgccttgtgccctgcttgtggaagatagttcaaacatgttaattgacttactcttcatagtagccccttgagttagctgctgttatttatattttacagatggctaagggacttagagagtttgagtagcctgtccagatcttatggcctgtggaacctggatttgaacacaagtctgagtaactctctcaagagagagtttttgtcactcactactttccactctactgaattcttactacatacatgccacacttcagttttttagtcattcctatctctgattagtcacagttttgtgtgcatacatttctttgtgagtcatcattttgggcatagaactgggttgaaactcatagtcagcaacccagatttgtctatcatatcctccatcagaggaaagttcctatcaatgtaaatagagggatgggtggcaagttattttaaaaagctgatatatcacagagaaaaaaatcctgctaagagagggagaccctccctctcccaccccttcactcctaccccacacatcacactcacacatcacacatatcacatacatcacactcacacatctctctctctctctctcacatacacacacatctttgggagcaaaaagtaattgagttttatttttaggtcagtgcaattagatttttctttactcgcttttaatattatattagctttctctgataaaatgaagaagcagtttacgcctgttgaggtaatttctgaatcagatgtgggtttctttatgctccaccatgattggccagttgctttgtaatgaaggagtttgcacttc

SEQ ID NO: 77204 - DNA, 1072 bp, Homo sapiens
ctatggagaagattaaagaaagtaatatatgttaagtgcctagcacaatgcctgggaggggtatagcttttaaggagttcagaaaaccttaattccctcttgcctttaaaactccatttgtgagggtatattctagaattagaaagggtacttattgcactaactcgttaagagattgttcatggacttgtttatttatatgctgtgttttctctgattaataacctactttggagctcaccacgaccaagcatgaggtaaaatgatcttcctttactcaaaatgtgtgctatatttgaaattctggctgaccgtggccgcctcaaaaactcatgacctcagttatccgggtttccttcagctctagtgctgttttaattataagtatttacttttttttgtttttctttcgtggcaagagctgtgtatttccattaccatggttatcttctgatgcctcaaagtatttggctgttttcctttatttaggcataaaggcagagacattgtaatttgtccaaaagtatttgctgtctccaaacagtagacagaatggcatacatttatgaagtgctaaaccattaccattgttttgtgtttggtgcttgcaaactgggagctttacatgttattaaaagctttcaacaccttcttctcctcctttgaaaaataatcagcatattgcttgcctccagcattcttttaaggaaagccaaagacagtgtttttcaatttccgaaaatctaattccaaatgcaatggcagtacacactggttggaccttttaggggtaagttaacaagctgtttgtcctatttgttttcaaacccatttcagatttgcagctctccatattaaaactagttgcttgtttggtggtggaaatattctattgcattggagaaaaggtattgtagacacaccttgaaagtattccaaatgtacctgaaagagcattgacattcagccatcagaggggagcagaaattctgctggcagaccccaaatctttgacatgaaattcacaaaatgtgcacacgttttgtatttctatttagaaaaagtggaaagc

SEQ ID NO: 77205 - DNA, 1013 bp, Homo sapiens
gcatgtgtgcagctgcacatctgcgagaatactggtgggttcaggcaacgctggccctaccttagccaagccttctgtgtgggagctatatgaggcttttgtactcttgcttagttttcattgcaaatggggccgtatccaaaaggcatagagtgggggtgggaggtgggtggcagggcggggggaaggtagaaatgatggataaagatgtaagaaggataaggagagaccagatgcagtcgagggcttttgtggcatgaggaaaggatatttaacttggcaccaagaaatggggtggcattctaatgctgctcctgacctcctgtgtgaccttgagctccagtttccctctttgtaaaatggtggccctgatgactacctacaaggttggaggtgggaataagggacctaatgcatgtccagtcatctgtcatcaacactcaataagccttttcctttcgtggccatccatcttcaggtttgacggaagtgaggatctgccctcagggttgaaaggtcaagatggtttgctcaaatattttatttctctcataaatctcttgcaggtttggttcatcccagactattctttttcagggcagtatttatattgtcactgcgttcaggctgccttccccatttgatggggcccagcagtgttcagttatactgataataccaaaattatcttcattttaaaaaatgtaaacctttttatttctgatcattaatgtaaggtaagtatattgttgataatttggaaaatccaaagttaaaggataaaattactactaattgtaatctcagcacacagaaagaatcatgtgtgtgtgtgtattatatgcatgtgcgtgtgtatagagggcattctatttgtattgtatttctttattatttagggttgttgatactgtaaaataaatgattttttttgagaatgaagatgggtgaaccttgtttttctcatatttaactaaatctaaatgacaggatatttggtaaaaggagatata

SEQ ID NO: 77206 - DNA, 1056 bp, Homo sapiens
tgtttttgtgtaattccagaactctgggagttcaaggcaggcggatcacttgaggtcaggaggttgagactagcctggccaacatggtgaaaccccatctttactaaaaatataaaaattagccaggtgtggtggtacatacctgtaatcccagctactccagaggctgaggcaggagaattgcttgaatccaggaggcagaggttgcagtgagccgagatcatgccactgcactgcagtctaggtgacagagcaagactctgtctcaaaaacaaaacaaaacaaaacaaaacatatatatatgtatttaaaattcctagtcatcttatatattgtggatcccatcatatgtctacttatttagaatattcaggtccaattatttgttaataatttgtttttaaattcattaaaataagttttgtttagtaatgttaaacatacactaagcatataatatttaactgttattgcttaaatattaaacactctcagttaagggacaggaggaaaaaattgtgtaggccttgatcagtatggctgggaaggcctggggatttgtgttgtgtgtggaatgtgtgtacacgtctttgagtttggttttgtgtgagtgagtaaaacttcatcaaatagccactcccagagatgtgtgtgtgccgctccctcatacctgtaagtctcaactcacataccctaggtgcggcttagcttgactgtgactatttaaaccttggccctccaccacaaactctaaatctctcttaccccagtaggtgctcaataaacagttgagaactttctccctgagctctgaaagaatgagggtctttggagttgttttaatctcactcatttgcagttgagaaacacatgttttggtacttttgaatctaaacccgtctcctattcaattttcctataatcctcataaaaactaaagtttacttaatggagttgactcttgaaaaatgctggagttaggaacacggaccctctgcacagttgaaaaatctgccgttaccttttgactcccccagaatttaactactaatagcc

SEQ ID NO: 77207 - DNA, 1035 bp, Homo sapiens
tttttgcacatggaggacagcagcaaagagggcaacacaggctgataagaccagagacagcagggagattattttaccatacgccctcaggacgttccctctagctggagttctggacttcaacagaaccccatccagtcattttgattttgctgtttattttttttttctttttctttttcccaccacattgtattttatttccgtacttcagaaatgggcctacagaccacaaagtggcccagccatggggcttttttcctgaagtcttggcttatcatttccctggggctctactcacaggtgtccaaactcctggcctgccctagtgtgtgccgctgcgacaggaactttgtctactgtaatgagcgaagcttgacctcagtgcctcttgggatcccggagggcgtaactgtactctacctccacaacaaccaaattaataatgctggatttcctgcagaactgcacaatgtacagtcggtgcacacggtctacctgtatggcaaccaactggacgaattccccatgaaccttcccaagaatgtcagagttctccatttgcaggaaaacaatattcagaccatttcacgggctgctcttgcccagctcttgaagcttgaagagctgcacctggatgacaactccatatccacagtgggggtggaagacggggccttccgggaggctattagcctcaaattgttgtttttgtctaagaatcacctgagcagtgtgcctgttgggcttcctgtggacttgcaagagctgagagtggatgaaaatcgaattgctgtcatatccgacatggccttccagaatctcacgagcttggagcgtcttattgtggacgggaacctcctgaccaacaagggtatcgccgagggcaccttcagccatctcaccaagctcaaggaattttcaattgtacgtaattcgctgtcccaccctcctcccgatctcccaggtacgcatctgatcaggctctatttgcaggacaaccagataaaccacattcctttgacagccttctca

SEQ ID NO: 77208 - DNA, 1103 bp, Homo sapiens
ctggccaaaataatgaattttttttaaaaagcaatacctggtttccaccttggactgactttgatcctgttccacttttgaaattttatttgttccttttccatcgtggatgttcctctactttggcaattgtggagggctaatcaatcttatgttagcaggacaacccatgaaaaacaagtcagagagtgaaggctttttcccctaatcctggcagagcagggcgtagaaaagagaggatgtccgtgcttaattctagatacttttgagacaacaccttcagaaaacacataatttaatctttgccatccttagatagagaagggctatagatcacatacgttatcaaaaactactcccttggaaaaaatatctttcgaaaatcaaatttaaacatttcactctgtgctgcatatttcttttaccattgaccattattatagggacccatgaagtaaatgtcacaatcatcttactagctctctctctctcagcaaaataaaactgtgatgtgtcttctttgtaaaagtttaggtataaaatgctatgcaactttttctttatagtaagagctttattttctttaataatatagcccaacttatatgttttaatctcccttgtccctcagaataagcagaaaatataactgcagctgtatgtcgtagacacaagaattgaaactgtgcagtcagtagagctgaacttagctatgaattaatttaaattaattctaaagtgactctggtttccattttagtctattagctagagggttttggctgttgctttttttaaagttaggtccacacagtgaagggaaaagagtctgtgaaggtgatcagtgtagcagtaagacatctaaaatcaagacaatgacatgggggctttgtgtacttagctggataattcccttctactgtcctcttccccttggctgtgtagataaaattgtgcattcaaatgatggtactttgacttttgagggtttttatttctgttattcacaaaatactcattctcatttatgtatattgtatgtttaacccccagtgggatttctggctgctgaaaccactttgggccaggaagaacaaggatga

SEQ ID NO: 77209 - DNA, 1062 bp, Homo sapiens
gaatgaacaggaacatttactgagaaaaacgtgggcacatcataaacctgcacatccctttaccctattccctgggaaggagggatgaaatcttgaagtgtctgccaatatggcatttttcctctcacagggtaaaagcacaggtacgcctgagaggtgtaggaagcatcgtggctttcatatggaggtaaaagttacaggactggtcttccatgagcgtgtgagtatgtgtatttatgggcaaatgtggggtgagaggagagtgggcagaggcgagagagaatggcctggccaaggaaagatcaaagcagaagacggtggtgatggaggcagcaggctttttttgcgcatcaccttgagtgtttttaacccagaattggccccatgtttaagattatggatccaggaaatccatccccttcttcctctcttctctttttgccacagcaaagatgacatttagctctttgggcttgcatctgctgatgactttgttctattttttcctgccctattcgatttgggtgttggtgtgagacatgaaagtttgaaagtgacactccagctgttccctccatgccacttctgctgaattatcttgaaatccccaccatttggcttggctttctccagttcccgccaaggacagttttcggcaggcccctgttttgacgtgtacttatgctcttggcacctcctgtcaatggtcttcttggattattgaacatctatctgtgctctaggcttcaaatcttgtggttggtggatgatcggctgtccctgagtacaactgagagccacagaattgatggggcctctagatggtttgggttccaagccagagaatatacaggtatgccctgtgtgtgttcaacacagctcagaccaggaaagtatttagattagggagatgctcataaagatggattgtttttaaaattatttaatgatcatttttgttactgggctttatcaaaacagagtacagtatttgtttattgtcctagctactagacatccagtcgcaaaaaaagtaggtagggaagaaagagttttgtaggt

SEQ ID NO: 77210 - DNA, 1005 bp, Homo sapiens
aggccactgctcaggaatatgtggggagaagtatgtattctctctgacaggggattttaggggctcttaggtaatagtggtgtaaaaataaatcagacatctccatttatagtcttgtttgaagaactaatgtagtctctcctcacccctcccccaacattgtccttttgatctaatttgtcttcaaaagtcagaacaaatgtcatgcctctgtgtttccagttctctgaagagagctgcttgctctgttgctgctcattccccctgaggtgtgaggatttgttcccagatccatctccttccttaaaccaacagtcactcaaggcaggatgggtacagcatccacctctgattctccggtgcctggcctgctctgggatgtcaaatgtatggtgctgctggtacaatgggcagggaggcaaggccctcatatctggcacatctgccagtgcagcccaagatgtcattcatttcctgatctgctagtgtcttagtccgtttgggctgctataacaaaatgccatacacaaggtggcttaaacaagagacgtttatttcttacagcactggagaccgggaagtcctctatggaggcactggcagctcctgtgtctggcgtgggctctcttgctggcttgttggcaactgccttctcactgcatcttcacaagctgaacagagagcaagctctctggtgcctcttcttataagggcactaatcccaccatgaggtcctacccacatggcctcagctagtcctaattgcctctcaaaggccctgcttccaaataccaccacactggggcattagggtttcagtataagaattgggggagggggccaggtgcggtggctcacgcctgtaatcccagccctttgggagtccgaggtgggtggatcatgaggtcaagagatcgagaccatcctggccaatatggtgaaaccccgtttctactaaaaatacaaaaattagccaggcatggtggtgggtgccaccaagtattt

SEQ ID NO: 77211 - DNA, 2271 bp, Homo sapiens
gacttcagaggaccattttcatatggtttcaaggaatgtgtttctttctactctagggtcatttcacctctggcatgctgaatgacaagtctctgtggacagacatccctgtgaattttccaaagaatggctgggctgcaattggaactcactcctttgaatttgcacagtttgacaactttcttgtggaagccacacgctaatacttaacagggcatcatagaatactctggattttcttcccttctttttggttttggttcagagccaattcttgtttcattggaacagtatatgaggcttttgagactaaaaataatgaagagtaaaaggggagagaaatttatttttaatttaccctgtggaagattttattagaattaattccaaggggaaaactggtgaatctttaacattacctggtgtgttccctaacattcaaactgtgcattggccatacccttaggagtggtttgagtagtacagacctcgaagccttgctgctaacactgaggtagctctcttcatcttatttgcaagcggtcctgtagatggcagtaacttgatcatcactgagatgtatttatgcatgctgaccgtgtgtccaagtgagccagtgtcttcatcacaagatgatgctgccataatagaaagctgaagaacactagaagtagctttttgaaaaccacttcaacctgttatgctttatgctctaaaaagtatttttttattttcctttttaagatgatacttttgaaatgcaggatatgatgagtgggatgattttaaaaatgcctctttaataaactacctctaacactatttctgcagtaatagatattagcagattaattgggttatttgcattatttaatttttttgattccaagttttggtcttgtaaccactataactctctgtgaacgtttttccaggtggctggaagaaggaagaaaacctgatatagccaatgctgttgtagtcgtttcctcagcctcatctcactgtgctgtggtctgtcctcacatgtgcactggtaacagactcacacagctgatgaatgcttttctctccttatgtgtggaaggaggggagcacttagacatttgctaactcccagaattggatcatctcctaagatgtacttactttttaaagtccaaatatgtttatatttaaatatacgtgagcgtgttcatcatgttgtatgatttatactaagcattaatgtggctctatgtagcaaatcagttattcatgtaggtaaagtaaatctagaattatttataagaattactcattgaactaattctactatttaggaatttgtaagagtctaacataggcttagctacagtgaagttttgcattgcttttgaagacaagaagataagtgctagaataaataagattacagagaaaattttttgttaaaaccaagtgatttccagctgatgtatctaatattttttaaaacgaacattatagaggtgtaatttatttacaataaaatgttcctactttaaatatacaattcagtgagttttgataaattgatatacccatgtaaccaacactccagtcaagcttcagaatatttccatcaccccagaaggttctcttgtatacctgctcagtcagttcctttcactcccaattgttggcagccattgataggaattctatcactataggttagttttctttgttccagaacatcatgaaagcggcgtcatgtactgtgtattcttatgaatggtttctttccatcagcataatgatttgagatttgtccatgttgtgtgattcagtggtttgttccttcttatttctgaagagttttccattgtatgaatataccacaatttgtttcctccccaccagtttctgatactacaattaaaactgtctacatttacaatctttgtgtcaaatatatttttatttcttctggatgaatactgaggagtgaaattcctgggtcttatgttaattgtatgtttaactttataagaaactaccaaactgttttccaaaatgattgtatggttttacacttctatcaacaatgtttaaaagttccagttactctgcattcttgtcagtgcttcatgttgtcattctttttaattttaacccttaattgtgggtgtatagtatgtacatttctctgatgactaaagctattgagcagatgtcatggacttaatggacatttatgtactttgttttatgtaatatctattcaaatattttgctcatctaaaaaat

SEQ ID NO: 77212 - DNA, 1061 bp, Homo sapiens
atgtaaaagttggccccggaatagcttgtgttctctcaaaggctcctagcattgccttcattgcctctctttgttgatggaagtttgaataaacattttccctcagaattgtgtggaactttttactttttaatgtgttcatagacaatagtagcattttaaaatattgtattcttaagatgagaagttgttttattgtagaaaaaaaattttctcaggaaacttaaaaatcataactattattgtccagtaatcatttaaagaggcaatgaaatgacttaagtcatgtaacatttaaaactgttgtcaataaagattcttgaagcccatctctgctacaggcttagacttagcaaatcacattctcacctcaattagaagtttggaagcatgtgctgtgaaatgacatatctgtactatgttacaaagggcatattttaaagagtactaatcaaccgttttattttgcaggaccaatctgactataaagtgtgatgtatacatagagacccctgacacaggaggtgtgttcattgcaggaagagtaaataaaggtggtattttgattagaagtgccagaggaattttcttctggatttttgcaaatggatcttacagggttacaggtgatttaggtaactgactttttttttttttaatagcatatgacttatgggctatgttactttgagcacctacttgttatttgtgggagtgataaaaagaattcaacccaaggtgtttggacatctaattgggaagggatgtaagcaaataccaaatagtttacaattatagaaagttatttaattcctagagatgggggcagctctgtggaagggaaaataattgtacaaagcttttaagggtattgtagagttgaactgggctgtgaggataggatttgcatagatagtatcaaaaccatctgaggtagtggtggtagggagagaatgctcaggaggcaccataaataaaagcaagagtatacgactgttgctgctgtacctatagaaatataaggaggggaattgatcggcttaaaatggaaaaatctcatt

SEQ ID NO: 77213 - DNA, 1044 bp, Homo sapiens
atgaattactcagccatgcttttttgtcttttctttacagagtgaaataccagagctacaggtatggtataccaaacttggaaaaacatccgaaagatttctttttaagcagctggattctctatgggtaattttaaagtaaattcttatattttgggtattccaacagtaaaacagtaaaagggcacagaaatgtcattaattaagaatttttatttttataagtttgtgtgtttatagatgtgtttagctcttagacatttagtttgtcttggtggatggtgacgccatcacctggcttcccaggttggaaatttaagtcccatttgagactctctgtctttcccactcaccctctgtatcccgccagtggtcaagtatagacagttgtatccacacatttctcttactcactccttattctccattaccaccgttacttcttgtttcagttcttcattatcgctctcctggatttcagaaactgcctcttgtttttccagtctgactttccaggtcacccatcacactgctacagagtgaaatgtcaaaaatgcagatctgatttttgtgaccactgtgctcagaggacctcagtgattattttcttagaagttaacattccttagtgtagcacatggccctcattatcctcccagaaggtagaagactggtcttcttcctagagatgtgtcctactaaactggcctctcttcacatactaaacttacatttttcaaagcatagcatgcctgtttatttacctctgtgactttgcacatactgtgttcttcacctagaatggcctctcctcaactttgtcatcttttgagactcaattcaagtgtcttttcctctgacgcttcctcaccagtcttagctcatattcacctagggccatgtgcttacctagttaaatgcttttcctgcaccactggacaccttgaagactgagccttgccttatttagctttatatcccaggtgcttcccacagtgcctcatccatggtgctttctggggaaaggtttcaaagaacgaattg

SEQ ID NO: 77214 - DNA, 1031 bp, Homo sapiens
cagtctgactccaataattctcaattgtaaaactttggaacagttcagagtcaagttcataaaaattatgtcataaaactggggcattaagaaggctgactgttgaaaggaaagtaggtatgcacaaagcctttatttgtatttgactcaaatttgtgatgtgttgggtattggtaaggcatgattcgtcttctggctataccacagttcagtaaaaatttgcacataatacatttgtattttttatcatgtgattcaccattaaaaatattacaatgtaccccacactggatttttcaaaatgtgaataaatttagacaacttatattttcttattttgggtgatccttttattgtcatttatgtagatgtgtattactatgataaagtctttttactccaggtttttagacatttacatttttatcacaagttgtcttggtgtttcttttttatcaaatcttttagcacaatcgcatggaatttagtggctagttactatgaacagttgccttatgggagatgcgggttgatgacggcccaggagccatggagtgggcactacgtggtagaatctcctgtctgggtatcaggtatggttcagttccatctctcactccctaaattcttctctaagagacaaagcagaaaaaaacttagagaagattatataaactgtgtgtctatgcgtgttttaagtatagatttaagttttaagcaagatttgccagtgttttataagaatattttgggtaactagactactctctgattattctaagaccaggcttttagaaaagtgtaggagaggagggggagagagaggaaaaggaggagctgtgtagtgatagagacacaaataaataatcatctaaggatataattacaaatgatgataattgctaataagattatgtatttataaacagagtagaagtcttaagattagctttgaagacattttgttctcttatattaatagagtttcaattacaatcgtatgctagcaaaatcaaagggagatgattaaa

SEQ ID NO: 77215 - DNA, 1052 bp, Homo sapiens
tctaaggacaggagtagtggggagagtactactttatataaaggtttcactagtcttatttttggcctcctcctcactcgtttactattgccccaagctccttagcttcccctgggaagtctgaatcttatctttacttcattctcctcttggagtgttctaggctgtggccctctctgctacctccatccttcaacatgcttccatccatcttgtgagctccagaaatagattgaaatttcttatctattgatgattttccttcctatcctgtatgctgttgtaggtttatccccttttgttttctttgctgtcattttaatggcatgctgagacaaaagggcataaagcagatgcttagattcattatctacctggaagctacccaactgttttaaaatagaaaaccttggagaagactcgtatttttatatactcaacaaatctatacgtatataagtgccacgtcgtgaccttttttcattgacttccaccctttttttttctagggctcattatcctggaacccattcagcaaaagatgcaaagttgactgggaagaagctttggtcttctgaagactttagcactttaaatagtgacatgggtgcaggctgctggggtcgcattttaaatcagaattatatcaatggctatatgacttcgtaagttattaaaaaccttttagagttcttatcaaaaaaaatttaaaaacataagagttagaaaaaaatggaattccttattcttccagcctagattcaatgattgtaaacattttgccttgttagcgtcatctatttgtatacctatacctaatctatatctaattttctatatttgaatatagtctatattaaataaagtcaggtttattgaggtataatttatatgtagcaaaatacatgcagctctctgatttttgacaagctacttgtatttttaataattataaagtaaatagtatatgtaaggacactttatctctaaatattttagcatgtgtctccaaaacataaggatattcttttacatgatcacagtatcatgtt

SEQ ID NO: 77216 - DNA, 1015 bp, Homo sapiens
ggttcatgccattctcctgcctcagcctcccaagtagctgggactacaggcacacacctccacgcctggctaatttttttttttttttgtatttttagtagagacagggtttcaccatgttagccaggatggtctcaatctcctgacctcgtgatccgcccgccttggcctcccaataaaaatttatattcttaaagagcctttacattttgttgcactagtaataaatctatacattaagaaagacccagattttagtattagttctgcctttctttgctcatatcatgtaataaatcatttgggttttgaatgtggtaacagtttcatcattttctgaatgaaggatatatcacctattcctataacttcaataaagttactttttcattttataaatataatatgctcattatagaaaatttggaaaatgtagaaaagtataaaaatagaatttcctcataatcctaacatctactgattattggtaacatgctagcatattactttacagtgttttctttaatatagaaatatattttaaccaaatacaccaaacatgcatttggcaactagacaactggatgacaactagatgagtattaaaaattaacatttggctgaggtaccaaagctgaatttcatggaaatagaatggagttgtgggatagaagaataaatctaaagtgtaattttttgaatttatattatttaaaagactagtagccagatttttcaggttgggcgttatagttccagaacaatgattgcttaaccctgttagatgctagatttctgttggtatctttgtagtgtagatttgcaatattgaatagatgcctgctttcacctgagtttagtgactcagtaaaatcttagtggaacctcatttttctctaatacttctttttatgttctccagtatatattgtatattattttcttactcatgaaatcctgggatgccaaattgatattgtgccctaattcatcttcactaggtataaagaattac

SEQ ID NO: 77217 - DNA, 1050 bp, Homo sapiens
gtaatgcttttattttccataggagggatgtttctattgagaaaatatagtattgaaattatcatccatgaggtcaggagttcaagaccagcctggccaatatggcgaaaccctgtctctgctaaaaaatacaaaaattagccaggcgtggtggcgcgtgcctgtaatcccagctacttgggaggctgaggcaggagaatcatttgagccctggaggcagaggttgcagtgagctgagatcctgccactgcactccagcctgggcgacgagagaagcctctgtctgagaaaaacaaacaaacaaacaaacaaaagaagctattatccagaacgctgatttgtaaagataactttatctatcttggtcataaattcaacagctaaaaattcatttgtatcctttcatatgttctgtttcttactccaaaagatattaagaaaaatgctgaattatcaaggtctccagcgagtgaaaatcatagcaagtgataatctctgggagtccatctctgcatccatgctccttgatgccgaactcttcaaggtggttgatgttatagggtaaggcatgttttacttggaaaactagcagtttctgattgcttgctctgtgtattgactatctttttcttgccttctccccatttgattacattctcagaaggtagctctcctgtattcacttacctgaagcatgcatggctcatagttcattattttctcttttaaatatattttaggatctttctatgacaaacaagtattgatagcttttaaaaagcatgttgatgtttggaataataaaacagggctttgttttagattaaggggcagagtaatacctgtatttaattttagaaattataaaggcaaagttgtgaaattagtttcaaactctcagatattctgtggttggaagttcttgcatgaacacttttgtaaatggttcattgtgatcactgacaataacttttgtcatgcctccttagtagtatagttttgatgcctactctttattccatttctgccttttagcactctgggccctga

SEQ ID NO: 77218 - DNA, 1032 bp, Homo sapiens
tttacatattgtctgtggcagcttttacactaaaaagcagagttgaccagttgtaacagactgtatcaccctgcaaatcctgaagcatttgctacctggccctttgtagaaaaaatttgccaacccttgatatagaaaaagtccattacctcaaagagttccccctagtcctttgccgtcagtcccctcctgacaaatccctggcaaccactgatctgctctttcgcctatagttttaccttttctataagttcatagaaatggaatcatgtatcgttttgggtctggcttttttcagttatcttaatgatcttgagactaattcacactgttctgtgtaccaccatttattcttttgtattgttaaggagtatttcatttaatgaatagaccacaatttgtttatgattcaccagttgttaaacatttggattgttttgactcacttttggccattaggaataaagctgctataaacattcacatataattttggcgcatgtgtttacgtttcactcgggtaaatttatgtgtcaggagtagaactgtgaggtaatatattaagtataagtttaattttataagaaactacagttttccagagtgaatataccatttacatttccattacttctgcacccttaccaacccttggcgttgacagtccttttttaaccattctagtgaatatgaaatagtatcacttcatagttttagtttgcatttccctgatttctagtgatgttgccttattacttcccatctgtatatcttctttggtgaaatgactgttcaaatcttttacccattattaaaaatgggttgtttgtctctttagtattaagttgtgagtttctttatatacagattctatatcagatatatgttttgcagatatttttttcccaatctgtagctggtgttttcattttcttgttaaaattcgtattctggagaaatttttagacttacataaacatttaaaaattgtatagggagttaccatataccctgtactctgctcttccacta

SEQ ID NO: 77219 - DNA, 1134 bp, Homo sapiens
cttagtttaaatacttgactagaacttcagataaaatattaacatcttcaggaacatatcagttaattttgtaaacccttgaggctatcatttttttaatgtataatctcaaaatccccaattacatgaattcgtaatgcagttgatgactgtcatatcgaatgttcttagccctcaggcgaaccgcaaattgaggatgacatgttaaaagaagaaatgaatggattttcatcctttgcaaggtcactagtaccctcttcagagagactacacctaagtctacataaatccagtaaagtcatcacaaatggtcctgagaagaactccagttcctccccgtccagtgtggattatgcagcctccgggccccggaaactgagctctggagccctgtatggcagaaggcccagaagcacattcccaaattcccaccggtttcagttagtcatttcgaaagcacccagtggggatcttttggataaacattctgaactcttttctaacaaacaattgccattcactcctcgcactttaaaaacagaagcaaaatctttcctgtcacagtatcgctattatacacctgccaaaagaaaaaaggattttacagatcaacggatagaagctgaaacccagactgaattaaggtatgacacatcagcaaccaacagtaaatccttcaggaaattaaatgaaaattaatgaattaatattccttgttttctgctgccagccttaagatctgatagtgcccttttgattggaatgagatgaatgtgacttttccttttccatgtatcactagaactatcagagtaattgctgaaaaatagctattaaactggtcaagcaccttatgcgtatgaattacatattttattatttcaagcgtggttcaagaattgtgtatgtttttaaatattatactttcagagaattcttaaaataggtcatcagacagcatttgtggaaatatgcatattgattcatgttaaaagtggcgaaacaatgggctatagaggggaagaaactaaccctttatccatctaaccctctgctccatttcctgcagatattccggccagtcttcatagcaacaactgccaagaataattttaaattgggataatttctaga

SEQ ID NO: 77220 - DNA, 1023 bp, Homo sapiens
tatctggcagtaggttttagttgttttagaaagtaaaaacaatttaagattagtatttttttctttgaatatagataagtacagtgatatcagatgagtctgcagatatttaatcaaataaaatcaaataattcaaaattatgtattttataagaatagatgggtctcattctttttgagtttattttttctagccagtaaaccttgttaccacagtgcttatattttgaaggattaacaattatttattttaaattattacagctttaaatctgagttggggacagctgagactaaaaacatgacagattcagaaatgaacataaagcaggtaataagtatgaaatcttttggtattgctacatttgaattacagatgtttttcagtaaatagaatatgtacagctatttagactgtgaagaataatctgttggtggcacttatcatacatgatatagccagtatacagaaggtctgcctatttacaaatggttatagctctctctgaatggccaggtggatcctgccaaatctgggaagtcatttgttactaacatctttcctagatgattggttggctggctggacaaatggaaggatcagtaaaataccttaagtattgttttcaaagatgcagacctggattactagaggagccagcagagtagtgcagaagttgagtttttataccttttttttttttgtaaagaattgccacatattatataattggaaattatacattttataagaataagtagctgttattctcttatgtttgcctctgctttttctagaccatgaagctgtttattacagggtttatattttgaattcttagcatcatttcttttaaaatattgcaactttgagtctgattttgagataaattgttttatttttggagtttcagtcttgcacttgtgtcctgacttaaatttgttgcttataaaaatggtttgtctattaaaatgtcaaacacagatccagagatagaagaataaaatataatcatactcaac

SEQ ID NO: 77221 - DNA, 1056 bp, Homo sapiens
tctctattttactgaagctatgctgggcaattctggcaatcattaaagtgcatagatttctatcttaaactaatttttgataatggagtttttattttatgacaaatatttagggatttttctagtgagaaacaactttgtgtaaggatgatccacagatatgagttgctcctatataactttgtatttaaaaatcatgttattatcttttgttattttttaaaaaccttgggtacttaataatggtttagttgccaaactgaaaactatactgagaatctgtgttattttgaaacatcaaaaggatttttctatccagaacattttttatcctaaaaattctatatagttgtaccttctgtttttcaaatgagagctcaattcatttagatactgaaatgagtcagttaatgtaaagttgaggatgaaggcacattatttaaaatgtaagagaataagcattattttttcagtattattcatagatctaaatgaatttgattttattggttgaaaatgaagtgaaaaacaattgcctagggtggttttaagcacttttttgttaaaaacaaatctgagttttaatatatgtgttgctttgtagatgacacaataacaatgggcgctgagaagcgttttgggagagattaaggactaagagtatgtaagatgactaggacaagagtaggtggagtgtgatggtaaatgcaggatgccttcgtctttacaaaaatgcagtattatctatactcagactgaggtgctgggatggcgagcaggggaccccacagcactgtccccagggaattcaagtcctgtgaccgccagtgacttactccgtttccttggggcttttcccacctcaacctgtattgtttctttttcataaataaattcagcattatagtatcattaaaagaagccttaaagaggcgtatttttccttttggttgaaggaagggaatagttaataatagttttcacctcttctcccaaaaagtacagtccaaatttgtgcacagagattgctgtggtattcaagaggtacttgcattt

SEQ ID NO: 77222 - DNA, 1070 bp, Homo sapiens
gccctgagtgagagtgcgtgtggcacaaggcttggcactgggttttacgtttagtgagtgtttggagacagttattgtcgtcactcaatattggtgaagccaagatttaacccaggtctcttaaccacaaatctagtaattactgttgtattagactgctctcaaggaagttaaatctgaagtggaaacttaatattattgtggagagtgaccttgactcagaagttcagaggtgagactatcttaagtaggaaggttttttttaaagaagaggcaccatgtctgcaataacagctacttattgagttatgtgccaggtaccatagatactgactcagtcctcacaatgaccctatgacggtaggcagtatctttattgtataaatgagaactgacattcagcaaggttaaacaggttgcatagatattatgtatattcacagtacctaagtttataaaaatgtcagtaatgcaaattgtattcacaagggaaaagatgaaaagtctttccttattctgctgaataatccagtttactacttttttactttttacttttttaaaaaaacttttttagtactaccatgaatgcatgcatacatacctatgtatattatacccacacatcaatttttttaaccttttctaatcccaggtctctgtcagtggaatcgaatgggattatattgccacacagggaccattacagaatacctgtcaagatttttggcagatggtatgggaacagggaattgcaattatagcaatggtgacagcagaagaggtaggtacttatttctcttaagtgattttctcagcctctgaagaacagttaatgttaatcatctggaatcctgacctgtggagaaaaaggcagggtagggttgtggttctgtttcagatgtgccgtctatgtgagaaaggcatccattgccggatctcgagtcatttaaccatgctcatctttaacaggagggtggaagggagaagagctttaggtactggccacgacttggttccaggcacaacactgtcacctatggaaggtttaagatcacgacccggttccg

SEQ ID NO: 77223 - DNA, 1050 bp, Homo sapiens
gtgtgtgtggatacagcttacatatcttggccgtgattctccagagtgattctggagttgggaaggtggcactttgttaaggcaaatcctgagacgtccaggtttcttaaatttaaaagaaagatgaattcagctgagaatctaaggaaagtccccggtagaagatgcagttctttaatattcagcctaataaataaatatgaattaagcactttttacctactttgaagcaaaatataaaaaagcatagtagcatcatctctagctaccatccttggagcatttgccatgggccaagcatttcctctacttttgtggcctatttacagtaagcctattgttatgcctgttttacagatgaagaaacagacttagatattaactaacttttccaaggtcacatgactagtgagtgactgaactggaattttaaacccatacttagaagcccattctgttatcatctacactgtagatgtatgttctgcattgaagtatactgtatatgttctattaagtcataattgcttgttgaagccttgctagtctttcactgaaacttttaaactcagtccttaacctgggactaagcatctgcggccttgtcatgaagtgtgtccaccgaagtgattttgttgcagtgctcaggcttccagctcttcctggcccacatctccactcctcatgccctgcacttgagccaggctaacttgattagggcctccatcctttctcctgttggcttccagtgtcctggcaactagggttctcctccccccatcgctgctaaactgcaaactccgacaggacggctcatctcaagtgtggttctggcctagtgtatgacatcctttaagatgctgcaaacatcttgctaaacaggaaaaaacgcacactattatagtacttatgaaagagattaatgtacatagacaaaaactacttaacaaaaaaagtaccacagatttaaatttgcttttttttttttttttttttttttagaacagtcttgccctgttgcccaggctggagtgcagtggtgtgatctca

SEQ ID NO: 77224 - DNA, 1013 bp, Homo sapiens
tcccagctactcaggaggctgaggtgggaggatcacctaagcttaggaaggttgacgctacagtgagcagtaatcatgccactgcactcgagcctgggcaacaaagggagaccctatctaaaaaaaaaaaaaaaaacacacacaaccatgtgggattaaggttttatttcactggtttatgcttctctaccaaattatggttaaatgcattgtatctcaatgagataatattgacattgaccttatacaactgacattttttataggtatcagtattatctgcaactgaagaaagatatcttggaaggaagtattccttgtaccttagaacaagcaattcagctagcaggcttagctgttcaaggtaaataagatcaattcataatgaaatggttctatcagattaaaatgtgttacaacaaaatagcaagggatttttaagttatctatctatatacatctttagtagtgtttatatattagtgaaatattctgttatctaaggggcttccttttgggaaaaaatgaacttggaatacctcaatgaaatatgagacttctggaagttaatcatgttataggtcaacagagcaaacagtacaataaatagaagtatgtatatatgtgtgtatacacacacatatgtacaatcatatgccgaatgacattttgttcaacaaaagacctcatataggacagtggtcccataaaattataacactatttttagcgtaccttttctgtgtttagatacacaaataccattgtgttacagttgcctacagtattcagtacagtaacatgctgtataggcttctatgagcaataggttatacaatatagcctaggtgtgtagtaggctatacaatatagcctaggtgtggagtaggctgcaccacctaggtttgtgtaagtatactctgatgtttgcacagtgacaaaatctgatgatgcctttctcaacacattcccatccttgacacatgactatatacatatacatttattaatac

SEQ ID NO: 77225 - DNA, 1919 bp, Homo sapiens
tgaatatgagtagctagttacagataggtcttacctcctttttttccttcagtttttgctgttgttcttctctgagaagaaaggcaataagagactgctgtcatttggtcacaggtcagggattagtgcgactgaagtcattgaaatccttttgtatgttattgcctccttcaatgaccttctgtctttccaggtcacttacttcagcctctggtactacaacaagcaaaatcagcgccggtgggtagatttggaaaaacctttgaagaagcagctggataaatatgcattggaacctaccgtctattttggagtggtgttttatgtgccttcagtttctcagctgcagcaggagattaccaggtgagaaattacatgccgtttgtttttaggaaatagtctagtgagatgtaaaaagtgaaactaaggttgaagtcagaagataagtttgaaactttgccctctcgccccacatttttagccacggtgttacaaagagattctcatatgtggcatgtcagagtgttttactgcatgttgggtaacttatgggttcactaggcacaaaggaataattaaagggaaaaatgatggatttaccctctctgtgaactcttcttgtagtgatgttacctttaatgtttttgttgttttgtttctgatcttttgtaacaaggaaaggagagaagagattttagaaaattagttacaaaatctgtcttcattcctcaaggaaatgtgctgaaaggctcctagaattctctgcctctagctatattctgtagaccggttggggagggagtacagaggagagggagggaagtgtttaagatcaggaaattttggccaataagtgcacttaatagggacaaaagcagaaagggaagatgatattaaggagcagaatagaggaactaagtgttcttattctttttccccctgaagacaatgaaaaaaggaataaaatttgagttcttgagcctgcctttcaaagttctgtgaatcccatcactacctgacctttttaaccctatttaatgttacttttgaacgttaaatatgttcaaaaatgaagtagctgtgctacttcaagggcccgaaacatgctgcacgccctttcatctttgtgtcctagatctttctctcacatgtatttactggaatcctgtttgcctcctgagttgtggttcagaaggtacctcctccatgaagcatctatgaccccaggatagaatgagttttggcttaccacctagaatttgattctacttgtgttaagatggtaattgtcataccctgttattaggattgtccgtgtatctttttcctaggttttagcccatgttttctttagctttacttaatgatatcttacacagtgccttgcagatagtaagaacctggtactgtcccatgtttgtggagtgctgtttgagtctgccagttaatgattaggagagaatggaaagtcaaagcagtaggatccagtggtaggataaacacaaactgactgtaaaagtctgagatagaaatattgaagagaaaagtggaagccagaaggaaaaagcctgaactgatcactttaactcatttaaacatttactgaagatatgctctaagaattgtgttgaatagagtgggaggtgaatatgctttaatcccaccctggaggagctgctcacagtctggtggaattggcagttcatataaatagttacagtatcctatgataataaatgctttaattaaagctgtggattcctaggggtggggcaaggggaacttgaacaggaaaggtagagagactgacttttaaattgactttagaaatgttctagagggaatagtttttgcaaagcagggggaataatcaaaatgattacatgtcttcaggaagtttcaggtattacctaaggagg

SEQ ID NO: 77226 - DNA, 1003 bp, Homo sapiens
cctgaggatggggcaagggagtcctatcaagggctggaggagttccaacaaagagaactgcacaggaccaaagacgcagaggaagctggtctgcctgaagcctgaagtgcgtggaggaaaggccgactgtaagggccacacaatgaggattttttgttaaaggatttagatttatcctgagggtagtggggaagttaatgaagggtgtaaacaggtgtggtacgattgtttctgtgaagagtgagccctttggagaatgatttgaggggagtggttcaggtacagatggtagccacctggagttggatagggttggagagaggtggttggaatctggatcaggacctaccgagtaatagagaagggttagcatgggtcctggttgatattcaggttttcagtagatggtggggctataacagagaggaaatgtgaaaggaagtgcagatctattaggggcaaggaggagcgtgtggtgagttcagttttagaaatactgagtttgaggtgccagttggaggttttgaatagacagatggatctgctgatctggagttcaggcatgagatccaggttagagggaagatattgggaagtatcagcctaagtgagttcattaaagccagaagatggtatgaggctctccaggggagaaaaagaggacatcgcagacccctcatggtagattagaggaggggaaagtgttggaaggaaactgagatgaaactgccgaagaagaagaaagaaaaccagaacagcaggcctcagtaaccagtccctgcttacttgcatttattcttttttagggatgaggtctcactccatcacccaggctggagtacagtggcaccgtcatagctcaatgcatcctcaaacacctaggctcaagtgatccttttgccttagcctgccaagagctgggactacaggtacactccaccacacccagctaattttttttttaacttgtgtttttgagatggagtcttgctatgtcgcccag

SEQ ID NO: 77227 - DNA, 1089 bp, Homo sapiens
tgatgtggagcttttgggtctatttgtttattcgatgttgctacaagtttgttactgtgagtaattgaaacctgcctttagcaagggtaaagatgttcacttgagaaatgagtgttattttgaaactttgcaaattaaaactaaacaaaactcaattctttttcttggggaatgttcaaatatttcccataagcttctttgaaattaataagcattattaaaaagattcaaggaagtgaatgcatgctcaagtttgaccctataattcagaatgtttagttttgtaagtatcaattattcttaatttccattcttctagtatttgaaatacctgtggaatgaagagaaaaaaattaaagctaagccatcttgtccaatgtaattccagtagagctctgcgactctaaagcttagagctacatctatattttcaagcacatcaactttaagaagaaagttttgaggaaacaaagttttgatctacctttccttttaaatagatgaagaacttcctgattacattatggtgatggtggccaacaagaaaagtcaggaccaaatgacagaggatctgtccctgtttctagggaacaacacaattcgattcaccgtatggtatgtttctgaatttttgtgcctcagaccaaagtttggcacaagcctgagttgatattctgtccaaagagaggttcttgacacttgagttaggtttactttggagaggcagtttgtgagtgatgagagcacagcctctgtattagtccattttcacagtgctatgaagaaatacccgagactgggtaatttctaaaagaaagaggtttaattgactcagagttccacatggctggggaggccccaggaaggggaagcaagcaccttcttcacaagtcgacaggaaagagaagagtgaaggaggaacttccagagacttatataaaatcatcagatcttgtgagaactcactgtctcttgagaactcgggaactcactgtctcttgagaactcactatcatgagaacatcatgggggaaaccacccccatgacccagtcacctccctcccttgacaggtggggattacaattca

SEQ ID NO: 77228 - DNA, 1060 bp, Homo sapiens
tggctccctcaaaggtttcactgttgacattagtcgggttgcagctccatcatcgtaagtctgtctatttaaaagaacaacaaaatgtattacagccaaattagggcaattatcaccaaatctttaaagaatgtttacttgaaaaatttcaatgaaaaaactgaggatactccctttacatattccattcaaaactgctttgaaattgcactttctttcaactttgatttactaaatttgtgataaaagataatcatacttagatcttatccattattttattcaaaaaactactcacgatcacttcattgtttctaaaaattgctgagaacagcaaactgaaagatataaaaactaatataaatgtcacatacacagagccatctgcccccagcaggtctacaccagactcttacctgacatttgtggtttttgactcctgcgaacttgtagaaactctggaatctcttttttcaggtctcgcgctaggaatggcaagtggtggcactgcagcttcatgcctcctctcatctccccgactgaaattgctcttgtttgaaggcacgttactatcaaagatgttggtatcagaagacttcagactagagggttctgaaaagaaaaatacagtccttttaatctatttttatttcttatttttatttatttatttatttttgagatggagtctcgctctgtcgccaggctggagggcagtggcgcgttctcggctccctgcaacctccaaatccctggttcaagcgattctcctgccccggcctcccaagtagctgggattacaggcatgtgccacgatgcctggctaatttttgtatttttagtagagacggagattcaccatgttggttggccaagatggtctccatctcctgagcccatgatccgcccaccttggcctcccaaaatgctgggattacaggcgtgagccaccgtgcccggccatctatttttattactttaagtcgtttccttcctcatcaccaattcaaaagcagtatgtttattgtagaaaattttaaaaatataataaaaatcacca

SEQ ID NO: 77229 - DNA, 2148 bp, Homo sapiens
tatttatttatttattttgatacggtgtctcactctgtcgcccaggctggagtgcagtggcatgatcttggctccctacatcctccacctcccgggttcaagtgagtcttctgcctcagcctcccgagtagctcggactacaggcacatgccgccacgctcagctaatttttgtatttttatagagacagggtttcaccatattggccaggctggtctcgaaatcctgaccttgtgatccgcccacttcggccttccaaagtgctaggattacagatgtgagccaccacacccagcctcatatttatatttttacataaaaccaagaaatactctgtgaatttctcatattactgtgtactgtttttttcttaaaatggaaacattttgtggtagaactcttgttattttctgagattaggtaagcataaattttatctgattgcaggatgaaaactttcggaagagaaagttgcctgtggtaagttcagttgttaaagtaaaaaaattcaatcatgatggagaagaggaggaagaagatgatgattacgggtctcgaacaggaagcatctccagcagtgtgtctgtgcctgcaaagcctgaaaggaggtaccttgaacatggctgtaaattaatctttaactgccttggtggagtcttcctgatttattgaagagaataatcacgaaaataatttttgtttgttttttgagacggagtctcgctctgtcaaccaggctggagtgcagtgccacgatctcggctcactgcaacctctgcctcccaggttcaagtgattctcctgattgagcctcctgaatagctgggattataggtgtgcactaccatgaccagctaatttttgtatttttagtagagatggtgtttcaccatgttggaccaggctggtctcgaactcctgacctcaggtgatctgccctcctcagcttcccaaagtgttgggattacaggcatgagccaccgcacctgacataaatatttaatgtaataccgtgtaagacttttccattgggttttgagaaacacgttaatgagagaaattgcttaacattggagaggattgcagagaatattgactaatatggtggggtgaggaggaacaacatcaattaagattcagatttattatttaaaaaaactaaaaggggcctaggcatggtggctcatgcctgtacctagcactttgggaggctgaggcaggaggattgcttgagaccaggagttcgagaccagcctgggcgatgtaatgagtctttgtctcttaaaaaaaattaaaataaattagttggtcattgtggcaggcacctgtagtcctggactggagaggtggatgtggaagcattgcttgagcctagaagtttaaggctgcagtgacatcacactccatcctgggtgagagagtaagagtctgtctaaaaaaaaaaataaggttccagtgtagttggcattttctaaaaactgcagctagtctgtttaaaacctagagaaggttgtggtaaaggcataatagatggctggcctgtgaggaactgaaatttaaagtttaataaaaatacctttcttaactcttttagaccttctcttccaccttctaaacaagctaacaagaatctgattttgaaggctatatctgaagctcaagaatccgtaacaaaaacaactaactactctacaggtaatttaaatgtattatgtttacacttggtaagacatttctgtaattcttgagtaaggtgaaaatgattgctccttaaattgtaaaataaaggtgcctgtcagatgtcaagaccaagatgaggttcccatatagaaaaatggctttaaaaggaaattgacaagtttgagaaacttcgccaactgttattggactgtagtttttcaagcaccatataatgccttttatatctttccaatgtgtgtaaaatatatagtacgtaaatattttgaagagaattttgatgaagtaggactttcatattagtagcattagattcaacattagatatgaatttacgatgtgtaaaggggagtacaattggacaatgataggtatctgaagttatagaaatttgttaaacagtagtatataaacaaggttggtttcttcccttttggcggaactcattag

SEQ ID NO: 77230 - DNA, 1034 bp, Homo sapiens
tctcagtaacgtaagaaaaaatgaatggtatctatggattgaactcctcatatatatgttcttttcttttctttttcttttttttttggagacagagtctcactctgttgcccaggctggagtgcacagtggtgcaatctcggctcactgcaacctccgccttccgggtttaagcaattctcctgcctcagcctcctgagtagttgggattacaggtgtgtgccactatgcccggctagtgtttgtatttttagtagaaacgaggttttaccatgttggccaggctggtctcaaactcctgacctcaagtgatccacccaccttgcctcccaaagtgctgagattacaggcatgagccactgcgcccagcctgaactcatatgtcctaaaccaaaggaggcatttatatttaatatgacatagtcactgtggagttttgacgtattactgcatttgtatttctatcttttttgcttttatgtgaaagttccacagaaacagacacttccagttgctcccagaactcgaacttctcaagaagaattgctagcagaagtggtccagggacaaagtaggacccccagaataagtccccccattaaagaagaggaaacaaaaggagattctgtagaaaaaaatcaaggtaataacttaaatgatgtttcactctttactacagttttttcatgaggcattgaatattttccaatggatttttatgaaatattacactatgaaaaaagtgatgattaagcccagaaatagaatgagaagaataccatgaggaaggttcataccaacacttcagaaaaaaattttttttttaaagaggtagggtcttgctgtgttgcccaggcagtcctcaaactcctgggctcaagcagtcctcctgcctcagcatccttagtagctggaggtgtgtacaagtgtgtgccactgcacccagccctttctagaaatttttgaaagtctttttattgtggaaatttttaatattctcaaaaatggaaaggctagtacagtgaactctcatg

SEQ ID NO: 77231 - DNA, 3963 bp, Homo sapiens
catcaatttttggcagcggtgttaagacagtttattggcaaaagaataggtttttccacaggtgatgctgggacaactgaatatccacatgaaaagaatgaagttggaaccttatcttatgtcataaacaaaaataactcaaaatggatcaaaaacctaaacttcaaaactcttagggaaaaaaatagatatgtcttggattccagaatgatttcttaaatatgacaccaaaagcacaagcaaccaaaggaaaaaagataactcggacttcatcaaaatttagtatttttgtgtttcaaaagatactatcaaaaaaaaaaaagacaacaaaatgggagagaatatttaagaaacacctgtctaataatggtctagtattaagccaaggctgagttcttatttccccatccttaagtttacacgatactatattagtgaagttgaattctgtcattaccacatgtatcttgaaagaagtttgtgtggatcacgggtccagttactttctccgccctttccctccagaggatttgtcactctcaataatgttatatactaatttcaaggggaaatacaactcaaaacaaatcagaaatctgaagcttaaaaatgttatggtttagatgatgaaaagggaaaagtacatttaattcatatcatatttagatgtaaagcacttaatgttatattgcttaacctataaagtagcgcttcagtgctctcatcatatgaagtaaataatagaaaattctttgtgtgacacatgtctgttttcagccaatcagaaaccaggattattttgtatgtaataatagggtttactggaagaggagctatacagatggtacttagaggatgtagggccctacgtattagggcttcttagttgtagcgaagagcaattggtctggtacgtttagctttttcacatttagttttgaattctgactctagaaatgtacaaccccatcttttgaattacaggttttaagatgttatttgctcttaatacgtcttaaggtaacagccttgatcactgcttttactttcgatgaaataacttaatgagctgtgaagaaaaaattatcagattttaagggagagaattttatgaaaatgtctttgaggttcctgtcacctttatgagaatgtcttcaaagtttccatcaccacctctaccaatttttcttccaccggagccagtggacttaggttccataacaagctcctcttgttcactgaatgagctagacaatatttcccaccttttaaggaaaatatcagctgatatcaatgaaattaaaggaatgaaagcagctattttgacagtggaagcaaatctttttgatctaaatgttagagtgtccaagaatgaagcaaaaatttcatctttggaggttaaaatgaatgaatattcaacaacatatgaatgcaacagacagtttgaagatcaagaagaagatactgaatcacagtcaagaactactgatgtaaaaataatcggcttccttagaaacgttgagaaaggtaaactcttaatatatgatatgttctaggtacccatcctttgatctgtatctttccacgtatgttgactgtagctctgatgtggagggagcaagttacagagaacttgaatttttcatggacctttaatgacaaatttggattctgcttgatttagcttagcaatctagaattgatcagaattccatcctctttaatggagctctctaaaacgatgttttgaaaagacagatgaacctagagcaatgaagcaaaacttgaaatgtggaagtgtggtctttcatgtgtcttgtgaaattattttaaaatgtctcattctttcatcatgtactgttgatgtgaaggagacctgttgcagtatttggatggaaagagcattcttcctgtaacttttcacctcagttttccaagcttcccacaggaatgcaacttgacctaagtgtcatcttcgttacagttcctcagaatgtgtgtttttttatggtaataattctggaaggaattgacttttttgggacgcaccagtaaaatttcatataacttatgttttaaaggaaactaactgatacaatttcaaatcgagtataggttttaaaatttaaaaacaccttttaatgaaatgtggtgcttggtgggagatggcccacttaacatctttgcactgagtaagcaaagcctgtccttgtgaagccacctgtaatggatatacccaaaatcagcatgtgggcatcttagtaagatttcagtatttgcaaccctatcagttacatccctttgtacactgtagtgcagtaccttataatgagcaagtgagtgcctgatgtctgctaagcgctgtgggggctacagaaaagtgtgacattctcccatcctcaaggagcttaacatcaaatcgaggatggaaaaaaatcagttctttgtccctattttgtgcagtcagactgctgggcatattattgttaggaatagtgaacctaataggaattaatgttaggagcctattttagaagaaataagtagttgaacatcttttcttgtggaagaggcaaagaattattatcatgctttgctaacatagggtgtggattgtagagctgagtgtcttattgttttctttgcatgcatcgaagcccagagtttgtcttttaggaactcttgtttagatgatgagagtgttttgttttgctatttcgattatcttcaaaggtcatgagttagtcgtgatggtaagagctcaggtgatggagggaggtgcttgccatgcttattgtgcagttggctgttatgcgagctgctgggccacaaggtgccttttcctggattttccacccgtttgccacctttactttccccgcagaattcaaattcaggaaaactgatgtcctcatagagggagaaccaggagtgttttaaattggcatttgtggtttaaccctgagtacagccttttttgtcttacaggatatgtctttggtctataaatactattaaattgaattgttgaagctttaagttacttttaagacttcaagttaagaacccagaaggattgatttttgggaaccacatgctggtattgtctgtgttgtaagcttagtgaagttttaaaatttatattctaggaactcaacagaggcaattattatcccgactgcaaatcgacccagtaatggcagaaactctgcagatgagtcaaggttggtaatgtttcaagttgtactgtaatccagccatttcagttgccatttccatttcttacaccccatttaacgtatctcggatctcttagatcctgccctaagatgttatatttagatctgtgaaaatattttagggccaggagataagatctgcatttctttcatgttatatagtgttataattttttgcctcattggaaaactttgttcctttcacaccattccaagtgtgtccctagcactgtcggctgtcactctcctgctgtcaggagtgacctgcgtttctgatttaccctcccactctacccagcttttgtcattgccatgagtggcttttgtatcctgtttttcacctggttagccttatcctcttgtacttcattttggagtcttatcaccagggccacacctggaacttgttgttctagtgttctagagccactctagtttgcctgtctcctttcctctccccacagacacacatgccaggggctactccaggactggagctgacgccttcatttttattatctctgtcctcagtgcccagcccctgccagatgcatgttcaatgtcttaaaaatgactgcaggataaacacaggcaaccatgagagacccggaatcatctcagtccttctgtttcccctaagtctgtcttttgtgggaagctctggtccctagacccctctcagtcaggactccacagtcagtcactctgttccccgaccctcccc

SEQ ID NO: 77232 - DNA, 1063 bp, Homo sapiens
tcaattccttccagaattattaccataaaaaaacacacattctgaggaactgtaacgaagatgacacttaggtcaagttgcattcctgtgggaagcttggaaaactgaggtgaaaagttacaggaagaatgctctttccatccaaatactgcaacaggtctccttcacatcaacagtacatgatgaaagaatgagacattttaaaataatttcacaagacacatgaaagaccacacttccacatttcaagttttgcttcattgctctaggttcatctgtcttttcaaaacatcgttttagagagctccattaaagaggatggaattctgatcaattctagattgctaagctaaatcaagcagaatccaaatttgtcattaaaggtccatgaaaaattcaagttctctgtaacttgctccctccacatcagagctacagtcaacatacgtggaaagatacagatcaaaggatgggtacctagaacatatcatatattaagagtttacctttctcaacgtttctaaggaagccgattatttttacatcagtagttcttgactgtgattcagtatcttcttcttgatcttcaaactgtctgttgcattcatatgttgttgaatattcattcattttaacctccaaagatgaaatttttgcttcattcttggacactctaacatttagatcaaaaagatttgcttccactgtcaaaatagctgctttcattcctttaatttcattgatatcagctgatattttccttaaaaggtgggaaatattgtctagctcattcagtgaacaagaggagcttgttatggaacctaagtccactggctccggtggaagaaaaattggtagaggtggtgatggaaactttgaagacattctcataaaggtgacaggaacctcaaagacattttcataaaattctctcccttaaaatctgataattttttcttcacagctcattaagttatttcatcgaaagtaaaagcagtgatcaaggctgttaccttaagacgtattaagagcaaataacatcttaaaacctgtaattcaaaag

SEQ ID NO: 77233 - DNA, 1040 bp, Homo sapiens
agcagtccgtcctgcttcctccacaggagtatttgaaaaggttgacagccgagatctgtgtgtgggatccacttcatcagctcttgtgcatgttttctcttctgcctccttcagcttttcattgtacccatggtgcacgcagtttgaaatagcaagtagttctgtgaggcttatgaatgactgcagtccttagctcctatcacattttttattctaagatccctttgtttctgcatattctattaattttctaaaaacatactgattttgtgtacacaatactctttgttatttctctgtggtctgaaaggtggttttgacatttttcccctccctgcttcgtcttgttttctctaagtggtctgttttggctgtcttttatgctggaggttcccctctgatgtctggggatcctaggtggtcttacatttaagagtggagcactcagaaggtcactggtattctgggttcatgagttggggcatggggcactttgactttctgtttgaaactagaccctgtggtggaaagtgatttgtcctgcctgtctggtttgtgggcaccctgatgtcactgccttcaagactttcctctcaggctggtcagcttctccaaaacaaagtttttcaagtaatagcctggtagtcagagttctgcgagcttaagtggggaaagaaggctgggggaggcacctcaccattaattattatgtaatgtttatttaaccctcccccaaccattgtcagtccagtacttctttcatcatggctggtgtctcttggtccagggactctgttcttatcctctgaagagtctaaagctccactttctccaagggagaatgcatgcagtgggtaaagatttatcaggaaatctaattgcctttaaaaatttttaacagtgtaccttcaggtgattttgtcgtagcatctttctggcagagaccctaatgcttcatccataggcctctccgaagattatctacaggaaagcacatcaccagtcatcccaggtgtcttcagtgtagaggtcgggattgg

SEQ ID NO: 77234 - DNA, 1437 bp, Homo sapiens
acctttattatatgtgtcagccttccttggtatgtactgctgagcccaccacacacacccttccagccattccacattctaacctttctcagatgccttcggccttgtgaaagcccctttccttctacgtgcgttttcctctgcctgaagtgctgtgttcgtttctccgagtctctctccttgtttattcctgcttgttcctttactgctgacttcagatgttcctccttgctaagcttttcgttggttcttggctggagtgggctgttctgtattctcagcaccttgttcacatcccttttgggtcatgctattctgaaattgtatatgtgtctgtttttctttttttctttgtgtatctagctcagttctcttagttgttcagtaaatactcagtgaatgaacataaatgaataccctgtaaattttggtctctaagctttaaaagaagtgtattaacttcagtccgttgatggcgtattgataggtcagccattctgggttgtaggtcttggcatattttataaaatagtagatgatgtgagcttatggttatttgcattaaaggccagtgtttttcttgatacatatgtttaagtgtccattcacctttcagttaccttttaaagtagtcctcggtttataaccaactggaaattataccacttgaattctttttatcaggacatgattctaagtggtactgtgcgaagtgaacaaaccagattttggaaaagtggttcagcagtctgtgtattctaattatagggagcattaggactcaaattctccaggtttttagaaaagatttttgtactttaagggtatattgttaatatctgttgagatgcctcacctgagaacctttctctgctgtggttagggagtgttaatcagaatcacttgtgccgtgccctacgcgagaaggactccttgagttctttgaaaacatgtttggaatagaattatagccctgttttcctgagtggaaccagttgtgattttcctttgaaataatttgaatatataaaagattgacattcttctcacatatataatgttgggaatgtaaggtatattcaaaagtaaacatttgtggccaatttttttggctcagattactatgacatggaatccatggtccatgcagacacaagatcatttattctgaagaagccaaagctgtctgaggaagtagtagtggcaccaaaccaagagtcggggatgaagactgcagattcccttcgggtactttcaggacaccttatgcagacacggtagatggtttctttttcttgtgtagttaatttgtgtgattagatagtaaaggttaaccattcgtttgcagcttccctcctccccgccctaaccgctagcgtagagtgctttcattgattcagtagctagcccatgaatagttagccaaattcagttttc

SEQ ID NO: 77235 - DNA, 1008 bp, Homo sapiens
cagcaccctgaaaatctgagctctcaacacaccgttagaaaagctaccatttgggtcctcaagctgcctgctcagcaagtgcaactgctgtgggtggaggagacctctgagtcccttgtttgaggctgcagtttggtttacgggtttcattccttcaaagcacatgtcctcctcttgatctgacatgtatcctggggggctggggacaccatccagcgtcactataaacttgggacttgcaggtttatctggttgtacaagatctctgccagacagataaaaaataccatagaattagggaaacaaacacaaaacgctgagccccctaaagtgctcttcagcagaactatcactcccttggctttgcgtttggttcaataaaaaaagactaggtagggctaccaggtgcagcactggtgggttctctgctaacacacgatggccatgaacagtcacagtggcatcaccagtgaccctccagcctgtacttactaaggacaatctcccctcaagcctgaccccatcacccattcgatcttcatagggtcaacatggaaacaaaccaaaaaattagcatcaatgctcagaacacaagggccagcagcatttatgctaattatctgtatgtttcttcttttatagaaacagtcaattttctaagggaaaaatcacccaaacctgatctgccaactctctttagagctgacctgattatggtcagctggcttttaaacttgcatttcctgaatttgcataaagaaaagaatctttaatagagttaaatcatacactgagttgtaatttgtaggttaatggatttctgaacaagaaagatgaactggaattcttgaaaactgaatttggctaactattcatgggctagctactgaatcaatgaaagcactctacgctagcggttagggcggggaggagggaagctgcaaacgaatggttaacctttactatctaatcacacaaattaactacacaagaaaaagaaaccatcta

SEQ ID NO: 77236 - DNA, 1623 bp, Homo sapiens
agcctcaaacaagggactcagaggtctcctccacccacagcagttgcacttgctgagcaggcagcttgaggacccaaatggtagcttttctaacggtgtgttgagagctcagattttcagggtgctgtcattgtgaagggaatctttgacttgtttctctaccttgaatgaatattggttaaaggccttgcttttatttatattcagtaatggccttttttcttctttcagacaaacccaccaagtacatttcagactctttttcctgtgtctttttcataggtgggctgttactccagtttgaaaacggagttcagccatggaacctgagagacctcttccgcttatgctggctaaaggatgaaccaccattcttgttgccttctttacctttgtattttcttcagaaactgtactgccactttgcccttttatcagcaatagtctcttgcaattaacttgagagaaaaatttagatttgatgctatttctacctcagtgaaatttctttgaaaggagtttctcacctaatctatcaagatcttggaactgtttaaattaatgttgaagagtaatatttagcagaactcagatgaactcatttcagatagcaccatagtttttggcaggtgacagtttcttatcaccgtttctttcactgggtatcagtggtagctgcaacgccactgatcatttccattcatgatagagaatggtaattatgttccttatatcttctaaaatatttagaagcacctcttcattggcaggagggataattactcaatcttaaaagcgtacagattcaaaggaaaaacagtaatggattttgaaacatttccttgagtaatcctcttcttggaagagatatgaaaatgtattgaatacctttctcgatcattaaaaatagaatagacttcagagggaaatcatatgttagtggagcaataacacttagctttattttaattggttgcgtttcctactgtgaatcaatgacgtagtgtcgtggttttgattagtggagggagttgaaaatctgaccctatcaacaggaagaaaaacttaaaaaatagtaaaagctgcagtaggcagtcccgatttattgactctgtatgttttgtctaaagagaagactccagtgttttcactactcttgattttcaatttggtaccttaattttttggtctattaggatctggtttcatttaaatgtaggtgtccatatgaggctttatggggtatacatgtagcagcagtgacaccataaataatatgttagtaaaaattcttgccagtgctgtggccattgtgctgacagccatgatgagtggtgagcctcctttcccattgctttgactggggactcagtgtttccctgctgctcaaggatgaagctttgtaagattagcataggggtgtggctggagagactcctgcagaacagttctcaggagtctctagtctctgcaccacttcccctgtgagcagggagtttgaaactgcaattgcttctggttggttttatgttgggttgtttcaaggatgctaccaacaacaacatctgttttaacctgctgtcttttcactcactgtcatatggcagcacagattttatagct

SEQ ID NO: 77237 - DNA, 1004 bp, Homo sapiens
gcattgagaagattgaatatgaaatatgctttttttttgttttgtagagccttccccaattgtaaatttgctgaaaaatgtttgtttgttcacccaaattgtaaatatgatgcaaagtgtactaaaccagattgtcccttcactcatgtgagtagaagaattccagtactgtctccaaaaccaggtgagtgagtgactgtgctactacatttgggtaaaaaatataaaatggcattttgtgactgtaaatggaattgaacaaacaaaagatggtttcagaaataattttggcaggatcagttaatccaaccagtctttaaagagcaagtgtgcctatctgtagtattccgaagtattttgactagtgaatatataaaccttaccattctaatttaaaaatggttttcactttcaaaaaaaacatcagtagactgcattaaaaatgggttttccaaacagattggagatcagtcctggtttttattttgttagcagttgcaccaccagcaccaccttccagtagtcagctctgccgttacttccctgcttgtaagaagatggaatgtcccttctatcatccaaaagtaagaacttctattttctcaaatcaatttagtgacaacatctcaatttcctcatttaacttcttttttgtcagagttactacattggtgcaaaagtaattgcgatttttgccagtaaaactattaagttgttcctcgtcactgaacctccatctggccccttaggccaagtggtctgaaactgttcaatgttagtatcccaagcactcagtggggggaagcatatctttgctagtcacattttccattattccctgcatttaagtatatggatgggttttagcgggggctggggggcagtttgaacctaatgtcagaactgagatgaagaaatccagtaggtactgcttaaaaccatccaaacttgtactgatgatggttgatgaatctccagatgtttagttggtcaaaatgaattat

SEQ ID NO: 77238 - DNA, 1936 bp, Homo sapiens
ctgaagcgatatccttccaccgtggccttccaaagtaccaggattacaggcatgagccaccacacccagccagattttaacttctcattatatactacgcaaacatatactaaggccagcaggagtatatatatgtgtactgtacttgaatttcacatccattttcttcgacattagcaactgggagatactgaaaggaagtttcaaaatattttagtgtggccagaaaatttaattacatatggtattatcttttatctacctgacataattgaattatttttaaaaatctgccatttatattgtaatcttatgaccaaatatttattgcttaaaactagtcaactttttaaactgagatatatggtatatatggatacaaagcagataattaaaacaatttttggttctgttcattcagcgaatagcacccagtcctgcctggcagaagatcatgcagtttggaagttttcatgtactgatgaaagatactctacagaacttgtcaaatctttgaaacttggaatatattgctttcataatatgaagttttattgcctatctatctgaagtgtctaatttttcaagtttgtaagtttattatgtggttttaacattgggtgtttttgttttgtttttactatgaaaagacagcttaaggaagagctaaattctgttaaaatatttggggcatgtttgtgcactgctgttgtgaggatcagcatatgaaattgacatcatggttagtcatggtactgcagcttagggggctacacggttgctgtgtgagtggagagatgcagtgaggcagttgtcattattctaaaaattgtactactttcacttttcccaaagattatataatgttcataatccaccatgaaaacagcattggccaaaggtactgaggctgcttaaaatattcaattctgctttttaatttttaagtgaatttagtttgaaaagcatgattatacaggcctctcaggctgagtgctactttggtaaagttcccagttttcctgccttctgtgacaggatgaatgaggtgggtatggacagtggaggcagctggaatggcaagtgcagaaaataggaacagttctatacagtgctctcatttactaataacataatgccttctaaataatttttttgggaaactacattatcacaaaattatacaaatttttttacaagtatttacatactgtatctgaaaacagactttaaagtcacaagattataaatgtacatatatattctcacattctgaaaaataacattctcagaatccacagaaaatatacttagttactactgaagataatttttgaaatgtaaaaattagatttaaatagtatattttaaatgacagaactataattacagagatcagatcagataggtaaactgcaagatagataggatgaaacttttggcctactgtattacttacagagtttttttgtgtgtggtttttaaaactgttaaggcaagaagtgtcaaatgctttagagttaaataacagatcactgatttcaaagacttggtgtatagtgttaaaaattaaagcttaaaaggtggttagaaaagtggattaatgcaaaaggggtaataaagactgcaacattctcaggaccaaattaaactgctaaaaaaaaaaaaaaagttcattgacttgcttagtcgtatactcaaatgatgataaacctacatgtgcaaaggctcacgtttaagattgtcaagccagcagtctactgttgtgttgccattgcttttccattgggagaagaaagaattaaccagtcattaaaccatttggtaagttgcactttgctgtgctgatcccacaggaaaggcttgaaacacgagaagcagcaaagacagagcacacaagtgcataaggctgttgtcttcggcttgggtgaaatga

SEQ ID NO: 77239 - DNA, 1025 bp, Homo sapiens
ccagcttttggctacagagaaattatatttccattacagtgcaggtagaaactctgtaaccttaagcatgtaaactacatagaataaaactgtttccactgcatttctgtccttcaaagtggccaacctgattaagtcagccttaatcactgctgctgtcagtttcacgactaaaggtcatattgactaagtagtcatcagctgaccacctcgctgtatcagccagcaacgaggggaaggtgaagaaacatgataggccatatagaatctgccctatgtttacttttttaacccagataattatttttgtgtgcagtatctaagctcctgattgtgtaacctgggacttctggcaccttttgttccattcattttatgtataaaatgcatgccaaagcacactgtgccctctggtacccttgcttccaatcgccaaccatgctcatttccttcctttttttgtggtccctttttgtggtgatcattttaaaccacgtcatccaacaaatgttttatggtcaaccttagcttgttcataagccatagcaactgaaagattaaactcttaaatatgtgtctgggcagtggctattaaatagcaaaaaacaatcagattttagtattttattatttccttgtaaaatggctgaactaaattaaacccttgtttcccatttgttctataatttatagtgaaactgagaacaaaactatctttataaatgatagctaaaagtatttccagatatttaaacaatttaaaataaatttcttctgcagagatgcaaagcatctcaacactggaatgaacaaatgccttaaattcaatggagtaaacctttagaatgaagaggaactgtcatttcacccaagccgaagacaacagccttatgcacttgtgtgctctgtctttgctgcttctcgtgtttcaagcctttcctgtgggatcagcacagcaaagtgcaacttaccaaatggtttaatgactggttaattctttcttctcccaatggaaaagcaatggc

SEQ ID NO: 77240 - DNA, 1463 bp, Homo sapiens
aataatgaaattctgtcattcttggtggcaacatggatgagactggaggacatgatgtgaagtgaaataagccaggcacagaaagataaatacatgttctcactcctgtgcagaaactaaaaaagttgatcccacagaggtggagagtagaatagtggttactggaggcggacaagggggagggggagggggatagggaaggactggttaaaggatacaagtttacacagccagataggaatagtatgttttagtattctgtagtactgtaggatgactatagttaagaatcacgtatttatgtattttcaggtatttacaagagaggattttgaaagtttccatcacaaagaaatgataaatgtctgaggtgatggttatgcgtattaccctatgccctatagatatgtataattatgtgtcaatttcaaaataaaaattcaaaactacaactcctatgaaaatttttgagcgtgtttgtacttattaagtgtatttataaatcatacggatattatcttcagcctgcatattaaattgtagttaagcttttactttttaactaaaaaataaattctattattttttcctatatcccactgcactgaccccagtttggaaatcctaagattatcaaataaaaactttgattattgaagaatccaggtgtactgccacagaaaagttctattctgtagcatggactctaatatgtaatctagcccattgtgcttacagatagatgtgtgcctgtagtcatagaaaaatttgcatgagctaatgactgccttgctactagattagctcaaagcaaaaagttctctgaaagcaggtcaatagggtcatttttatattatgaagaagaaaagcagctgttgtattacattcactgtattggtcctgcttgtgtttcagggcaagatccttgttgggacaaggaatgctgaaataatcgaagttggagagaaaaatgcagcttgtaatattttagttaacggtcatgtggatgggccaatctggggactagcaacacatccttccagggattttttcctttctgctgcagaagatgggacagtgagactttgggatattgctgataaagtaagtacagataatttttttaaaagaggttacaacttctaaaaagaaaagttggaagttctaaattgctagtacttaaagaactgccagaattctgttgagcattttgaggggaaactggtataatttagaagtacttcacttaatgtttcctatgactctttttttttttttttttaaatgcagaagatgttaaacaaagtgaatttgggacatgctgctcgtactgtgtgttacagccctgaaggggacatggtggctattggaatgaaaaatggagaatttatcattttactagtgagttctctaaaaatatggggaaagaagagagacaggagatgtgcaatccatgatatcag

SEQ ID NO: 77241 - DNA, 2049 bp, Homo sapiens
acatttgattccttggactactgttatactcaaaagccttccttaatcttctaattgtcaccctaaatatcctaaaatttctgtcttcctagtagttcttcatagtcctaaaaatttgtcagagagaaaggtaaatcaagaaacatgattttcaaatgatttaaggtggtactagggtttaggatttcctttgctttttatcatttaacacactgcttatcatacagctggaagtgctctgggccagtgtctctacttcgagggaagaaggaggtagtgagacagaaggaaatagcacaattcctggccctgacagaagggtgttcaggagacctgctctcctctcactttattccatctcatctggacctgtggcttccaatccacatctctttcctttaatatcctgcattggctaggctgtataaatcctttggtgcatcgaaaaactaagtgcattttttgtttttgtgattatgcaatacttataggaaaagttataattttagaatatttaagtacacttacatttttgagaaaaagactattgaaatgtttgtgccatgtcaaatttcagttgaacattttgggtattcttaatataagaccaggccaggcaccgtggctcaggccgggcacagtggctcacacctataatcccagcacttagggaggccaaggcgggaagatcacctgaagtcaggagttcaagaccagcctggctaacaaggtgaaactctgtctctactaaaaatacaaaaattagccgggcgtggtggctggcgcttgtaatcccagctacttgggaggctgagacaggagaatcacttgaacctgggaagcagaggttgtggtgagctgagatcgcaccattgcactccagcctgggcaacaaagagcgaaactccgtctcaaaaaaataaaaaataaaccctagaattatagtatgttagaattggaagggaagaattgtctaaggttattctagctaataagcaacagacttggaaaggaaaaggtcctgacaaagctaagcctcccgttcaggtttcctgactcgtgaattcagtgctgctgccactacacgatgcatgctctttgtatcaagggtgagacagcattacacatacatagaaaattatctatttaaactctatttgaacttttgatgagtttgtctccccctcccccactccttttcagaataacttgacgtttacaggtaccatcagtggtgatgtctgtgtgtggaaagatcacatattgtgtagaatcgtggcgagagctcacaacgggcctgtgtttgccatgtacaccaccctgcgagatggacttatcgtgactgggggaaaggaaaggccgtgagtcctctttcttttcacagaatatttatgcatttgtgacctacctgaggtttgcagttaattattctagttgtttctaggctacacagagtgtcctctccgaccttcctcctcatatgcttctcctttattaccttttatgtgccttctatttgattctcatttctggtcttaattcacttccaatttttttcatgttggggtgatactttttctgaggtgtggataggtagttgtcctacaagttgagttacttttcttaatgtctgtatgcctgtgtatgatttgctgagtaggaggcccatgggggaatctggagccagggttgtattttgactgcctgctctctttttgttcagaatggattctaaggagtagaatgcacattgttgctttagaaaaggatgagggaactagagagaactgccttgtttccttttgcttgaggcaaatttaaactgttttatacaagacctcaaaatttgagaagaggtctcttctgagtgattttcaaatctcccaacagtaaccagatacttatgatttgatttgtcaccaacatagtcatatgcatgttgaaacatgacatgtaggccaggcacagtggctcacacctgtaatcttatcactttgggaggctgaggcaggtggatcgcttgagcccaggagttcaagaccagcctgg

SEQ ID NO: 77242 - DNA, 1042 bp, Homo sapiens
atggttgaaaatttcttttgagatctattcaggtggtttcctatctactgcctttgtctatttgtgtctgcttttcacttctctttcagataacatcagtactgaatgtatacttggtgtttaatatttattgtttaatatttgtatagttctccatataattgtataaagattaaaagtatacataaaacatgcatttgttttgaattgtttaaagttgagattgcctgatttgcttgtctaaatgctgtttttccaaaagtgcaatttggaatatggcctgaagaagtgttctatatattttccttttctttcctccccacccccaaaactccttttcctttcttaaatttagccttagttttgagctgttctttgttaagtacagtttttgtttggtacacatttgtccatgtttcacagatgaatatgcataagctttagaaacagaaatatttataacaggtagattacaactttttgatactatctttatttagctacagctccttctattcacatctgggatgcaatgaacaagcagactttatctatcctaagatgctaccattcaaagggagtatgttcagtcagcttcagtgctactggcaaactattgctgtctgtgggactagacccagaacatactattaccatttggagatggcaggaaggtaggattcttttgtgtgtttgatttttaaaaaaacaagaatacaaaggtagtaggaattctgtatttaatatttgtcttaaagttggtggttgaaacaatcattcagtggaggcctatgcaatatactgtacacagtggtactgtaggtatatttcactttaaaagcccagtggaactgtaacctcacaaaacagataaattaatgaaaccattattagcattataaatgattcactgctattttcttccagcaagaaactatgtatttattattaatgatttgattggttttggagattcttatgaaaattatgtatatttctaatgataatggcagatcagcaggataatattacctaccacact

SEQ ID NO: 77243 - DNA, 1481 bp, Homo sapiens
tggagacagctagcatattctccctgagtcttatctagttcttatcttttatttgtttctttgtttgtgacagagtctcgttctgttgcccaggctgtagtgcagtggcacaatctcggctcactgcagcccccacctcccgggttcacgccattctcctgtctcagcctcctgagtagctgggactacaggtgcacgccaccatgcctggctaatttttgtatttttagtagagacggggtttcaccatgttggccaggatggtcttgatctcttgaccttgttatctgcccgccttggcttcccaaagtgctgggattacaggcatgagccaccgtgcccagccttttgcttctcttttaaaaggtctcctttggcaccctccaactacattccatggaacaaggtgtacatgagagcaaggggattgctttccatgggggagcctacttctccactggaccatgttttgggtatatgaaatcccagaattctctaccagatggtcctgaacctactaatggccctgcatgagccttttctctgcgtctgtcctcccagtgacagactgtacaaccaatgtgtatactcttgaggggtggccaagctgttctttgtgtaggggtggatggagttctaatgcagtagctaggataaccacatgtcttaagaaatttgagctgccatgacagataccacagagtttgtagcttaaacaacagaaatgttatttttcacagctctggaggttggaagtccaaaatcagggtgccagcatggtcaagttgtggtgagggccttctctgtatttgcagatggctgtcttctcattatatcctcacatggtgaaaaaagattatctttctcctgtctcttataagaacactaatctcattgtgagggctccatcctcataaccttcacacctcctaataccatcacactggtgattagggtttcagtatatgaattttgggggaagacagacatccagttcatagcaccacacatgagcttccatggttctttgtggtgtgggatggaagagaatgagacaggttgtctcatgctgcccaaactctaaggagttctaaattggtatctgccttccagatcattataggagtgtactcatcaaggtaagaggctagaatatattttatttgataagttttatcttgatggatagctttaaaatatttaggccgatgacattcaagctttcatttgtacttctgtcccagaccctgttaatattcagagacaaacctagtctctccagaccaaacactcccagtctttcacccaggcttcaggtggcaaagttccaagccctctcaccatttggttgttaatagagcatattcataactaaaaatgatatttcctatgtggtctgctcagcagagttaagtactttattctgtttttcctcatgttccaggtcaaggcactatggtcctatgttatcaatatgtttt

SEQ ID NO: 77244 - DNA, 1052 bp, Homo sapiens
gccttaatttcattgtttacccaaaagtcattcaggagcaagttatttaatttttacgtaattgtgtggttttgggagctcttcttggtattgatttctattttgcactgtgggtagagagtatggcagagatgatttcaattttcttgaatttattgagacttgctttatggctgaacatgtggtcaatcttagagtatgtttcatgtgcagatgagaagaatgtatattctatggttgatgggcagagtgttctttctgttatgtccaattggtcaagtattgaattcaagtccagaatttctttgttagttttctaccttgatgatctaacactatcagtgggttgttgaagtgccccacttgtttgatttttgttttgctttttggggggcctagtagtattcatggtttctctatcctctggatccaacctactgctctgaactcattttccacctcttcattttacttccacaagtctatcttttttcccttctgcatggactactgtcatagccttacaaggtctcttcactgttactactaccagatgaatcacattatacttatttgatcaaaaaacttcaattcctgctgggcacggtggctcatgcccgtaatcccagcattttgggaggctaagatgggcggatcacttgaggccaggagtttgagaccagcctggccaacacagcaaaaccccgtatctactaaaaatacaaaaaatatatagctgggcatgatggcacacacctgtaatcccagctacttgggaggctgaggcatgagaattgcttgaaccagggaagtggaggttgcaatgagccaggattacaccattgcactccaccctgggcaacagagtgagactgtctcaaaaaaacaaaaacagattgcagttcttcctccactgacataagaacaaatataaaatgtgactcaatatggcccaaattattaaatggaaaattactactggtttctgtgtgactctggcaaatccttttctttgagaaaccaaaacagaaggatcgtgggctgacactcaa

SEQ ID NO: 77245 - DNA, 1063 bp, Homo sapiens
tttgtcattagttttcatgaaaatcagtgtatttgagtactgttttttgtttgacttaattcttatgtaagtctgagttttggatggatattctctgtttctcttaattttttaaattagtcttccttttacttttctgtgaataataccctaattgaactgtatctcagaggagtcctaaacctaagtatgtgtgaatgatcttttgcttatagaagcacagacaccttggcagtatctaaaatttagtggcttaaatttgtaaattaaagagtaagtacttataccaaataggaattttgaccctgtgcgatatattcactgtacagggttcatgaagcctgtttctccttctgtctctgcttccagccaaagtaaccttacgtaataattgaggaagaaggaaggctctttaggcatttcataatcccggtagcagtagcgaacaaccaaactctgctaaatcaaacgtaaacaaggcgtaaagctgtgcgatggtgattgctgtcgttccctccccaacctagtcctacaaagtcaatgaaatgtacattttcagttgcagaattatctgccagaactttagcatgaattgtcagagacagtatacttagtttttatccaccgatgatgaatgtactgtttgagttcttcgaagtatgtgacttggacataatttatcctgactcttgtatgtaggtcagatactttgattaacaatgaacataaaattttcttcttttggacacaaaaaatacagtccctctatgtccatgggggatagattccccctggggatgccaaaatccacaggtgctcaagtgccttatataaaatggcatagtaatttgcatataacctatgcacattctcctgcatactttaaaccatctgtagattacttatgatacctaatacagtgtaaatgctgtatacatatttgttatacaatattgtgttttaaatgttattttttattgtttttttccccaatattttctatctggaattggttgaattcttggatatgtaaggccaactgtacctcagtgtttacatgtga

SEQ ID NO: 77246 - DNA, 1102 bp, Homo sapiens
attcagttttatttttacttgtgggcatccaaaaaagtatatgaagaaggtttgaaaacattgtttatatattcttgaaaaggatgtttactttttatgacaccagtcatgcttatatattttacatgctgcctcatattgcgtatcaacatcccattcatttcttattggatgtttaagatatagcacatttacttttattgatgtttaacttgacaaccattttgaaaatgcaagtatattttatgcctttaattttatgagacttgttcataaatgttggagtcttttatatgggaaggttaatttgtattatttcctgatttaggtgttacaaattgaatattaacttaaaatttggaaagggattggtgcatgattgatttaaattcaatgttccggttattcagtatttgaataatggttgagataaaaataataaactaaattgcattttttaaaaaaattaaaggttctagagaagagcttctacatttaagtaattcaaaatgtgaactcaatatacctgttgggacacggcacattataaatagatcctgaacagagaagaggggctagatttgagatttgacagctactgtgtaggtaaagttgatacatttttagtaaatagtgagaataagggaagagaaagagttggaagcaataataatagttatttccttttatagtgtgttgtatggtttacagtgctttgtgactataaaatgtcttccttgagtaaccatctgatggcaatgccattaaccagtactagggacttcagcaagtagagaaggtgaagggcatggagaaacagataaatacaaatttgaactcggatgtgatttatgttgctaacagtgtggaacgttcatagaaatattacgaaaattcactttcaagaaggatgtattcaatacctgccatgtgaagatactctgttagatactttagaacagtaatccaggctttgttgttaatgtacctatcaagaaatatttgagtatgttaaattaacattttcacatttgtttataaacaatctactcttgtgctgttatttacattatgacacgtacaccaaagaaattaaaagtaa

SEQ ID NO: 77247 - DNA, 1044 bp, Homo sapiens
gccacaggcctggctaattgttgtgttttttatagagatggggtctcacagtgttgcccaggctggtctcaaactcccaggctcaagcaatcctcttgctttggcctctcaaagtgctaggattacaggtgtgagccactgtgcccagccttatgccttttctttattcttttttctttcttttttttcttttttttgagatggagtcgtgctctgtcgcccaggctgcagtgcagtggcgcatgcagtcttggctcactgcaacctccgtttcctgggttcaagcagttctcctgcctcagcctcctgagtagatgggattacaggtgcgtgccaccatgcctggctaatgttttttgtatttttagtagagacgggatttcaccatgttggccaggctggtctcgaactcctgacctcgtgatcctcctgccttgggctcccaaagtgctgggattataaactaaaaacaacaggcctttaatattatgcaatatagctgtctgcattaaacttgttaaaatattttattacaggaggtatttcactagtgttttcaattcaaatttatgttgtaatctttttccctctttatctgctgctgaaaagaggttccaggtaatcctctctttgctgtgtttacaaagcctaactttgtatttttgtcatcttccatatttagcattaatgggatactgttacttagtgttctttacctctcttcacagttttgcacatttttttcctttggaattggtatcactgaaatgaataacatcttaattattggacttactctgtataagtaactgctttactaaaacttatccattcaacttgtataattttataagttgtataattttattttcagcaatgatataccttatataaatgatatttataaaaattaaaatatgcttaaatgatctttataaaaattaaaatgtggttaattgttatataggattatatagataaaaattacctgtttattgtttgggttacatttaaagctgtcagacagtaacatagaataatatt

SEQ ID NO: 77248 - DNA, 1052 bp, Homo sapiens
aaatgcttctgatgacaataaccattctatttggttgatactttcgtggatgtttttcctaagtgataattttacctttttcttttttaataaatgtttttgtttttatttttttgttttgttttgttcttttgagacagagtcttgctgtgtcgcccaggctggagtgcagtggcacgattttggctcactacaacctccaactcctgggttcaaatgattctcctgcctcagcctcctgagtaactgggattacaggcaggcaccaccacgcccagttattttttgttatttttagtagagacggggtttcaccatgttggctaggctggtctcgaactcctgacctcaagtgattcacccacctcagcctcccgaagtgctgggattacaggcatgagccaccttgcccagccaataaatgtttttataacaaatattatgtatttaaagtagttaatttttgtcaaatttccagtatttgtgaataaaaatatttaaatcaatgtttaaaccaatgtgacataagttagacatttttgtatttccttaaaattctgttgacatgttgcctttcttctgtttgctaaaatgctgtattctattcatcatcaatttttatatgttttcctacttttttcccccttgctccttttgaaggcagggagtagtaaggtaagtgttttataaaagaaaatattttattcaaaaatttaccctttattttattctttatggtattttaaggtattttttccctataaaacatttaactacatttgtcaacaaagcattataaaatgaagtaggacaaattctataaaagagttgcatttttagatagcatatatggttgttattataagggtcttcattatgataaattgttttacatatgactgtacaaactactacaatgcaaatgaatagttttggttttctttaagtttcagaggctcgtaaaaacaaacctaaccacacatatatttaagtgaaagactattcaattttaaacctgttaacatgatttaatgcatgtttaatccattcat

SEQ ID NO: 77249 - DNA, 1538 bp, Homo sapiens
aacacagcctccataatttgaccacacagaggtaacacctcttctaatatttggggtatatcctaagatgtatgtagctaatatttttttaagaaaagtatggtcatattgaacttattttttaacctgctattattacttagtaatactttgaaaacatcattacatataattaaatattcttctacatcgttttttctggttgtatattacttcataatttgcttataacaacttaatttatttcatattgttgaacatctttgtatccaatttataagatcataattgatctcagttattgcttaaagaattactcgtatatttttattgtaggctatgacagtgatgttacaagggagaatgaaatcagttacaccatcagagccttatcaacaaatattcgcccaatgttaggaatcaagcctcatttacaacaaaaagaaccctcaattgatgaaaggtaataatttagtttagtattagatgaagaaaaagatattgtcattaaaaatggaatttattatttaagtggcttttttacacaaactaagtaacagtgatattcttgctatagacaattcacagcacctcttagaaagtatgtctgtctttaaataccttttggtatcagcctgggtgatgtagtgagaccttgtctctatggaaatataaaaataatccaggtttagtggtgtgtgtttgtagccccagctacttcaaaggctgaggcaggagcattgcttgagcccaggaagttgagattgcagtgagttatgattggtgccactgcactcctacctgagtgtcagaatgaggccctgtctcaaaaaaaaatacccacaaaaacaaaaccctattgatggtaacactatgtgttaacactattggtttagggatttatacatgtttataaggttgatatgattcatcttatttgctaacttttataaatgtgtgtgatgaggttggaggagataataaaaattgaatccaataccgagtactttttaagaagtatgtgagcagtattgtgattcaattttgaaaaggcctgcctatccatgtgcctttctttaagcatagtcagtcctcatttcaaaaattttctaaaaaggcaggttgtctttaatgggaattattggtcttagtctagaatcagcaaataaaaaagtaaggacatatgcaaggccattttatgaggagagatcacttttttttaattatactttaagttctgggatacatgtgcagaacgtgcaggtttgttacataggtatacatgtgccatggtggtttgctgcatccatcagcccatcatctacattaggtatttcttctaatgctatccctcccctagctccccactccctgacaggccccagtgtgtgatattcccctccctgtgtccatatgttctcattgttcaactcccacttatgagtgagaacatgtggtgtttggttttctgttcctgtgttagtttgctgagaatgatggtttccagcttcatccatgtccctgcaaaggacatgaac

SEQ ID NO: 77250 - DNA, 1481 bp, Homo sapiens
agggagttttgttaaatacaaagtatcaaaactacatcatacatagcttttgacatttgcttcccactgaactaatttgttacactaaaaaattattttgttaagtataatatacttgaaaaatgttatcatttgttatttaacacatctgttttattataatttatgaaacagctaagatttctccataaagaaaaggaaaattaactctagttgcagagtgtaaaaaagtatttccaaagatagaaaatgtcaagcaaatatgtttctattataggttctgggaaatatcttgctgtagcatcccatgacagctttatagatatatacaatgtaatgagtagtaaacgagtaggaatatgcaaaggagctaccagttacataacccatattgattgggatattagaggtaagactttaaataacttaatacttgataaaagtttcatttgatttagtatagctatattagagaaacggaaaagtgattcaacagatgagttaaaaagaattgggaaaaacaaccattattctcaaaattattttttactattttacatctgaagatgaatactatagagttgagacttttctttttcctttttcttttctttttttttttttttgagacaggtctcactctgtcacccaggctggaatgctgtggtacaatcacagttcactacaaccttaacctcctgggcttaagtcatcctcccaactcagcctcctgagtgctgggactacaggcatgcaccaccatgcctggctaatttttaaatgttttgtacagacaggttctcactatattgcccaggctggtcccgaactcctggactcaagcagtcctcccaccttggcatcccaaagtgctgtgattataggcatgagccactgcacccaacctacacttttcaatacttcacctaatatcgttcaaataatagtacagtaagtgattagttgtttaatttgtaaagtgatttaaatattgtgcaaaaaaattgttgtgaagatgtcttgatctttgtcatataaatttgacataaatagaatatagaaatgttggccaggtatggtggctcatgcctgtaatctcagtactttgggaggccaaggctggaggactgcttgagcccaggagtttgagaccagcctgggcaacacagtgagaccccattcctaaaaaaaaaaaatgaaatacatttttaaaaagaaatgttaatgaagattttaaagtcatttttctcattgtttgatatgaaatatatcttcaaaaagagtcataatcatataacataaagaacttaatgagtatgtttgtattttagcagaatgcatggcatatgactgagtttaatatgtttgataaatgttaagtattttaaatcctctctttttaaggatgttattgtttcatgtattcaactatattgtattcaactatataaattgagcatcataaagtttttctaaatata

SEQ ID NO: 77251 - DNA, 1614 bp, Homo sapiens
agaaaagtcaaatagttaatatacacaaataaagatatacatataacaaacattatatgcagctcctgaaaaggattcatatattaaattgtctccttcatgtcttcacttgaacttctcataggcatctttaacttaatttgtacagaactaagcactggtggttcctcctctagtttatcccatctcagtaaatggcatcaccactcaagcaaaaccatgcccttgacgcctttcaccccacatccagttggtcaaagttctgccagctctatctttgaaatatatccaaatccttcctcttatcacctccactgctgccacccagctccaggtcatcatcatctcttgactctcaaatctgagaaatcacatcttagatttcttcatttccaatgtatgcttgataattaaatgactacttgttctcaacttatgctataacttttcattctgtatataccctgtcctttcctcatcagatttcatacaagataccaaaatccttagggcttttgaatatgtttgctgcaacccttgctgttagggtaagcccttttttgtgtttatcaatgcagcactaacccttatttttacgaatgttaacatcattaatgacattaatgaacgatattaatttatcattaataataaaaatatcatttcatatatggttctgaaacgtatatatacagatgtatcttcctacctttaataatggcctattagatttttaaaaatattttagtttcataggccaggtgctgtggctcatgcctgtaatcccagcactttgagagtctgaggcaggtggttcacctgaggtcaggagttcaggaccagcctgaccaacatggtgaaaccccatctctactaaaaatacaaaagtagccaggcctggtggcacatgcctgtaatcccagctacttgggagcctgaggcaggagaatcacttgaacccaggaggcggaggttgcagtgagctgagatcatgccattgcactccaccctgggcaacaagagagaaattccatctcaaaaaaaattacttttataaagatgacttatttcttaaatttctgtttttttggaaagaagctacaaaggtaaaacctactctgcaaaacttccacatatatcattggctttttatgttaattaaaatctctcattctttttcatcaacttaatttcttttaaggtaaatatccatacttgcttttgttgtattcagaagtgagtttcattcctgcttagaattccataccattgacttctatagaaaacttaatctgtatctcgactcctttttaatattgatttgaagccataataaagaggcaacctttttagcaaatattttttttttttttgaggcaaggtctcactctgtaacccaggctggagtgcagtggtgcaatcatagctcactgcaccctcaacctcctgggctcaaacagtcctcccgcctcagcttcctaagtaaatgggactacaggtgtgtgccaccatgcctgtctatttatttacttacttacctgtcttcccttccctcttctctcttccccctcgccccttctcctttgccccttgccccttcccctactctgccta

SEQ ID NO: 77252 - DNA, 1040 bp, Homo sapiens
gccatatcattaggacatggtcatattttagttggcacaaagaatggtgaaatactagaagtggataaaagtggcccaataacacttctggttcaggtaattttaaatgctaatttgtttttttttctttacatacaattgattatttcaatatataagagccaaaagttgacagtgatgaaaaataatgttaaattagggaaatatttgttaatgtatacagaaaaaaaatttaatgtatacagaaaaaaattttaacgtatacagaaaaaattaatgtatacagaaaaaatttgtttttttctgttaatgtatacagaaaaaattttaatttggttataatgaaatgattgggtgtcagtaaatatacatattcttctatggaataattgccaatattttgagtaatttcttatcagaaaataaaggacccatgaaaagaaaaaccagctgtaattaatttaacccagtctgtttttaattttatttatataaggtatatttgttgagcctaaggcaattatttttctctgaaactcttcattaggccattcttaagtttctaagaaaaaataaaaatgtatgctaaaatttcattactgaaaattaaatatcagtgaaaagatgtaaataataaaacaggccgggcgcggtggctcacgcctgtaatcccagcactttgggaggccgaggcgggcggatcacgaggtcaggagatcgagaccatcccggctaaaacggtgaaaccccgtctctactaagaatacaaaaaattagccgggcgtagtggcgggcgcctgtagtcccagctacttgggaggctgaggcaggagaatggcgtgaacccgggaggcggagcttgcagtgagccgagtttttaacttccattatttttgatgctgttataaatacaactgttttcttaattttgattgcatattgttcatttctagtgtatcaaaatgcagtagattttgtacattaaccctataacctgtaaacttgccgtcctcatttattagttctgatagttttataat

SEQ ID NO: 77253 - DNA, 1153 bp, Homo sapiens
aacatgaaaaatgagattgcttaaaaattcacaaatatttatatgtaaaggaatgcatgagaataatcagtatcacattcacaatactaaagcgtgaagaagggagatgaggttggcatgacatttcagttactttgggatctttttgtaggtcagcggatatataggcattcattgtattggggtttttaaatgcctttttgtattcttaaatatgtcataataaaaactttaaaaaacatcatcaaaagtgctaagggctgattaaaacagacttagtccaggtctttgtttatctaaaaagttatggtctaaatgcagttatgcaaggtgttacccacatcactgattgagacacctgtagttttcaattctccttactgttgcatgccttactattcaaacaacaacaacaacagtagaaaagaaactttgcttctttataattgagtacattttgaaagtggtactttcataatattttttgtgaactagggggaggattgattggaagaaaaggctacataggcacactggggaaaaatgacacaatgatgtgtgcagtgtatggatggactgaagagatggctttttctggaacatccacaggagatgtgtgtatctggagagacatctttcttgtaaaaacagtgaaagcgcatgatgggccagtgttcagtatgcatgcattggaaaaagtaagtaacctaaagagattttaaattaaacaaaatttgtcctggagtgtagagcattttaagaagtaaaggaacactgcctttctacttgcctggactatccagcagtagtctgtgggctagggtcatcttgacctttctttgtttctcttttcaaactcccgaacacagaatgaaataggtctgcagtgttttgttttgagatagtgtctcactctgtcacccaagctggagcgcagtggtgtggtcatagctcactgcagcctccagctcctgggctcaagaaatcctcctgcctcagcctcttgagtagctgtgactacaggcaagtgccacccacacccatctaatttttaaaaatttttttggtagagattatgttgcccagggtagtctccaactcctgggcttaagctattctcccacctcagccgtcaaagtattgtgttacaggc

SEQ ID NO: 77254 - DNA, 2106 bp, Homo sapiens
aaagtagtcatattagtggcagcatgttgttgtaacttacgtgtttttcatttgattaacttttcataattactcaaagttcttatattacagtaaatttcttatgatgaatttaattaaatattttcttcatccctttgttagttttccctttccttctattttttaaatctcttttttccatttttcttatctccctcctcccatcccaacctgatggatagataagggaaaaggagatcaggtgcgatgagagcagatacatttagaggatttgagaaacttttattctccctcccttataaattctggttctttttataggtgtatgcatgcctaacatttaacattattttatcaaattttaaatataggatgtgggtttagaatatatactgaatgttttctctcttctgaatgttaatagtcagtttatctctctcattaattttccacagcggatgggaaacgtttggcatcagttggcatagatgatagccatactgttgtgctctgggactggaagaaaggagagaaactttcaatagcaaggtaggaaaaaaacttgatatcacatttgcaaaatactagaattactttggacttaaaaaaatttttaattaaaagaattttgaaatcaagcaaatatgtaactttttattgcttccatgtttattaccattgaataaataatataatcatagtaaatgatttcagaatttctttgtagatttatcccttgtgaacccacttttaaatataactataatatggcattggatataactatctaaaatctccacgtacagttagaatgtgttctactgtatgataggctattatatagctgttggagaccatgttcaaatgcttatattatatattaaagtgaaaaaagatatatatgcatatatgtcacaaagaagttataggtttttattttcttatatttttcttcattttctaagttttctacagtgagcatgtattttttatagtaatattaacaatgctttaaaggaggaactagtcaacagtgtcagagattttaacctgctatttattaaagcgatgttaaagcactttaaatatatagataaatgctttttatggagcatatagataatgctcaaattaacaatagtttaagaggaattttgtagttggaaaggctatcttaagctataacaaagtattgttttaaaattgactttaacccattcatgccacaaatagcattccctatggcacagtactatagtaggtattatagatgctgtccaaaaggagttcagttttgaccatttctgtctcttgagattctcttgagcagagttaccatattaaaatgatgacaaaagaacaaatacacagcccaaacctgagagataagtgggagtaaaatattcgtaaatagagtaatcaagatagggtatggattaggcaagagattaatacaggaatgatgaatcttcagagctaaaacatttcgatgtttatttcagaggaagtaaagataagatttttgttgtaaagatgaacccctatgtgcctgataaactaattacagctggaattaaacacatgaaattttggcgtaaagcaggtaagaaagtgcttcttttttactccatagaattttaagaaattattgcttttgaaagtaatttagctaagtgcagtgtgtaccctagactgcatcctggaatagagcaggaacactaggagaaaaactgatgaaatctgaatgaagtcttgagttcatttaataataatgtatcaaatatgttggtttcttagtttcaacaaatggtctatggtaatataagatgtcaacattggctgggcacagtgactcatgcctataatcccagcactttgggaggccaaggtgggaggatcacttgagcctaggtgttcaagagcagcctgggcagcatagtgagaccctgtctctacaaaaaaaaaaaaaaaattagctgggcatggtggtgtgtacctgtggtcccagcttcttgggacgataaggtggaaggatcacttgagcccaggaggttaaggctgcagtgagctgtgatctcccactgcactgcagcctgggcaaca

SEQ ID NO: 77255 - DNA, 1123 bp, Homo sapiens
gctatttcacatcttttacttagttccttcgtcttggaaaactcttcccctccacttctattcaaccttccaactttatctaatttctgctccttttaagacttaggctaagcctatctgagaactctcccaacctctcccttctccccttcatccctgagtgagatgccctaagtgtactttaatagtactcaatattatactaaatactgtctatacctcatggaatgtgatattgaaatccaagcctttccacttattcgctactggcaaattacctaacctctctttaccttcgtttcttcatcctttaaaataaggatgttatctgttcccatctcgtagagttgttgtgattggtacatgagtcaatgttcgtaaggtgcttagaacagtttctggcacataaattacttctcagtgagtgttagtcatcatcataatttccaggtgagatgtccagtagacaattgaaaatgtaagtcttggattcagaggaaaagtaactgctcgagagaaggacttgggaggtatttattgatttaaccactgaaactatagaagtgagatacctcagggcaaaaatgaagaatgagaagactggagaattaaagaccaccttgggagaggtttgtatttaagtaacaggtgaggaaattgagaaggaaactcagtagtaggagtcaaggaagctgggcgccgtggctcatgcctgtaatcctagcactttcgaaaactgaggcggcagatcacttgagcccaggagttcaagaccagcctggacacgtagtgaaaccccatctttacaaaaaatacaaaaattagccgggcatggtggtgcatgcctgtagtcccagctacttgggaagttgagacaaggaggatcacttgagcctgggaggcggaggtcgcagtgagccaacatcatgccatttcacttcagcagggcaacaggagtgaaaccttgtctcaaaaaaaaaaaaaaaaaaggaaactggagaaccagaagagagtagtacagtaaaatcatcaaaagcatcaaattctgtagaagtttttatataaaaagaaaacttaaaagttactggtactactgtgtacccacaaaaaatgttaaaaattt

SEQ ID NO: 77256 - DNA, 1926 bp, Homo sapiens
ctagtggtgacttacaacattatgtggcacataataagcactatgtaagtgtttattaaataaaaaataaatttgtcttatgaaagtttcatatgtatggaaatgggcctctttaaacaattaagtaaaatgtaagagataatcatctcccctcaatatgtctaatttggaatgatattgtgacttcttcttgcatgagcatttttgcctaaatattttaatttcaccaaaatacgggttctggattctcttagaacatctggcaatacgggtctcacatttcagcttggcagaaacagattttccaatctgactcttttctaccattcacccagcattcgttttcttacctgactgataatacttatcaagaatttgaaaaaggatttaattagtacaagtattttttctctagtgttaaaatggcagtagtttctatgcagttgtattttatgaattgggtttctttgaagtgcaaaccaaggttgctataaatagacttatattgaccattttaagatttgactactttgtcttggatgaggataatattttaaaattgtagtttaaacttatttttggaatatacgttgtattctcatggtccaacaatgtgtataaaagggtacagtttgaaaatctttctcccacctctgccctcccagccatcatttcccctctctgcagatagttactgttacttagtttcagaaatacttatacaacaaatacaaatatacttttctataccttttacttataaaaagcaattgtttttgttttatagtatacaattttaatattatacttatgtaaatggtagtatactatacatactattttctaccttgtttttttcactcagtattatagcttagatttagctatttgcagtccgagcagttcataaaagtttattggatctgagatggtggtatttttttaattgttcaggctgggcatggtggcttacacctgtaatcccagcactttgggaggccaaggtgggtagagctccggagtttgagaccagcctgggcaacatggcaaaaccccatctctatgaaaaatacaaaaattagccaggcatggtggcgcacagcagtagtcccagctacttggagggctgaggtgggaggatcgtttgagcctaggtggtcaaaattgcagggaactgcagtcacaccactgcacttcagcctgagtgacagagcgagaccccatctcttgaaaaaaaattgtttagtatcctgtaaaactggaaattgaatgattcacccaaagggtacctacttctcccctgtatattctgtattgatcagataaaaggccaaaattaattatatatgatttgttttctatattagttacagaggttatgactgtcgaagtaatctgttttatactcaaattggtgaaattgtgtaccatgtggcagcagtgggtgtcatttataatcgacagcaaaacacacagcgtttttatctgggtcatgatgatgatattctctgcctaactattcatcctttgaaagactacgtggcaacaggccaggtaggtttgaaagactgacaataagccagataagctacacctttgtttgagtttaaataaattaatcacatatctcttttatgttctaggatatgaagagtaaagaattctttagaatgagttttattttcagattataaataaaatttaccccaaacttttttcctacagttttagagtttttattattttaattcatattattttaatttaaatttggaactcatagctctggcttgttttatttctgtcatgatattaattttttaaattagtaaaattagagaaaacataaagactagaaatctggtgtctttaggttgagttacctaaaacaaatgtaaattatttaacaaatgtcctgtgacaaac

SEQ ID NO: 77257 - DNA, 1861 bp, Homo sapiens
tcctgaaagaaaactgaaagatgctgttcacatagcaccccaaggtgagtagtatgcattagctaaacagtttccctgtcaaataattcttcagtaacccccaaataacaattttatattaaagtataatctggcctcataagttaacagtgtagtttgttattagtagaaatttcaagttaaaatattagttctatatgtttaaagttagatgtcacagagtgtgaaatacaaagtaattttgattgcgttttaatctatcaaataatgagtgaagaaacagttatattaatagcaaaacaaacatttaatatatcctctgagagatgggtatctagattttgtaaatgcttttattgacaaaaattatctaatgtcaattcatctgttgcatatagtatttttagctatttttcatgttaattataggttatattcacttatatttgcacagacatttaaatttgatgtagcggtcattggggagccagtgaagggatttaaaggagctattgagtttgcagtgagtggagaggaagataatctgtagtacagtttactgacatctgtgtcacttgaataggtaatttcatttgattgttttatggcttgtctccatgtcaactgacatagctcttaatcattaatttttcagtgctgttttgaaaatgaatcttctttaaacaagtaacatttcatttttaaaaattacagaaagtctggctgactctcatagtgatgaatcagattcagatctgtctgatgttccagaactggattctgaaattgaacaagagacacagctcacctaccgtcgacaggtaattttccatatcacatggtttttctctaaaaagtctaatttcttctttatcttgctccccgttagtcatctgttgttatcttttgtggctttaatttctcaagcaatgtatgactatattagttttcccactgtcagtgttagagtacacttgtgtaaaattttttttatattaaatgcttggtatattaagtatgcttgccttctatttgcctataggattttgtcatagtatactcacatttattcctttaacaatattcttttatgaagtataaaaatttcctggaacactatgtatctatttgtcagtgtgatatgtagaaaatgtgaatttgtttgttctttccgagggagtaaatttcatgaattaacttttcatttaagactactattaaagctgttgttttcagacaatgtctgaaagttatattgggagtatacgaacacctttattagtatatattctaagaatatttctacttgtatacatttttaaaggtttacaaagaagatctacctcagcttaaagaacagtgcaaagagaaacaaaaaagtgctacttctaaaagaagagagcgggctccaggaaatagtattcgattacactttgttcacgggtataaaacaactatctttcatttatttgtttgaattttggttcacacttactagcttaacatctctaatgatagaactgactgtatcccctgaaatgacatatccgaaaggatacaacattgcccatggggaaaacacatcacctgaatctaatcatgaggagacattagacaaaaccaaattgaaagatattttttaaaatatctggatttttaagatgattataaaggacattgttgggacaactgggcatatttgacttagagtaatacattacattgtgtgtaatatattaatgatatgtgtgctttgtgactttaaacaagtcacttaacctctctgtgtctctttttttctgtctgtaaaatggagataatagtactgtgttagtccatttcacattgctataaaggaata

SEQ ID NO: 77258 - DNA, 1016 bp, Homo sapiens
cttttaccataaaaatctattactttatttcctttattctttattaactccagaaatttagtatggatctctgaagtacttaaagtaatttagaaactgaaattcagcattttcctgtacatctggcatatattgtttccatgtatttctgttcagcaacgtattgttgctgaattaatactacttgtgttatttatgtttactttatagtttataaacacttgatacagcttcacggtcattttagacatgtttgaaacggcattaattctgttgtgacttctgttcatgtagtctcatttttttctttttaacagagatatgacggaagttgtacatattaaagataggaaggaggcaattcatgagttaaaatattcaccagatggaacttaccttgctgttggatgcaatgacagctcggttgatatttatggagttgctcagcgttataaaaaagttggcgagtgtttgggatcccttagtttcatcactcatctggactggtcttcagacagtagatatttgcagacaaatgatggaaatgggaaaagacttttttatagaatgccaggtaacaatttctagcaaattatagatttgtagtacctatacaatattttagagttttactggaagcagagtgtaagttacatttgatcataggaaatcaaagaagatctgagctaatatttcaggcattgtagacttttctacaatataatacaatatattattgtattctacaataattctacaatataatacaataaggctgccttatattgaaatccttttgggttttttctcaactctattgaggtataattgacattaaaaattgtatatattgaaaatttacaatgtaatgttttgatagatacattgtgaaaccatttccacaatcaagctaaatgatgtatctgccacttcacagttaccatttttgtgtgtgtgtggtgagaacatttaagttccactctcttagcaaatttcaggtatatcatacagtaaca

SEQ ID NO: 77259 - DNA, 2299 bp, Homo sapiens
ataattaaataccaccttggttatatatagtcatgccttgatattttgggggggattggctccagaaccacagataccaaaatctacacatactcaagtcttgccctgggaaacctgcatatgtaaagccctccctatctatgggttttgcatcccacaaagattgtattttgatctgggtttcattgctaatgtggaactgtggatacacagctgactgtatttattgaaaaaatccatataagtgagccagtgaagttcaaatccacaaggggcaactgtattaagttcttatggacttacttctagattttcttttgtgttttctgatgtatttgtttattcttatatcctaccaaaatattgttaaattggtttaaaagggtttctaccttcatatagtagatgttcttaaaaaatatttgtcgttaaattattttatttcctcttctaggcaggaatttttagcatgaatgcttgtgaagaaggctttgctactggtggcagagatggttgtattcgtctttgggatttaacttttaaaccaattactgtgattgatctcagggaaacagaccagggatacaaaggtaataacaaaacaaatgtcttattactaggcaaactctaaacttcccaaagattatctctttctttcagtgagtataaatgtaagttttgtaaatataaataagacttatatttgcctcttcaccctgtatgcatttgattaaaattcttctattaaggagaaattttgcctgtaaagagtttaggttcattgttaggagaaagattctttcataagtctaatatctattataatgggacctatagagagatgtgagaggtactcacttaggtatctttggattttgaaagtattttactattagaatgctaaatataactatttaacaaactattctaaataaacagttgggggtaaatattgagggttgggaaacttttgttcaggataatttaaatgtggataggtgtatttttccttcacccaaatttgtcagcaattgggggattttttttttttctcttggggattaaaaaaaattgatgtaataaaacaggaccttttactataaaagctacccacaggtttgtgtttaaaccatattccagtcacctacaagttgtgtgaccttgggctggtaatttaccctcactgtaaataaggagaataagaataaatatattatttaggatataggatcctatatatgaattgatatttctcaaatgtttataaggatagcacataataagcatgtaaatgttaattggtattttattttcattagttttgctaaacattattgtgctttaaagcttacaaaataatttgagactttttcttatctgatcctcacaagaacattgtgaggtacacggtgtctttatattggccatgtaacacacatgagaaaactgaaaaacacggtagctttcctaagattacaaaagacattcaggagtaggcagaaaaagtaaaattctctctttttaatgatattataagtatattgaagaaatatagacaagtaaaaagattattaaaaggaaaagaatacaattctataaaggtaatttactaattgagtacttattgaacaatgcagactgaagtgttataagactggctgagcaagtagacatggctagagttgtctacaagggagaaggaagaagagtacatgtcttgaaggatgggtaggaactaggtacataaaaagacaaatatttcatgtagaaaacaacatggacaattgaagaaaatgtgagtatagatcaaggacttacatatttcttctgtctcacatctaagatataaaaggtacaaaattaacttcaatttaggaagattggaattattgacacaggatattttgggtgctaccttgccagctggagacctccatggcgggcgcaatgcccctgtcccgggctgcactgggctccaggctcgccaggaggtaccctgcccacttggcctggcaggctgcgcttggcttatactctggctggatcccacacttgctgcaggatccatgctcagcctgtggctgggccgggtgtgctgtgacctgcttctgccttgggcgttggcgtctggttgaagggaatgtggtggcacctaaaaaacttggggactctagcggccctgaagccccaaagggggtgttacagcatgttaatagctctttcagtcctgcccaataaatgggggcatgtggtgcccagcggctccctctcctgttgcttggtgagtaggaggggagtg

SEQ ID NO: 77260 - DNA, 2099 bp, Homo sapiens
tttatagttacttttaaatcattggaacaaattggaattaacttgctttacttccactgtctgatgtaacagttcctggtaacagttaattcctagtgaattaattaaggttctgtgttcacattctttatttcaatatgcctaactccatccacgttttctccagtgcatctttcactgctgctgcaattcttgatttgttattctggtattgatttgattgatggatagtagtaaatatttattttttgacaaatatttaataccaaaaaggctgtatgctgggctttaaggcacatgatataagcactgtgaaggtatttttgtcttgttcatctttgatggacagtgtgtttgatatggtacttgatatatattaagtgcttaataagtgattggcaaattaattatgaataaggagatcttactattttatattgtaagtaaagctaaaggctccattttcaggtttttataaaaagcttatctcaaactaaataaactatatttttataatgagttacatttctttccctttgctagaagaaatgaatagtaacatagttctctttgcaggcaatacatgtgaggaaattaattcccagagatgatctagaactgcactgtccaaccatacatagctatttaaacacaaattagttaaatgaaacttaaaattcatttcctcagtcacactagcagtacatttcatatgcttatgtatctagtagtggttactgtattggaaagcgtgtgtgtgtgtgtaatattttcatcatcactgaaatttctattggtcaatattgatttggattctagaacaatagttcttaacccttgctgagcatcaaaataatttgggtacctgggcttcatgcttcagagattctgtctcagttcatctcaattgggagtccaggcatcccattttatgatttcccaggtgattctaatgtgaagctaacattgggaatcactgatctagaagaaaataatggattcaaattaggacatgctgaaagaaagaaaacaagccacttatgtacacaaattatggagattttaagtttaaaaattacaaagtttaattaaagtactcattagatctttgaatagataatgatcataatttttagttctttgaggcttcaaattttaaaataagaatatatgataataaattattttaaatgttaattacttattacaaagttgaattttttctttgggcctaatttctttatgcagaactatttaatgtatgtatctctgccctgtcccatttttttggtttattttttagagatgggatcctaccatgtggcccatgctggagtgcagtagctattcacaggtgtgatttatagctcactgtagcctcaaactcctggcctcaaaccatcctcccacctcagcctcccaagttgctgagactacaggcgtttgccactgtgtccacttccccccaactcctttttctttaaatttctctccgtgaactataaaaatttacctaattccacctaatagaacaaaagccctggtaatgaagattcatggttaacttcttattttctcccaagaatgaacaaatcattccacatggacatctatcttatttttttaagctttacaagcaaagcaattgctcagctttgaaaatatcaaatattatagttacagtgagctgcagttaccgtgagctgtagcatactctttttttcctatccttaatgtttctatcagagagagtatgttagatttggtcctttttcttcttcttagtctatgatgacttaccttcattttcattgctaaccgattcccaactttttaacctaaaatttttttttttcttgagacggagtctcactctgcgcccaggctggagtgcagtggtacactcttggctcactgcaacctctgcctcttgatatcaagcgattcttgtgcctcagcctcccgagtaactgggattacaggcatgcgccaccatacctggctaatttttgtatttttagcagagatgggacttcgccatattggccaggctggtcttgaactcctgacctcaggtgatctgcctaccttgctctccc

SEQ ID NO: 77261 - DNA, 1057 bp, Homo sapiens
tgaaaaaaattactgtaaaatcagtgtttggattctttatgtaaacagttctgagtgatagaaagctataaaggtgtttcttatttctaggctgtgtaagtgtcacgttccattctgaatctcttttctgtagaaattatgcaagcacctcccttcgtgtcctaattctgttcaaccattcttgttatttatggaccaaatttttttaaaaattaaaaataaacagaggtgttaaattttactccagtagtgtttgaagttcatagaaatgaagaaatgctttttatttcttatcattttcaaatttactttatttctcataagattttgaagtgtgggatgttgattattatttattgaggaatattattttatgattaggagtttgggccatttggtcttttggacaggatttttaaatgattctggaaataagtattttaatcatgaatctgatttgtttacagatatttgatatttcttgggatttgtaccagccaaataaacttgtcagctgtggtgtaaaacatatcaaggtactagaagggtcttgttttataatagtcacgtttagttctctgctgctaagtatatattgcactgttaacaatttagcctactttcagaattttgatagtacttatttttaaaatggcaatgtttttattgttcttatgttcagtcaaacaaatatatatattatttgctttgaactattgtaaggaatataggtatgaataggaaattaataagccacattccataaagaaatctgtagtctagtgaggcaggatttactgtgtccatcctgtttcttcatgtttcacttacaaagtaaaatgttgagaataggaaagaaatgaagagtttttcatttacatagaatggtgtgggagaagcaacatgagtagacctggctttgccatttattagctgtttaacctgctatgagttatttaacctctttgagcttttattttcacattttaaaactgtgactgctgttaccatcctcaaagaattgatgattaaataaggcggcagtgtatattcaagt

SEQ ID NO: 77262 - DNA, 3588 bp, Homo sapiens
tttgccctttagcgatggcttcagcaatttgtttgccatgtgtcttgtgtgttttttctgtgtgaatgattatcctgcttgggatttgttgaacgtcttaaatttgtggatttatggtttcatcaatttaggaaactttttactattatttcttcagtttttttttttcttttcctctgtcttttctctccttctagagccatgattacctgtatgttagaccacttgatattttcctgcaggtcattgaagctctgtcaattctttttttctttttctttctgtactttattttggatgggttctattgctgtgtcttcaagtttatttatcttttcatcattgtctgagctgctgttaatcctttggagtaaattttcattttagataatgtaacagttttctgtgttgttcttttatatctttttttattcttggtatgtttgagataattcttgtcttgaaaatgttaattttaacagcaaatgtctcctaattttaattatctctgggtttcctgagtctgtttctattgagtgattttccccaggttattagtcacattttcctgtttcttcacatacctgtaattttattatatccttttaaagtatatggacactgttctggcaaatagtcaagttcctcatgaatcagtttcatctttgtgaaaagcttgctttcaaactttgatgaggcagcactagagtagcttttgctctagaattactggtataatttcactattaaggtatgacactctcctcctgacctcaggattcctaatgactgcccagcgagttcaaagaggtatcttcattctggttattgagaatttgagtgattctggaccctttgtgatctctgagaattttttgcttttagctctctagtaattgttctttttctagaatttcttctttgcatgacctcatagagttcatcctatgcatgcagagattaatattctcaaatcttactatagatagttttactggagctcttttcctgctctgcaaattctaggcatcttgtcctctctgaactccaggctctgtttgtccaaattagtaagtctaccaggctctatttggattccacctttctgtgccatggtctagaaattgcctcctagatggaagctcgggtgattacaggacttaatttatttgttttcccctctttcagggttcacagtgctttacttccagttgcaaatgtctgaaaacatttgtttcatgtattctgtacagtttctagctgtttatggcaggggtgggtcggggagggtaagttcagaccttgatactccttcatggctagaagtccatcttttgtgtttttaaacctctctcatactttcggtctcactgtccacttctgttttcaactttgtcttttcatctcctgctaatcttgtatttaactcttccattgaatttttaacttattttattttttgtttctggaagttccgtttgcttcttcaggtctccttggatactttttatagtctcgtattctttgctcatatacagatattttgaatccttaattttatttcgcacattaagcttatttctcacgttaagcttatgttatttaactaataatgccatatctgatgttttttgcaaggccgactttgctgtttgttgtgacttgcccattctcactcatggtttcttattttgttgtgtttgtgtgtgtgggtggggtggtttgtttattttttcagcttattattactattttttgagacagagtctctctctgtctcccaggctagagtgcagtggaacgacctcagctctctgcaacctctacctcctgggttcaagtgattcccctgcctcagcctcccgagtagatggaattacaggcgtgagtcaccacgcctggctaatttttgtaattttagtagagacggggtttcaacgtgttgcccaggctggtctcaatctcctggcctcaagcaatccacctgccttggccttccaaagtgctgggattacagtgtgagccaccgcacctgacccttttttttttgtttgtttgtttagcttattttgattgaattgctacctgtaggaattctttgagggatagatcaaagttgcggtacttcatttaggatttatatttgcttgggccacattgttgaagttgcttgaagacacagccaaccctgaagactactttgaattaaatttcctagttgaaggattcatgtttaatgagaatttaggccagcaaccatgtgaaggatgcttgtggttacaaatgttcagggaggtgtttctccctcttcatgagttgcctccgcttctttaggaaggggttatttgttgtttccgagaggtttactgctttaatcagaggcggtctgcaattcaaatccccaccttaggtaggccctagactttgtctcctatcttcctcagcccacagcacagaaatcaggggtacaagtattcacccgatgcctttagagtccagtaggtgtaggtgttttctcatcctccaggtttcccactggaaaatttcttaatttttcgacagctcatcagtccatttaaaaacatgattttacattttatctagtatttttagtttttggtaggaggtatatttaggatattttgtcaatcctactgttagaaatggaagtctctcttctgtttcataatgtgaagatctatacatatgtggaaacactaacaaggtgaaatacattcagcctttatgaggtctataaaatataggcatatatgttttatgtttataaaaacccatgagtataatttctttgctatttgtaattcagtttctctttgatttgtttgcctttttattccttcctggacttcttggacataaatcagcgcttggtttcagttggacttgattcaaagaatgcagtttgtgtttgggactggaaaaggggaaaaatgttgtctatggctcctggtcatacagatagagtaagtattctcttttgagatttctaatgagtactggaagggaaagaccagaagagagttcaggagattttattcttctgtattttgttattgccagataggtcatatgtaattaaaattttacaattggtaaataattgtacagatgtaaaaagtcttaaagtgttagagtacatatgtattgtaggacttggaaacatgatttgatatgtatagcattggcataagactttttttcttttttttattatacttttaagttctggggtacatgtgcagaacgtgcaggtttgttacataggtatacacgtgccatggaggtttgctgcacccatcaacccatcatctacattaggtataagacttttaacctggtgtttgcttcagtaaaaacaatgtattttctttacattttttaaaacagttttattgaaatataattgatatacatagggatgcacatatttaaggtgtgaagtttgatgggtttgacatatgcagacacccattattcaaatctcaatttaaaaattgaatggtttgagcctagggtctgtttagtttggtttaccactaatttgttacatatgtattatggttaagg

SEQ ID NO: 77263 - DNA, 1044 bp, Homo sapiens
gtctagtttgttattgcctgtagttgcagaactagatgtattgaggctctatttggatacatggaattttaaagtttttggccaattgtgttttgctgtgtgtatttgatgagctataccagacagaggagacattagtagaaagaacagcagtgcccctctggctattcctcacttaatatacttgtcttgtgaaattttaacctctacacagtattctgatagcaagaggtagatacatttgttctagctagatttttgctgatgccctttggttcccaaatagtaaatactctcaggaggtacaaataatctcctcttgttctctgggctttctgctagcttgatttgatggagagtcataacaaactgtattctgtatctttttatataaattattcattctaccaattttggagtttaaatagtaaaactttcttttcagaaattgtaactgggtactagatggcatttctcatttggacagttagagggcgtaggttcttaaagctaattaaggttatggtaaactaatagtaataataataatatgatgcaaacatttatgtaacatcagtcatataccaggcactctaactcctttaagtagtacatatgtcaattttcacagtaacccctgtgaggtatttttatttgtccccatttaactatggttatagtaaactaatagcaataataataatgatatgaagcaaacattaaataacattaaccatatatcaggcactctaactcctttaaatagtgtatatgttgattctcatagtgacccctgtgaagtaattttatatccccatttaataggtgaagaaagtaaggtacagggaggctaaataattgtccaaagtcaccctgctagtaagagatgatgttcaaacctaggcaatctgctaccagaatctgtgctccaaaccaccatttgataagctgtctatagtaagtgaaatagtaaatattttaaactttgtgggccatttggtctttgctataactactcagctctgcattgcagtgcagtgtgaa

SEQ ID NO: 77264 - DNA, 1822 bp, Homo sapiens
gttttacatctaccaaatactataaaatctgtataagcaatttttaataatactacttatttatttccttattttacagccttgcattgcatcctgaacgagtgttggtagcaacaggacaagttgggaaagagccttatatttgtatttgggattcatacactgtgcagaccatatcagttttaaaggatgttcatacacatggtatagcttgcttggcgtttgacttagatggacaggtatgtgacagtttttcatttttttctaaattgtatgttaaggtatattatagaaaatgattataaatctataaatattaaattggacacttgatgaaaattatttgtccaaaggtggaggtgggtaggtggggtgggaggttgatatataacaatggggtttttatttcatcatgtcaagaactttctcaattgaattaattattaccttgaaagccaaagtgattttgattcagtggaatattacatggttattatacagatttttctatgtaactcttttccagatagggtattttgacaggacagatggatgatatcttaggaaaattaagtttctcagaaagctgtatatgttttattttaattttatttttttatttttagagacagggtcacgctctgctgcccaggctggagtgcagtgacatgatcataactcatactcttgggctcaagcaatgttcctgcctcaccttcctgaacaactaggactacaggcacataccatcatgcctggctaatttttttttttggtagagatgggatctcactgtggtgcccaggctggtctcaaacttctggccttaagctatcctccagtgttgttgacctcccaaagtgctggaattacaggcttgagccactgcacccagcctgtatttcaattttcagttaccttaaaggttgtctattaaaattatatttttattgaatataatggaacaattcctatgagttattttttatacaaaatcaaagttcacaacaaaggatataattatcattcaactgactaatcagtttctaaattatcatctacttctagtcaatgattttaaaaagttaaacaagccaagagctttttttgtggtgcttttatggaaattgttatacctaaaaatactttaaagttaccagtaaaaagttggatcttgcaggttgttcatttataatctttaaaagttttatgttataattagactttaaaatcattttaaattttagaacaattttagttatctgctttttaattcataaaattagttttatagacctcaattttacagaaacaaattacagtgtgttctatccccttgaacatgatagccagtagatgtttttatatattactctgaggaatagcttctttgagtagcataggttaatgtgattttctggtagtgagatgagagagttcccttgacccctttgcaggacttgtaacaagggtgtagctcgtttagttggctgcccagctcaaaccccttgtgggagtggggcatgcaggtgagaggttgcaggagagctggggtgagtgcctttgggtgctggcttgcctgtggcagcatctaaggttacccacaacctctggagccccagagggtgtgtgttacaaacaatattctttgacaccagcagcttaagtgttgaacaactcagtgaagagtcagtgtgacagcctttttgggttcctgcacccagtgcatcctggattgtccagcgtccaggaagaaccaggttacacgaacagattgaagggtggtgtatatggaggattttattgagcaatggaagtggct

SEQ ID NO: 77265 - DNA, 1140 bp, Homo sapiens
actttcttttggtatagttgcacaacttatacaaaacaacaaacatactcgaatttctcatcgttgaatatacatgcttatgattttatccaaatgacacatctttaatgtataacaatgaaaataagtttcctgaaaagtttcaatgagggagtaaaatctgaatcatacagcatcttgaaattggtggcacaaatttaatatgatactgagaatataatttaggaatcagtgaaagggctctggacattttatttcaaatagtaatgacagatcattcatgtttgtgaaatatattgagctaatattaaaacctcaatattttttcagttcagtgtttgacttgtgagtatagaaacaactctagtaatttttaaattatgccacagcagaagatgtaatattcacaaatgtgatgcatagtgaaaaccaatgttgctgtaaccttagctttagtaataaaaagtcagtgctgttttcatcatctgttttgtttccacctttgcctgaaacttatgtaaaacttattggtcaaatattacttagtctgaggatagaactgttccagaatgagcagatcattgtcctcaggttttgaaaatgtgagtgcaatgttggtggtaaaggctgaatcatgactagtctatcatttgcttactggttctttgaccattttattatcacctgggattgccagtggtggtgccacatgacatttcatcattttctcagtaaaggctgaatcatgactagtctatcatttgcttactggttctttgaccattttattatcacctgggattgccagtggtggtgccacatgacatttcatcattttctcagtaaaggctgaatcatgactagtctatcatttgcttactggttctttgaccattttattatcacctgggattgccagtggtggtgccacatgacatttcatcattttctcagtgttgcttgtagttctccatcttctttttgccatctacttgtgtatacttctctagtcatttatcttttagttatatttatcttagtaactggtttatatggcaattagtttcaatgtcagaaataatatagggcttttggggtcacttttttgttctttttctcaagttatattgataaaattct

SEQ ID NO: 77266 - DNA, 1052 bp, Homo sapiens
tcactgatttccagttctcttcatcttcattaaaatactcctaaataagctacttttgtattttcttaaaattaaatcgctattggggggctatttttagtcttccttggacaataactcaaagttggtcccagagcttgttgacatttctttagtgagcggtatatttgaaatgtaattttcaatcagtgtcttagtacaacttttatggtaaagtcaagagcttcagaaatcattctaggccactgattattgcctcaagcacagcattttttgtcctttacagaggaaaatatattaaaagcaattgagaatgtgtttgtgtggtgctcttggggttttatcaaagattctacgatttgggtttggttacaaaatgttattccctcatgtatgttgcacaggatttaaattgggcatttcaaatacggtaccttggtttgaagtcttgtaggcaagaagccctggtatgtaaattccacaaataaagttgttcttctgttttgcgtctctgtacatctataatatgtaagagggaaaggatgcctaggacaaacagaggtagggcaagatggagtaaagataagaaaagacaaaattgagattgcagagtaaggaatgaggtggtgctctgtattcagttggttttttttgtttgtttttgttttttggacaccagagtgctttttcagattgtatttaatgtattactttgaaaaggtaactgataagtcatttcatttttctcaagctgggactctgtatcgtggtgattagggttacagacctattataatagcccaaattgctgatggaaaaacaaaactaaagtaaacccgtagtaattatttatcttcttagttatcccaagagtagagtttaccccagtgtcttgtctttttccctaatcctttcaagtctcccttcttttccatatgctaggtctcccaaagtaccaggcatagtagctttacctagctggagcagccttaactgaagccctgctccagataatttagtctgttaggttgaattcagctggtggagtaaat

SEQ ID NO: 77267 - DNA, 1090 bp, Homo sapiens
catttatttcgcctttaagggatactattttggtgtagaatcatcaaaagtctttaattattgccttgtattttctattaggatttctggattttatttttgatagtcaggctagccagagaggtatgatgtactatgcaacagcatgtttcttcagagtaatacattttaatttggctacaaaagaactgaagggtagattaaatataataatatggtgtttggtaatggggaagggttcttgaagaatatgggttctcaactgctttttctagacacagaatggtgagggacagaggccagccggggtctgtaagcatgaagagtattaaagttcagatctgttaagaataaagaaagaaagataactgattaatttattataatttcccttttttgattaaatataataggaataaccaattcatagagaagcattatctttttcaaagtgttctttaaatcgtgactgaaaaagtggttaaaagttgtaagatataaaaagaggaaatgcaaaacagtcctctccgtacagcactgtgacctagagagaatgtttgcttctgcagctcatgttgatcatcctgatcagttgcttaatctgtttactgttctttgtgttccatatgtcagattcatggctttaaaaccagtcctgatttttagctccattataattaaacagttaataaaacgtaaaggtttttcaggcagtgggatttttaaaagacaatatgctttcattaatggggtaggtgtctggtagattttcagattattaaaatcggtgattctgagggtgggacccattagctgtgtatcagaatgggagaaagacttttttctaacttacattctcgttttgccccaatctctgcttataatgagagatgttacagagaggagggggttattattgtaaatggtttgaaggaggagaaatggctgaaaatgactggcttagatgaaagacatgaaaccagggctccccaatgagctgtatgttagtagttggttgagacagtgatttggtgatccaagccaaagaacatatcgtgtgattatctaattggtttcctctttggggcca

SEQ ID NO: 77268 - DNA, 1010 bp, Homo sapiens
ctaataccactgactcaccctggaattatttccttggcagagccaagaaccctcctgggctaagccccaattttggggctcacaggtcctgtaacatcttgctctgagtgttctcatctgtaaatggtgatgatagtatacctataactcagagggtgttataaggctcatgaacatgtggtaagtgataaaaaatgttagctgctgttgtctgtatacctacagatatttgcatgcaggattctatcatctatatttttcttaaaggattgctgggaatctgaaaagcatttttgaggaagatgtccagtgaaatggatggtgaaaggatgttgaatatagttcataaatcattggcactcaataatttccagaataatctcccccttctctgactctcttatcttccatgtcttctgcttttcttttgttcacctaagtcatctataatttgaccacaatgtgagtatagtatttgacacattgtattgtaatttaggtgcctccccctctagaatgttgtggaattaatgtgttcttggcctcatacccacttaggcctggtctccattttccttcaatgcaatccctcacctgtctctgcacctccctactcattaggcctctcattttctcttctgacctgcacattgatgatttcctgtaatttccctacacactcttcatccacatgatcagccctaaatgtatccctgaagggcagaggaacaagacagagagatcgcggagactttcctcagtgagcagaaatcctctgaggctgagctggtggtttcattttgtgtcactggaggaatctacctgcccttggcaaatcacagcatccagtatcagtggcttctgtctcctttagctgttttttccttttcaagcattgtctacaatcacctctagtaaactttctccctcagttttctataatatattggatttatcttgtatctctcctaaactttacctttcattcctgccttactatgtccaactct

SEQ ID NO: 77269 - DNA, 1053 bp, Homo sapiens
ataagtagaatgtatggaaaggaggaaaaagaaatgtaaagaaagggcaaaaacaagaaagagatatggaatgatcactaaatcgtccttatcctagaaaattggagttccacagagacattttaaaaaaggaagtgacagaacttgatgatagatttgatgctagggacaaaggaaagacagacaggtcaaatttgcctcctagagatgctgtgagaagagtgatagttttattggcagaaatgggataattagggaaggaagtcagtttgtaaagaagctgactaagtgacttgaaggcgttttgagcttgaaatgacaaaaggctatctaagtggagataccattgcatgtgttgggagatgtgacattgaaatgtaggggacagcctgggccacatgtatagaatgtggtgttcatagatgtggttatgtagggaaaagaaaaaatgaaggttgggacagctgagaaaccatgcacacttctgtaaataaaagtcagccattttaacttcataaaaagctggtgaggggctttcagcatgatgatatataaaattatatggtcaaactgtaattaaaaagcattagaatgctattccatttcataaattagtaaatctcaaattactagagtatcataaagtgatactcttgtatttggaagattaatgcatatcaggggcatttattctttcatccaatgtatgtttgaaccacagttccagccctgagatcacacagtgaaacagacagacaaagtctctgctcttttagagataatattctggttgggcaaggaatagaaacaaactttaaaatgtatgaagtcttatgggctaatgagtactgtaacaacaaagaagcaggaaagcagataagggaataaataatgacgtgggggaggatgctattttggatggaggggggagtggtcattgaagtctctctgaacagaaaatatgtggctcagtggctgaatcccagcactttgggaggctgaggcaggtgtatcactggagcccaggggttcgagaccagcctaggcaacgtg

SEQ ID NO: 77270 - DNA, 1128 bp, Homo sapiens
ggaaaaactaaagtgctgtatttgcaatggtgttcattgtaactttagatatagtggcaaaactatatctaacctaaatgtttaacaatagggaatgagtttggtaaattataataaatagcatgatggaatcttatgtagccattaaaaaccataattataaacactaggcagaaacatggaaagtgtttattttataatgttaagccaaaagtataccatttagtatgttaaatagaagtataactctaaaaatatgcatttatgacagatactagaaggtattacttaaacattaaagtggtagtattttgaggttaagatgtattcattccacaaatatttgttgaatgcctatgttgtacctcatggtactaacggagattaagtctaactttacctttgttttaaaatttttcaacaataatgttatagtaaaatgaattataaattaggggcaataatatattaaaatgctgccaatttgtactctgcttgttattttcatctgcttacccccaatatacatacattttttgtagaacataaaatggagcaatttgttttgttcttatttagtgagaaacacaaattgttcctttgttttccattttatttactaattcatatattgatacatgcgttgattagtttattctttaaataataatgattgggttgtatatattggtactttgatgggtgctaggggtgctgagttggacagatgtcttgttctgtttctcactctggtacagtcttgccacattatagtgatgttgtggatcagattgttccattaaaatgtcattcttgcttttaccagaaatgttcttttctgaatggaagaaggatttagataataagtataaagcatgtatttttatatcttacatatattttgtaactttagctggaaaaagaaaacaggaattctgttttttaacatgttaagaaatcagaggtgttttcatatttagataccttgggtggcctccaaatttctctttaaataaagtatttaacacaaatacagagaatattatagacaaatataagaaataccttgaaatggtgtttaaatattaagaaagtataaaattgattgtccatggaaaacgatttttc

SEQ ID NO: 77271 - DNA, 1022 bp, Homo sapiens
tatggtctatttgctggaaaaaggtctttataaagatcaacttaaaatgtttagatatttaccatgtatgcctgaattaagctggctgaaaatatatttttctagtatatctgaaaataatgctaattgtagttatacttttctcctcatttttttttgtttcatttttatttctggctgggggcagggtggtgggggagaaaaataagcatatgaaagtactgtgtggcttctttttaattttcatagctttcaagtagagatgctgatttttcaagtccattagaggctcagcatggtgtcaccatttctttataagtagtttgcatatttaaagatctcccctggagcaagagaagatggggaacacaaggaaaaataattaattatacagtaagattaaggaactcgcattcatttcagaaaagagttggtattaagaagtggacagtaatctgggatgtgttttgagataatagaactgaaaatctaagaggtactttaactgagctcttggatatcatgattatgttaacactggctaaagaataaaaaactttcagccttgagagaaaaatcgtattacaaaaaatcagaattctctcttaactagtagccccagcttctattaatcacatctttatctgagcttcaaatttctacaaagactgatttgctttccctttgtcaaaaatggtttccacctcctctatgtaaaattctaattcttttttagtcacctcttgtctaatcttgaataaacaatagagggaacaaactcgagggtattaaagatatggggtaaacaaatgtaaaatatgaaaacaattgaagagaagatctttttcagtttgtggcaaagggcagtctgctccttagaatttactgggacttaaggtgatgtcagaaaagtgaaatgatggttgttgaagacaacagttatccaaatactccagctcctttcactcttcttcatgatcccattttccaagccttttctctacctgcttacttaatcttta

SEQ ID NO: 77272 - DNA, 1044 bp, Homo sapiens
ttgagcctcacaaagataaagtgatttgtccaaattcacgtaaccagtaagtggcagaacaagaatttgagctccctttctgacgccaattctcttgctgtttccacaattccatattgtttctgtaggacctgagtatttttatattctcttaatgtttcaatgtattttaaagcaaattaactgagagatcagaagagtcgtaatgaattttatgaatatttatatagcaactagtaaataagatctgaaacttgttgctgatattgaaatgcatatagaacatttggaaaaatagaaacaaatgaacaattctatttttaagtataaatatcttttattattaaaatagggtagacttcagttactatgagcacacttcaatatttataagcttcagttgtcattcaagtactctgagaaaaaagaagactataaatgggacaaaaagcatgtttattgttctgccgttgaaattaagactactttccatttagatatttcacataaaactctaaagtgttttttcctgctgctagatggagaaagtgttttctgctaaaaggtaattttagaccattatatcattaaactcttatgaatgtaattcctggagacagtcttgaaatcttgagctgccaagcaaaaccttcagaaatgcttgataattaaaggaaagcaaaactctgattccttttgccatccatatacgatggcatttaaatgagtgtaccttgtcatattaaattatccttcttttctgttctttaatacctgcccatctttatgacatattcagtattctttcacttatacattcattcattcactcagtaaaatatttaatgggcagctactctgccaggaactgggagtacaaaagattagattgtccgttctttcaaatggtttacaatagaatggaggagagaggacagtaaataattacgggttaagtatttcttatctgaaatgcttgggaacagaagtgtttcagattttgcaatatttgaatatatttaatgagatatcttggggatggga

SEQ ID NO: 77273 - DNA, 6443 bp, Homo sapiens
cgaccatttggtttcagcatgtcaggagatttctaatgatttgtggcaatatcagcaattttttttcttttttcttgtttttggtttggttttctttcttttcttttccttttattttgttttaatttgccccctcttctttgttttggacccttaagaattttatttttaaaggagattgaagccatagaactcatattgacactcagctgttttacaaaagcttttcattatctgaagacaaaaccgaaaaagccaaaattaccattgcttcctccagcttgtcagaaacctgtggctgaatccgcagggatgtcaacgtcaatatcacaggaacacacattcggcacctagaaggcacgtgggcaaagtaatcatcgttcaggcccaacccttaggtttaaaaagtcaggttgtccatcccattgggttcactgagtgaaggcacataaagcaattgaggaggaggaggaacccctcgtccccctaggagcagacccaagcttgtggcaccaggcatctgatggtgccaggaaagccactggaattgtcacacggcgagcacagagggccggccaccagtcctcgatgcttctgaaccctgaagcccgatgacatcttacgaggtggacgttggactgttcatgcgcatcgggtgtcagtgactcatggagaagaaatggggtaaatttttagtgatgttgctaatcattgaattctgttctctattaaattaagaaaatgttccaaaagccataagcctgaagattggccctgtgcacgcacgcacacacacacacacacacacacacacacacacacacacacgaaggagagagagagaaaactgatggggaaaacaagctgtgtcttcttaactgcccaagtgaaaagcaaccaagtccaggaaattacaatagctgttaaggaaaggaaataatggtacagatctttttctgtctatcaaaactatttgatccaagtgaaaaaaaaaaaaaaactagaaagctacggaacctgccattagtattgtggtgtatttttaagattaaaggtacactgatggacaaaaaaaaaaagtaaaacatggcaaaaaataaaataactcctatactgccctcaaaatggagtttgcaattaatatcaggatttatctttgcaaaaatcagtgatttccacattcagccagtatagccagcagaaatttctgatccacaatgcatggattcctttgaagaaaaaaaagaaaaagagaaaaaaatcacaaaaacaaactttttttattcaaaagtaacaaagttcttgtaaggtaaataatgtatttagcatgaagcatgaattattttcatataaatatagaaaatagagaaaaggctatgcctgtaatttttaagcccttaggcttagagtttcttttggttttcttcttttttctttccttttctttgctttctttttttcctttttgtttttgtttttgttttttgtttttgtttttttttcgggttattttgttttggttttttgaagcaggtgtttaaggtttaaccttcttcagggacaaattctgactgttggggaacttactctgcaatataaaaatatcttcatgctctggtagggcttggatggttgaactctgtactgccttgtgtgcacttcagccccgaccccctctgattctctgttgaaaagtgtgtcctttctctctgtctgtacatgtttaacatgacgcaataatttgagggcaaacttagtagtgagtgtgtatgatagaatcaagagaattatgggacgcttacttgagaaaatcattaccatgatttggttctaggaaaaaggcagtgaataattatgcaaattagccagaagaaggggaaccgtgctaatgggccttattgggtgaggggacgagatggggttcatgtgaaggaggaagcgatgccgaggtaggaaaggccagccccagacatcctatcgccacaatgccatgtcgcaataggaagcaggggccggccatcgctaccttcagcacactgaccaacctggaattaagaccacctagattgcgagagctgaatttagaaaccagacaacgtcatgcagcccagaaactcctgttgttacctttgcctaagaaattttctttaatggcgggggcggggggcgggggtacaaagagaaatctctaaaagaatatgatcttccatccaagtggagggaaactttaaaacaaaaacacccagtactgtggctcaggatatgatgcgtgaggagagggagggaacagagatgaccttaacttttaaaaaagggactgctgtgggccaaagccaagcccatctgccaggacgaggtaatgtcagagctccatcagcccggacagtgggaactaactggtgcattccccacacttaccttccggtgggttgctgatgagagaacctgaaaaaacctacacctctacagcaggtcgaattcatgacctgaagctgaatacttccagcatatttattcagggtgtaggtgggaataaagtatcttcgcagtgctctgttccctccgtctccccagacatctgacaccctaaaagccatccacagctatggaacctgagcgacaccttgatttgtgttgtcacctgaccaagcctaaagacctccagctcagtcccccaccttcatcccaccccacagatgataaaattcagacctctctcctgaaaggcagaggttcaacattcaggactgtttctggccgaggacttcttccaattaaaacccccaccgtgggctgtctcccctcatttcatttttctaaaggggcagaggcctcttttagaaaataataaaatgcaatgtgtgtgatttacttttctgatctctttgagaaatagagaaatataaaagtgtgttcttaactccagaaccactctttttgcataaatacctcatcgggcagctttctaagtgtgattttcctgagtctcccttcgttggatctgccggaagacttgtcggggaacctttagtgagggtacttcttcctatttttcttctgtttttggaggcatacacattatgcataaccaaaacaatggctcaattgtgtttaactttgtattttgattgttgagaacaaaaacaaaaagtatcaatgtgtatgtggctgtttgtagtgaatttattggagaatgaggttgtccgtgtccttaacaagccaaggggcaggaggcaccctctcttatcccctcctccaagagcagtagagaatttaagcacaagcctatttgtgaaagaatattttgcttaagtgtcattcactttagtcttggaattccttcccaaacgtcaggtgttcttttagcttccaaactagcatatgtatccattagtctgacagatcgcctgaacaccattaagaggtgtggcgtttttgctttcatttctcctgctgggagaagtggcggttcatgtgtcattccagtatctcacatactcacacggggcaggggggagggggaaacggggaactatagcaatatttaaagatgctttggaaaccaaccgtgaacacatcaacaccacgacgtctacgattacttgctattggccctcggatacatttaagagaaagagacagtcactcttttttttcttaaatgatatacatataaacagttatttttatcctattataattgtcttttgtctttatctagtactatgtggaaagggtttgcatcatagatttttcccagccttataatataccataagctcctacttccctgcccctccctaatcagtattctttcaagagttctttggtgaagccatctatctgaaactaaaatgaaccaaacccatatttcactggtggttggagaaaaccatggccaaaacgattgtggcaggtctcaatcttgggagtttttaagaaggaatgtgccagaggccgattcccaagaacagagttttcttttgttttgcagaggcattcaatgtgtctagtgcttgctggccacagcagttactaccacagagccttctgggaggggccgttgtgttgaaggaggctcctgcctgagggacagcatcaggcagtgggctctgtagagtgagaaccaggtggaggccttctgtgcccagctcagagttctgcaccacgccaggactgcccaggccaagggctactgacgcaagttccactcattccactctgtggggggcgccttgggcctctcctggaagggctcttggagaaggaattggagttacgtacaagtgacctaaatgggaagcttttctagatgagattggattaaattccatgtgatttctctttccctttaatccaggttgggactcgtttctttctggtggatcacagctgcccagatgttgcaattgatttttatgtttctgtagagaagtatttttctttcatcttcaggattttttttgccaccaaaagaaaacattggaactctgtgtttcctcttgattgtgacttcccagtgttgacagttaagtccttagtgtcgtaggtcccagcccaccaatactatatcaaacactgttatgcacataatgcagcactgtgatctaatttaaataatacttttttattatttatactactatatataatatacatcaacacttttgctatataacctaagtgataaccctcttttagttacctgccaaactctggacttggtttatattgcagttaacacagttacaaagctgtaatggtgtctttttttcctttgtaacggaatgtgtaaatcaaagtatatacattgtgtggtgttcctgtttctggagtttcatgaggatttacacatggcattcagtgttctgtatagatctgcctacctttgtgaattcatctgttaacccctcttcctttgagagagcaccggcgatggtggttaactccttgtgttttctctctctcctactggttattcttgaattaagcacagactcgtcagctcggttgctttatcatgaataatgtgtgtgaccttgcagttcttccacagttcagcaaacaagtgctagcttcactgaccaaaaattaaggaaggaaaacacagtttttaaaacgatccatcttttaacagccgaaaccgatgtgtctatggtgctgcaccttgctgttgtacttctgaaatcagacgtgtgtgaacgatcatttctgacttaaccgtgagatgctcacgagtacccttcctgttgttttgttagcattgaaatcgagactatttatttggaatatatacaacagtgtttttccactgtatttcatttgcaaaagttgagaactgctttctctaccttttgcaaaataattgatattccatattggattctcaaagacttcgatatggtgaacctattaaacctagaaattgtattcatcctttcatgactgtggcctgagttccccagcccctctcctccttttttttagatgagatttagcacactctcagttatttaaacatgcaacatttcttgagtatgtatgttgaggccatctgagctcatagctgattcagtaaccagtttcatgctgtgtcattcacactcactacttaatactgccatggtgaaaatgtggaggaaaaatgtatccatgtgtgtctgggaagcatatacacttgtacattttttaatactctgattctgtaacatttctgagttttgttttgttttacagaaaaaaaaaaaaagtgataaagcaatcagaagaccaagaggtttactattgatgcttagggtcgtctgaccttggctggccaatagacctacacggccaaattaatttacgagagtaataatttttcaaaagccaattttttttctgtattttctgtatgaaactgccaatatcatgaatagaaagggagaaccataaaggagaaagaacgtgatgttctgttatgttcatgtaaacctaaagaaacagtgtggaggcaggcgcgatcagccgaactctagggacttggtgttgcttggaaggcatccatacctgcattttgcattcttcgtatgtaatcatattgccaaagacaaactatttcatcatttattgtaaataacacttttccccagacctaccataaagtttctgtgatgtattgtcttccagttgcaataaaaattactgagttgcatcaattgaagaaaaacaccacgtagtgttatgtgtgctgcgcctccctgtgcagatgctggtccacaacgtcatttctgttccttacctgcggtcaggcgtgtgtgcagtttttgcagtctggtttcggggttctcagctgcatttattgtgcccatcctcacacgtgcgtaggcttgggtgggcatcacacactgctctgcaaacacaaatgcacattcggaagctgggcttacccgggatctcaagag

SEQ ID NO: 77274 - DNA, 1036 bp, Homo sapiens
ttgtcttccacaaaacattccctggcgtccacccttcgtccccttcagctacaagtgaccctcctctcctgcaagtattcatccttctgaaggctgggcgccaggcactaacagacaggcagctgcctcccagacataaggagcatgggtcctaaccaggaataagcttcacagccattgctgtcaggccaagccgtggtccaggcacctgcaggcattaattcgtgtcctcagccccacacccacggggagcaggtgtagttactattcccactttcgcgataaggaagcacaaggaaagtacatcgctcagatgtaaagacacaaagaaataatcagaggtgtgatgagtgctacagacgccttataggcatgggtagcagggaccttgttatagggaaatcacaaaggagggtcggtctggtgatgtagctaagacctcaagtctgagagtcagactttgattccagtccctgctccgcaagtgatcagttgtgtgactttaagtacatcactgaacttctccaggcttcacttcgagccactgtaaaataaggatgctaatatccaccttacggagttaaacatggtcctctgcacagacttagcagagcgcctggcaggtgttgagttcgggaagtcgtagtttattgccctctggtctgtgatgcgaccctggcttgcctctctgttaggctgcaacatcgctgtggcagtgtctatatccgatccaaccccgtgtccctcccccagaaccctccctaaggtcatgcatttctgttaggcgctcagtgagtatttgtagattgcatgaacgagggagggaatgcatgagtgagtagctgtcaccacatggcaggtatctttgctgaacactggtttagtcttctgacaaaagcctcctaatgtagccgcttcagacgagagcaggcttttttctctgaagtacccagccaacatcgtctggcggtgtctgactctgtggtgttggcggggacacgaaccaagcacagcttgatttttatggtttaatgta

SEQ ID NO: 77275 - DNA, 1031 bp, Homo sapiens
aacaaaaaatggcagatggccatgtcgtaaacctacaccttgacttgttagctgaaagcctgctcattctgggtttgaactaatgtgatttctctttttatgtttgatattttccaactatttgacaagagaatgagtaccaggttttatctgagatgaatagcacgtggttttgttgagccacatgctttaaacttttagaggcccagtaaaatcaggtggctctgatttatgctaattgcaatatcgttacacataaattcagctaaaactgaaaaattgcaggcatttcggatgtatcacatgttcactttaatgaatgatttttaagaaagtggttagaaattcaccttccaacatgttcagaatggctggtttcttttaagcatttgttgtcctgtaatggcaatccctgcggcgggaaacatttgacaccaagtcagtgcagctggcttgcaccatcgtgaataacattgcaccaagttattaataattgaaggagcttttcacttcctgctgagttttgtgtgtaacttatggattacataatcccaagctaaaatctcagggaaggttaatttcatcaaatgagaaagagagacatttatattttaattctcactccctgaagttatgtctgtgtacctgttttcatccagaaatattatcagtggatgtattggttttctgtcttcatcacagtaaacttccttcttcaggagtgacagggagatattttgaattcctgcttgaaccatctttgagactgtccgggccaccccactcaacaaccatggggctctctgagcttctgtttttctgtgaaatgggttaagtaggccagtgttccaatagggacttgggtcatggactctgttggcatgcagtctgattctaggtggtaccggaaactctgccccacacagcatcaaatcaggggctgtggaatcattctcttttctattctccctttaatccatgggatctctttaagaagaaagtttccatttggatccccctctttaatgctg

SEQ ID NO: 77276 - DNA, 1549 bp, Homo sapiens
tgtgggatgatttttaactattgatttaatttacgtaatgataataggatgacttgtgtttttaaatttccttttgaatttcttttggcaactctaggggtttttcttttcaaatatattggcaaagagttattcataatataccttgtcatctttcaaaacatcttttgtaactatgtcccttttttattccttatttcatttgtatcatttcttttttgcttaatttcgccatagattttttttcaaagaatcaactttttaaattagctctactttgcatttattctctattccattgatttctgctatttataatttcctttcttttttggatttattctgtttttctttgtctagattgtgtacttttatttcaagcctttcttctttttctatagaagtttaaggttataattttcctcaccctactgcttattacattctataggttttggtatatttattttaattattgttaaggtataagtattttctaattgccattttgattttttctttgacccatgggtatttttaaaatgtgttttttgaatttccacactaaagagaagatggttgtttttaatttttgttttcagttatctctcaacattgactattaatttgaatacattgtggtcagagaatttatctgtacattattgcttctttgaaatttgttgacatttgctgtgtggtctagtatatatcagtttttaaaaaatatttcagccaggcgtggtggctcacaactataatcccagcactttgggaggctgaggtgggagattgcgtgaggccacaagttcaagaccagtctggtcaacacagtgaaaccccatctctatcagttataaatgaaaaataaataagtagataaaaataaaaaagatgtcatgtgtgcatcagaaaatatgtcttttccattattagcacatgttctatgtttatgtcaaatcttctccatatgaaacttttgtgtgtgtgtgcgtgtcagcttgatcaattgcatactgaaagggatgcattaaaatctcccattccaatgtagatttgactgtttcttcttgtacctctttcaattttagacatatatattttgaaggtattttaatgaaactgtgaatgtttagaatggttttatcttcctgatgggttgaatccttagactgttgaatgactgtttatctggagtaatgatttttgccttgaaatctatctgatctcattttaatattgctataccagcatagcacaacttgttccagtcttacttttaacctgtttttctttatcctgttatttaggattgtctcttgcaaacagcacatggcttcttttttcttttttaaatttgagctaatgatctgtaccttttagctgaagatttttagcgcatttttattgacatttttgggtttggttctatcatctcgttttacgtttgtgtttgccctattttttcagattcttttttgtttctagcattattttaaattgattctcctactcctcattccatttttcccctttctaatggtttgga

SEQ ID NO: 77277 - DNA, 1290 bp, Homo sapiens
gagggtaaattggctgctgatcttttctagtgttgtattttgttctgtatgtaaagaccaaacacctgttggcctttgtctttgaaatcatggtctttgaaggcaattacaaaactcagtattagattttgctttgtagtgggaggagaagagaaaatactaaagagctaggtttaagggaaagtggggaaagaatcccagttacacaaagcatgcactgaattccctcctgggcccatttcagcgagcgtagtttttgttttgggcccttctggtccagaaatttaaacaacgaccagcaaactgtgaaatttgatcaacattctagagctgctcctcatatttcatatcaatgacgttcgttaatgcctttgaaagtcctggtggctccttttcatgttgtacctagaaatcctccaaactcccaatgattctggactgttgtaaatgcaaaacaattcatggaggagagttgtaggatcactcctatttgtgttgtgtgatctcttgcaaaaaggaaatcatgtttatctcagtggtttaggggagcagtttgcagctcatgggagaaaattgtggtccccctggatattaccactgagttagaactcttagagctgaccacctggcccctggacgtcctttacctttttagccatgcatctgccagattgcagaattctagggctgctggaagggatcttaaacctcaccttgattttacagccgaggcacaggtagaattagactggattttgtgaaaaaggtagggaagagctgtaaattaacaagttaaatcagtttaatgacctaaatggcatctctctcctaggtagaatttgatacctggtgagaagtattttatgcaacttgtattaaatgattctctgcatgctccttagtatttcctatcattcttcgtagtgttcatctttacagtttggggaggctactgtctttttatttttatttatttatttatttgagacagggtctcgctttgtcacccacaccagaatgcagtggcacaatcacggctcactgcagcctcatcctcccgggctcaagtgatcctaccacctctcagcctctcaagtgtttgggactacaggcactcaccgccactcctggctaattcttctattttttgtaaagatggcatcttgccatgttgcccaggctgatctcgaactcctgggcgcaaacaatccacacacctcagcctcccaaagtgctaggattacaggtgtgagccacagtgcccagccctgagttttttaaataactaga

SEQ ID NO: 77278 - DNA, 1306 bp, Homo sapiens
agactgccgtacaccacaattatggaaaccctctcccacaatccccaaaacaggcaaacaaaaagcctatcgttttagacaacacacatagatttcatccaaaggatctatctacaagagttctgctgtcttctacatatgtctgtccttgagaattattgctatttttcctcctatattttcttctggaagttttatcgttttagttcctacatttaggtgtatgatccatttctaatttttatatgtggtatgaggtgtaaggctcaaggttcatttttttcccaaatggatctctggttgttctaacacttgctttcccctccttgcattatctcagtacccttgtcaaaaatccgttgaccacatgcgtgtgagtctatttccgaatgctcttctgttcgattggtctatatgtctagacttacgccagtatgagagtgtcctggttcctgtaactttataggaaatcttgaaaatcagataagataaattaggtaatataaactttagacattcttccttatagagaattcatcaactgtgtaagacatgataattcgctgcataccacattctaacagttctgtgatttaaagatacttggtaagtctcctgcctcagataaggtggtctgttagcggaaatcaggctgataatcaggaatggtaggagctactgatctgggtctgcctgctctcacaattaattagggtaagtgacgggggagattatggaaccctggactgtaatagtagtactgacttaggcgagagtttccattctgtcacccatcccaccttttgtaagacctagtaacaaaggccttacgcaaaccaggaaaataaatggcaaaaattattagcaagaagtgcagaatgcccaaagaattgacagtctgtaaaattaccccgtattcaatagtggacattcatcctacatgatgtttgattcaaggtttgaaaacatgtccttagatacctaaaaattatgtaagtaaaaagtatggcaatgtgttttatgaaaagcatttattctacctatataatattggcttacacacctaatgtccagagtggttttcattttggaatacataattttctagagccttttcaacggtctttgtttgaaaaagcactatttacccaccttgccactatctgagactgtgccagggactatatgggcacagccagagctctggggagtcttgaacccatgatggtagacagggtcttagaagaacagtgttcggagagggaaacagagatccacagacctgcacagagtcacacaagagaac

SEQ ID NO: 77279 - DNA, 1052 bp, Homo sapiens
gtcttggaccttagacttttttctttttaagattctcaggattgcgttatcccatttagaacatagcatctacaatgagcagtgctgctctgtttggctctcttcttatgtgtgaaggttgccctcttgctagttaaaaccagaaagcttaagagtccctctctaactgcagagaacgtggctgatggcaagtgtggggaagtgtggcgccaatgtccctcatcctgagagcctcaggggtgggtattctctcatctaaaagataaatacgtaactggcctaacctgcaaggatgatgctagaggcctgggccttgtctggagagagccacaaatccgaggaagaagttgactttcaacgtccagcccttttgatgtcttacatagctggaggccagtgcacttcagtacatcaggtgcgtcagattggctgtaaaggttttggtctttcggtgtcttaatatgctctgagggaaacagagtaaaaggaagggaaagagtagatttgctggtagagaaaaggctgaagaatggactcatgttcccaccgagcttcctaatgtagagtagtgaactgtgggcctcagaatgcctttctctaacagagccattttagactggctgtgacttgttcttcagaagccacgttcctgacacttggggatggggacagaaaggagaaagacaggggtatagttaagtgtcacagctggcttctggcagctggtgagcaaacacgagcacatccgccatctctccatggagaagactgccaatgatgaggacggagaagtgccagggttggcagaggcagcatttagttgcagctcatttgagaacaagctgcaggattcagaggaagagctgagtctacatgccaggagtcttgtgaggttcaggaaatagctcagggaaagcctattaatgctgcaagagagctttgtccatgagattctctttgaagtgaatgctgttcattaatcaggaagatgttttaataggtaaatgcagttaggaataactacaaaaagcataatgggctgaaagtatttc

SEQ ID NO: 77280 - DNA, 1525 bp, Homo sapiens
aacttcctattgtcactgactctcctgctcctcaccccacggtaaaagctgtgggggtgcatagatcagcaatttatcaggaacatacagtgcaaattataaaattaacaaaatgagaagaaaccatgcttgtgtgatgaaaaatttactaacatgatccttaaatctcattctagaataccttttcttcttctcaaatcccactgggaagaaagtcgcctttgggatagctcatccagttgctggatattttttttttctctgttgcattcataaactgtaacttgcagggggaaaaacacacacacacaccggccccgttgtaaataatgttatttattggttgatttttccagatcctgacattgatgctgccagtgccatgatgcttttgaatactccccctgagatacaagcaggttgtgagtagatatttctatagcctacagcaccatagtttgtgaacttaaccttctcatttatacaccaggtcataggaagaactaatgctaaagtagaacttcccttatagaatcactttaaaagctacataagtgcatgattacatgcatatgcatataaacatgcagccatgcatatgtatgaatgaatgcataggtgtgtttccaagatgagaaagttcttatataatttcaggacttaagacttggggaaagggaaacagatcctttaatgagtcccagtgaagaggccttccttgctcctgcaggtattgttcctgtgagtttgtagtttctcctagaagaggctacatggggtcaacttaaccctaatggacctgagcagtacccatttttagaaatttctttctcttctgggacctcatcgccaggctgccattttggagaagagtctagtgaaataggcctgttggagcctggaatatctttgaaatgaaaccacgctaccagcttggaccatttctatccagcctcccaggctgccccagatagcagggtagggctgtttagctaagcaggactcccatcctcaccttctttttgttggccttcaacaatgtcaagtttgagacaacatttccttactgagacttctcttctcaccacctgaggtttttaccatctctggagatagtctaccatggttttagaaagatctcttcccaagggatgaagagtgacttcaaacaaagatatctgtcccttccttctccccactcgaggtcagtaccagtgcccacatcccatacccagctagaaccctgttgaacacacagacagctggtttaccaaggtctgctcagcttgttgttaggacattgctgtgttacagcctcttactgatgaaacacggtagtgaggaaatagtgacatgaagcagcagacgccactacaacaccaccgcttaggggctggcactcacctatctccttcttatggctaggccttcagctcattttgggttctggctctctgagggccacatggcttgctgagcagtgggaagtccctgcctttggagtggatgctacttcacacaggaa

SEQ ID NO: 77281 - DNA, 1005 bp, Homo sapiens
gataaaagaggtgtctgggatggcagtgtcttgtcaaagggctggaggtgatgcgttcacttgctttggaatcacagattcgggaatgtgacggcaatgtgacgcagacctcgctgctgaggcgaaaaggacgttagaattaagggactcagaagacatcaaagttaaagcggttcttgttgcccggagaaaacagaaatacgaaagcatctgcctggggagtatcaaggtactcctttcatttctccagcagaggagcagcagggacagtgatcgactctgaggaagtgagaggcccggagagcttccagcccggccatcctaacaccaccttagaattggggcgcctgagacagccctcagcaccaggctcccagcccaggatgctctttgagctctgtacttaccttccagtagcttttcctagaatccccttcctgattaagtgaaatgaggggtaatagatgggcaatttacacgagttagaaagatgccccctgttggggagctgacttggacagatgtattccgaatttgcagggttcactgtgatactgttcctcagagcccgtacattcttcatttagagtttaccagtcactgtatttaagctggaaagactcaggaaatgtgtgaatgggagcctcatacccagagtacccccaatgaaatgtagagcttacttggagatgtgtgtgtttgtttgtttgtttgttttcatctgttcttatccctttggccctaaaaattatccaagcacagtcatccgttgggtatccatgggggattggttccaggaccccctaagataccaaaacctgaggatgttcaaatctcttgtataaaatagtgcagtttttgttgttgtttttgttgttgttgttgttgttgttgtctgagatggagtctcgctgtgtcgcccaggcttgagcgcagtggcacaatcttggcttactacagcctctgcctcctggattccagtgattctcctgcctcagcctccca

SEQ ID NO: 77282 - DNA, 1465 bp, Homo sapiens
aaccaaacacttccagtgaggccccacctccaatgctggggatcaaacttcagcatgtgctttagagaggtcgagcacattaaactgtagcacattacaaatccccttccagatgtttgagaagcagctttctagtaaggaaatcaaaaggcaaaaccttttgtaacaaagagattgcctcagcagaacagtggtttatggcatagtgggaccgggtgtgtgattcaatatggtagaagtctacccagaaagaacacagtgaggttttgttctcagactacgtcctgtgtctctataatgagaggcaggtgtcaggtgtgggaacatcactggctccatagttcctttttaaattattttgagttagtataagacatacatccccaggcaaagtgagcctatgttcagagtcaccctccagttcttcagtgctcgagcattagggaggaagacagtggagaggtgggcacgcagttagtgtgtgccttgaagcactgatggcagggttctgcgtggtatttactctcactaacacacctgccagtgtcactctgagatggaatctttccttctgtaaaagattatttgcacattgacccagttgaagacagagttaatgaagatgccgtgcatgtggaaatactcaattctcagcactgacaagcactgccatgcctgctggggccaagccactatgagcacccccacagctgtgggaaagttggtgcaggggttaccagcaaccacgaacccttttactagaggaggaagtggcttctggcgtgggaactgggcaggagctatcttccaataagtggagagaagtgatggttggggaaagccaatcactggggaagatgaccttatagcatagagagggggaaaaacagactcaagaaagatgcactggtggtccctggctggccgtgcccaggcccctatactctgagcatctccctgggcctttggctgtggtctcaaggggcttcctggtcccacctctggcttctggccgtggcacatcctttctcttggacaccagtgtggccaggctctgaggtgctctggggtctcttgggagtctccattcctgttcctgccctgtggaagccttcttgcacctgaggctggctccagtcccctcctgggcggtgagcttcagctgtaacactggatgaagaaaccaggagcaagcaggacattttcaaagcaaagaatgccagactctagagggcttcggcattaatcgccctctcctccctccctgcagggtcagaatctcttccacggcaaccccaaatgtcccctgtgcacatggctatgagctactgccatccccagagaggggtgacccaggagacagaaaccagagaatgcagtaagcagagattcacaactggatgagatgcaaaggggaagagacttgagaggaatgtgtagtttctcattcatctatagggagctt

SEQ ID NO: 77283 - DNA, 1053 bp, Homo sapiens
aggtggaggggtcgagcagattgtggctcaagaccctggttgaacctggctcctgtctcagcctccatccagcccgctaattcaagtagatctttttcacactgttcatcagtaagatgatttcagagggtctcttttagctcaaaaattctattattctgtgcttagaactgagagagtctgtctatatgaaaatccaggcaggttgcatttccccacagacagttcagtctatataatggtttgggctgtaggagctcgagatattgctaggtggggccaattataaggtataatagtataataagtcagcatttttaaagtgaaagagtctctgtagcaatcttacaaaatactaaagtggaaaaatgatcagaaattgatcttttcaacttggtgattccatggatagacagtagatgcacatcatcactggcatattaatttgagtcgttgcttttgccttttccccagtaaaaagccctggctagtctgtgtctatttaaagaagtaaaatgctactcagtgaaaaatgataattagtaaaccctaaacagattgaagttccccagggaataagcgcggatgcctgacctcagaagttgcaaagggaccctggctgcccatcattgtcacgccaatgggtagggcccgtacccgcctttttttgtacttcccagcatgtaggccagcctgccacaagaggtcaatttggatactgtggtcacattttaaaaagagaactataattatgacctctcattatgtacagtgatgcctgctgagttaaagataatggcactccctgcctgaaagtatcagttaattgcctgcaggggtcagaagggtgctcatgtctgtcccctcccgcatagactcccccaaccccaaccaggcatgcactgaaggcagacacacttgggcctgctgtgcttctcacgctgtttaagcaccaggtttaaccactgtttaacactgattatagtggaaggtcaagtttaactcatctgcaagagggaaataaaacttcaatgagcttagacctagcctgtc

SEQ ID NO: 77284 - DNA, 1034 bp, Homo sapiens
ctagagaatcagggcttttatttaaatagagtatttgagtgacaacagtatgtgtcttagtccattctcgcattgctgtaaagaaatacctgagactgggtaatttataaagaaaagaggtttaattggcttacggttctgcaggctgtacaggaagcatggaggcacgtgctcagcttctggggaggccacagaaaacttacaatcatggaggaaggtaaagggagagctggcatttcataggagggtgagaggggcgggggcaggcgccacacacatttaaacaaccagatcttgtgagaactccattgcaagagcagcaccaaagggatggtgctgaaccattcatggaagatccacctccatgatccaggtacctcttgccaggccccacctccaacactggggattacaactgaacatgagatttggtggggacaccgatccaaaccgtatcagtatgctaggtgctgtgtcaagccacagttctgggactgtgaaaagtaggcacatattttgcaaaatacttgtgtagcatggaattggagtttctcagccaagtaagtacatgaaatgttccaataaataatgtaaaacatgaagaatttcccaccgaaaagtttctccttatctgttaacaatggtggaatgaagttcatcagtgcatccgcattggtatatcatgcagtgactttatattgagatgcaaatgcactaggcccaattaaataccgttgttgtgatgtatttagacttgttcctttgtgttgttttactgaaccaaaaggaaatagtcatatttcttagtagtgacatgcctagaaaaggagtaaagcaattattcttttctttaaactctagttttggccatctctgaatagtgggtaagttttgcttttctgaataaagaagtgtttacaaatatagagaacatcattcactcccaggttctattcaagaaaagcatattggtaaaaactgtatttctcagggccatttattcaaagcccatgccttcaagcaggaatcgtcac

SEQ ID NO: 77285 - DNA, 1046 bp, Homo sapiens
tgttatagcaaatatttcaggatcatcccagaccaaaggatcataatgcttccttttagcaaggggagagaatttcgttctgttctgttgatgctctctggggtgagactcaacctaatgatgagtgaatctgaagccagtgctacccctttctgtataatccactcctaaaagaattggataaaagctatggaccctttccagaaacatgcacaaattcccagtgtctacatgtactttctgcaggtttaagtcttcctgtggactgaccacctaccccagatccctctttgtagcctgtttcctgttctttcttcagtataagcgactctttgctcctccagaaactgcttttgtttgggtggtcatcagcaagccatggtactgttgatcaggtcccaggacactaatgagattcagtggttggagttgagaactttctgtccacatccagagagagaattggtttctacagttgcatacactgaagctctgattaggatctttcctattacctttagttaataaacatgaccaagataacttggccactttggaacatgaagattgtgataaaaatgaatttacttgcaaagcttaatctccaaaattgctttgaatctgggctcaggtccctccagaagtaaaaactgcacagtgaaacgtgtagagtgacatcagctggcttgggtgggacacagtatattctagttgaaaggtaatgaaactttttaaagaattggatgaattaacatctttatgtgaaatggaatcaatacaataaatccactatggctttgttagctattctcttttgttttttggtttttgcaacatgtctagatggagaaaataagctgccagagagtggagaaatgtaaaaattaattgtgttctgtagtccaaactgtatagtttctttggagaataaaataaagcaaaatgaagtgagccgaatttgccactcagcagatgccaggattttaccctgtcgatggagtgtttcactttgataacctgtctgatgaaccacccaaggaaggggc

SEQ ID NO: 77286 - DNA, 1373 bp, Homo sapiens
gattcacaactggagacatgccatatgaaaaacaaaaccagcttccagaaacaactgactttgacttcttgttctaaagactgagagtttttctgccactttcaccaagtccccaccttctttaaacgggtagaattcaatgtggtcggatgcattttgcctcaggggtataaaattaatttagaaatgacattttaaatagtggaagccttttatataatgatgtgaaaattattctgcttttgaaaatcaaaatcaaacatgaaacagtatgtctctctgtaaagaagtcagatatcttgttgggatattactttggctttctgccaaaaaaaaaaaaatctctattctcctaactctgaagaaatgaagcaaaaaagatatttgaggaaggaggaggggattgtgattgttttattgagactagaatccagatttgcaaagcagcacttcttttttttaactctaacccagacaaaaaaaaaaaaattgggttccttccccaaatagaatctctaaactgtatctaatgaaacttgaataactagtttggattttaaaagacagaagaccctgcccattgctgactgcagtttaattatgtaataaaccaaccaatcctgtttttgtctggtttagacgccttgcaaaatattttccatagaatatactaccctcgcctaatgtaccttctcccttttcttgttaaccatctgatggtaaattcttttaattctgcttatttaaagcacttggcttgcctcaccttacccggtaatagttttatagtcagaagcagcatctggcctgatgataagaatcagaaaatggaattgtattactcccaaggagctagttgtagcctgtgctttttctttcaagaaaatactctgcttagatagaaggcattcacattacgtggtccccactgggctgagaaaaaaacagtctgacaaagtgcagaaaatatggttagctccctcaaagtcgagccacttccagggtcgatgccagtgaaaggaaacttgggtagagtgggtcagcatgaagtgcctgccctggaaaagggtcctttccatctctccctcttttcacggccgtaattgagtgaagactatcaccaacttgacttacaaaagctgctgtttgcttccttcttgtgccccaaagtaaacaaaataggcaggttcctgattcggagtgagtggcatggagcccaggcctttgtttgctgttaagttgtcggggcagcggagcaaatagatgtgaagagattaaccaaacaagaaggcctggcaagggtgaccctttctgtccagccaagggagtgcagtcatccgcacggtgcaggaggcagggacctggtctctagt

SEQ ID NO: 77287 - DNA, 1320 bp, Homo sapiens
agaagctctgagcatctccaataatgcctttattagtccgttttcacactgctataaagacatacctgacgttgggtaatttataaagtaaagaggtttaactgactcacagttccacatggctggagggttcaggaaacttacaatggtggcagacggcaaaggggaagcaaggcatgtcttacatggaagcaggagggagacagaaggggaagtgccacacttttaaaccatcagatctcgtgagaactcactgtcacgagatggggacatccacccccatgatccagtcacctcccaccacctccctcccctgacatgtggggattacaattcgacatgagatttgggtggtgatacagagccaaaccatatcagtgcctgtcaagtattaagcaggaatttcttaggggaagaagggagttgacaaagatgcaggattgagaataacaatctgttaaataaaaggagaaaataagaataaatgagctttgcttatggaagaccttggaaggttagggaaagtcttagcgggtgctgaattgagaatagagtttgtgtatagaaacaaaggcttcctacgttggttcctaatgccacaaaacgtacaatagaagtagggtcataatggtgactgttcagtccagacctctcatttcacagatgaggaaagcaagacccagaaagtctcttttgagtcactttccctagaaaagcagccccacatgtccacagccagacgtgtgcaaggaggctcactacagcattctttataaaagccaaagattggaaacaacctaaaatgttcatgaccagggaaatgttgaaatagattgaatttcagcaatgaaaaggcatgagccatatccctcttgaatagaagacaaaacttatcattgaatgaaaaaagcaagctgtagaacaatgtatacgtttgtcttcacatgtgtaaaacacacacaaacttaatactcaattgttttgaaagacacagatgctcatcttcatagaaaaaagctcaggacaggtgcacaccaaggttgtaaggttacctttagggaaaaggcaagggaataggattgggtgacctctcttgtgatgacctgagttttaaaataagcagttgtagtcttgtattaatcttgtgattaattaaaaatcacatgattaaaaaggaatgctccattgacttgtccgatcatagtcactgaattagttgaaaaggcaagtctaggaccagtcaagtcttctggatcccaatccccacccacacacccaaatattacacagataggtgcaggcatggcggagaggggccca

SEQ ID NO: 77288 - DNA, 1229 bp, Homo sapiens
cacagtaggtgcctcaataagttgttattgaagatggaaaactaaaacatatcacatcatatgggcaaggtagggttccaaagcatttggggcagaaaaggtaattctgatatttactctttgaaattaatttttatgaaagttatgaaatctaaattctcacctctccttaggcttttgacaggtgttcacagatctcattttatttataagcctatcagtttttaataatcacttttaaggaggccttttattaatgtttggtctgatttgcaaacttagttaattaaactcctttaaacattttaagctgcatttgtaaaggaaatcgaacttattaaatttataagtactcaattgcctgactcaacaaacaagcctcttagagcacttaagcaattcttataagtctaattaagctcataagtatgttacaccttgtggtcttttaagttttcttgtatagtatatatgaccttactgagattttgacttcaaatcaaaatctaagttgattatttaatgccacattttaagttaaagtctcaaggctggtctgttattctaatggacagattctcttaatcgttataaatatttgaaatactatgtttgaaatacagtgagtatttcaaatagttagaacaattgatacattgatctgcatcgatatgttgatctgcattgatgtcttgtttaaggaattcattctacagacctgatttccttaagcatttctctgctttattctaaatgttcctgggggtaaaagatgctcacacaaattgtccaagcatggaaagacctgcttcccatgaggacgcctctccccctgacttccacacctcagggatctttggaaacgtctcttccccagcaaccagcgccgcacccggcccacctctcaccctcgactgcccagtgggagaattgctataaattccaaatcagatgctttctgaaagggacctaccaggggcttctggcaactttaagaaggaaagtctgagcaattggaggctcctggaggctgcccaggaatgcagttcagtcctcggaatttctaattcttcttcgccctgaggaagctcacaaaggtggacaagcaggccccttctcacccgaaatgtaggaagccatcagcaacctgcaccctgggcgatctcccaggagaacctgcccctggcctttgtggtgacctttgctgtgggaaaggggaggcaggaggc

SEQ ID NO: 77289 - DNA, 1053 bp, Homo sapiens
acaaatgggagtcagccagaccccagaacagcttaaaattcctccttcatgggtgctgaggggtaccagcatgttgactgagatcattcttgttttacttggagtctaattcagggtatataaaaaagcctgaaatggaatgagttggtctttgtataatgtaataggctattcctgaaattgcttttttcttctggctctgtttgcttagcatgttagtttgctagggctgccgtaacaaagtacccagcacggagcggcttcaacaacagagatttattgtctcacagtttcagagatcagaagtctgaagtcaagatgtgggcagggctgtgtccccctcgaaggctctggggaagaatctgttccaggtctctctctgaggttttggtagttccttggcttgtggccacagagttccagtcttcagatggtgttttcctcgtgtttctgtctgcgtccaaatctccctttttcataaggatactgcttatattagattaggggcccatcctacttgagtatgaccatcttaactatttatgtcagcaacaacctgattccaaataagaccaggttctggggtactggttaggacctgaacacatgaattggggttgggggaggcacaggtcaaccaataacacttaatgaagaataatctgaaattttcccactagtcatactactctagcgagtaaataaaagtctccctggccaggcatggtggtgcatgcctataatcgcttgaggccaggagttcgagaccagcctgggtaacatagtgaggccccatctctacaaaaaatttaaaacttacctgggcgtggtggtgtgagaccccatctctataaaaaatttaaaacttgtctgggcatggtggtacatgcctgtagtcccagctactagagaaggtgaggtgtgaagatcacttaagcctaggaatgtgaggctactgtgagctatgaccacaccaaatgcaccccagcctggttgacagtaagattctctctctctacctttctctctctctacctctccctctccttttcc

SEQ ID NO: 77290 - DNA, 1054 bp, Homo sapiens
aagaaacagagtgaagtaagagggattgtccattcagcagacgttttctgagtgctctgtacctgccaatgagttagatccctgggatatagaaatgaaagaaatgaaaagggtgtgtgttatccctccatagagggatttacagtgttcttgggttcacagacatataagcaaatcacatgatagcatggtgggatataccttcctccctggtttcctatggagataccatattggaagagcattggtttccatgaccctttggttttggactagtgaattcatggcattgagggccttacctttttctgaagtccattgatcagtggtgttgtaccctgtctctcactgcagagcttcaagggtaagaggccagtggggccattcactgctttgtttggattctgggccatggagccagggacttctgccatcctgagctgttctcctctgcctgtacctgcagggctggcccaggtcttgtggacatccttcggtttggtcggtggctgtactatagctcttttttgctcttttgagtgttgccctacctccttttatctcttattggcctcagcgagtgtcaccagagggacaacctactgcatcttaccacctgtacccagcactgcacacggacttgcactccaagcctggcagaggattggctggggagacacatgcctactaaagaaacaccatcggaagtgtattttctgctagggaagggtcagtagcatttggttcctgcccaaacagcaacacgttgattctcacaactcatctaacttctgcaactagggtgtcattacagtgtgtacttgggtgaagatggatcccaactgtcttttggcaaactttgttgttcttttctgtccctcatgtgatcccacagccaccaagatagaagagtgttctcgctgctgagctactttaatcccgtggtcagagtggcaagagcttaataaatacttttgtgcaataggatattttgattgtttgttttagggttatgtttgtttctctagttcttttgtacaacaaaatctttgac

SEQ ID NO: 77291 - DNA, 2205 bp, Homo sapiens
tcgcagcattgcatatacagcatcttggtagctttaaatcaatatctctcctaagggttcagaagaaatgtcacatacaaggtacattgcttgcacaagtgtcctttgtgtcggatgccctcgaatgtaatttctatcagtaagacataaaggacacatggagagggatcattttgctcggcagcacaggctgaaaggaaggaggggaggtggttattttttgttgttactatgactgtttcttgggttcctccaacaaagaaatgctgtgtggctttcaagtatctctcagtgcaaatgcttcctgtcacaagtgatcagtgtcctgccattttgaaatggcagaagtggctttagcagcattatgaaattatcattgccgtgctggatagctgagaccagcctctcagagaaattgacgctctcgccagctttcctcaaattatgtctcgtaaggctggcgcgctgtcactttaacaaactatcaccctgaaatggggttgctccatccagggctgtggaaaaacaaggttagaagagcagaggacttgtcgatggtgagtaagtgggattagttaaaccaatattgaaaaatggtttgcacaactctgggctgctcatgttccctctgaaaacgtgtgctctttcagcccgcgtaggcacggagacagttaaagctgcatcaggacctttgttatataatccttcccggttatataattaagggtcctgttttttcttgccctggtttacatcgattgaaatgtggatagaagattgcaacagttcatagtctcctgtaatagccgaggcagtaatttcattgattaaagcactcggggtctattggtcatcagtaacactatctgcagaatgaactatgtataggcgaacggtttgtgtttgtagaatattaaataagtttcagacacatgtatcctcctacagatgagcagtttgaaagaactggcctttggagtctgacttataggaaccttctgggttctgcccaggttactagcaggtcagaatcttggggcaggcctagatgtggaaaagtccaataaatcagtgagttctacatccgccatgaggcagctcctgtggctttttccagtcttggcccagtttcggttaggaaacgtgacaccctgaaggcagatagtattcttggggcttagctccacgccttcccgcaacactgagcttacctgtccctgaagcagtggctgctggcaccattggagcctctcccagctcttgcaaatgtcatctcagtggccataatttgctgccctgccatgctcccagccaatcgctttgagcagacctagagattaattacccgtgtgttccccgccaccacctgcttccatctgcttggtcttggaaggattgaaccatgggcatgtctgccttgtgccccagcatagaggcaccgcaaggtaggcaggtccgatttggagcacagtattgcatggagcggctgtaccattgcgtcccctcctttttctccagatgcgaaggttctgtgtctgtcccttagggccctggctgagaccttctgaatagctgctggtgcccacatcccgctgtaacagaagtccaggcaacagaaccacactcctctgtcatactgcctggcaaatcagatcatatccctactctgcccttccctccatagtggaccgagacccctgcattctttttcagtctcagccaccctccctcttggatcacctggcttgttagctcctggcagccctctcctctcctgaggctgggccggctcttgactcccagaatgctgtgtggccaacaggccagctagtgtctctcttggccaaacaggaattgtttgttgcaagtatttcctacaaagcaagttctaacattatatgggatatgggtaattttgattttctttatactcttactgcttttgctgaagttttccttggcgaacagatacttttttttttcattagaaagaaaagagtatattttaaaagagcagtttgggataaggaaaataaaaacacatcatcttttatgttcagtagaacaacaacaaaatcaccccaggtaagtcaatgcaaaaaaattaggcaggcatgcttctcctcatcaagtaataaatggcctgtcacaggtgagatgggtgggatgttatcattatcatcaacctcaagtcctgatgttccc

SEQ ID NO: 77292 - DNA, 1109 bp, Homo sapiens
ggctgatggtttccaagagccgctggtgctgattggggttggcagaagcccctcacacaggcacactcctatactttactttgtgtggttagcttatcttctgggctttcttttgatttcaaagcaacatggcatggggaaggaggtcacaaagagacagtgagggaatcagtaagccacaaggttctaacagcccctggttccaaagggccctctccatggtgatgttttcaaaacatcaggcattactctccattctgttcttctcttcctgcaggtttactttagcacatacttacagtcacctcctatgggcataaggattaaataagaaatagcccacgctctcagggggcagttgccagagagtgggcagaagtgaccatagttcaaggcataaagttacgagtatcatcagggagcagacaaaagccaggaaaggtcagaggcaggtgacttcatttcttgctgcgggaattagggaggttgcaagaagggcaaatttgagcgggcactcatagagtgagtaagacttcaacagctggggatggggcagccctgctggcaacgagggctaggtgggccaagacaggaaaacataagcatgttcagggtaagcacaatgcaggggtgtgtagggctcgactggggagagaactccactttccttaccagctcacacctgtccaacccttgaaaaataaagatcttctcctttactcatggtggaaggtgaagcaggagtatatgtgttgcatggcaaaagcaggggagtgggggagggaggggggcagagagagagagagagagagagaggatgccacatacttttaaacaaccagatatcatgagaattcacttactgtcacaaggacagcaccaaggggatggtgttcaaccattcatgagggatctgcccccctaattaatccagtcacctcccaccaggccccgcctccaacactggggtttcaattcaacatgagatttgggtggagactcagattcaaaccgtacaacagcagaggcagagagtagagcgatgcagccacaagccttggaacgccaaggcttaagaggaggcagggaaggagtctcctctgcaggct

SEQ ID NO: 77293 - DNA, 2579 bp, Homo sapiens
ttatcctgacttttttttatcatgtagctttctctgtatcagtgcatacagatttattcatccttgttattgatgtcagagtatttcactgtatggttgtaccagatgtattcaagccaccactggtagtgggcattatacaaacagtgttgcagtgaatactcctgcatgtatctttgcacacatgtcttcactattggttaaaagtgatattctgttgttatttatttccttaactggaaaggaagtccatttgtatttctttttctgtgtagtttctgttcatgccccatgctcattttttttttttcctattgaattgctttttcttgttacatcatattttccaaagagataatgatccaagtgctggtcagttctggggaaagtgatctgattggaggtttgctgagacccatcgtgtgtccatcgagaagtctgggtacccagtaaaaggcccttctccatgtttttgaggtgtggccatggcaagttttcagcaaggctcattctgtacttatctttttgatacttagtaaagggatgtgtctgctccacacagagtggagctttgaccagtcactgctggatgaacaagagggagagcatggccttgtgggacaagattgtctttacaaccactggtcttccagacataaacttgggtgcagaccctcttggctccagaattcatgggtcatgtgaccttctctgggtctcagtctcctcatttagaaaataggatcataagactggtgttgcaaggtggttgtgagcaatagaagaaccatatatttaaagtagctagcacatgattggttttcaataattggtagcttctaatattagtatcattgatatgactgttattatcatcaccataaataaaacgattgacagtagaggcatgggctaagactgaacaattggttaatgcggcaaccatgttatattggactttgacttcaggaacccgctccaaaggatgcaatttggtgtgcaggccatctgcatctttgcaataaaagcttctttgcacctatgtctatttcatttgccttgtgactctataattttctttcaggccttgcacctctgttgctagacatagtacataaatcccatgcagtttcctggccttgaaaagggagagtgacttgaaagtactctacttgaattctaaatgggaaagatgtaaaaaccgctcctcccccctccaagaaatctgagggacagaaaatagatctttctctctggatctcttaaaccccgcttacgaaattaacaaaggaagatggatggctgaaataagacttccaaagaagagatgggaacctcctaattgattcccacaaaactgctggttatttacaactaggaaaattgcctgcttggagataccaattcagctcttgtggttccgctggcttgacaggaaacactctctgctccttgctgaaaaagctctgagggaagaggggggcggagtgaattacatctaactgtttaacactatctcattcatagatttctgccttttccccctggttgatcattcgcagtctcttttttagtatataattgttcattttaaatgttcatgtgtgctatagctgggtgaatgttaattactggcagtctgcaattatgttgtctgtttgtcatttccgtggcggcaagggtggtaagctagaattcttccaatagcaagaattgtagtttataatctaccccaaaaccatttagaaatggatacatttcactcacactcttgatgtagttgagtaaatgcattgttattgatattcattatgaggttttaagctcaaaaatcccactatacactaactgaaaggcacccagtattttggctaattcgttaaactcacaaccattttttgagtatccaatatgtactagttgcttaggacatacctctaaatgaactagataaaaaataaaatattctgcagttctctatgtaactgtagggacttcccaagtgaccccttaagccactgtgtggctagtggcattgagtgtgtgtcccgtaggctgccgaacactcctccattaccagcactgtaattgtgaggaatatggtaagaagttagaagccagtggcaagtgaagttcttattttacatttaagtcctcctccgtgataatggcagctgaaacagacttggaaaacataatttgaagatcagatttgttccagatgtccctggtatctgtgtgcaaattaaattgcggtacatcagtttgatccagtcaagaaacagagtgggattgggaggcatgtttgtgctgtagggaccgggtaaacacagttaccattgatgttgcctgaagccgcagtgcctcaaggggaggttccagcaacctagaccacaactcacctgcggggattcccagtgttgggcttcgttctggtgctgtgagtatacaaggatgggaatttggaaaagactaaagactaaagtttcctcctttaaaggtagagggtgctgaagagcaactccttagaggagatcggatttaagagaacttaggtagttggaaatacactgacttaa

SEQ ID NO: 77294 - DNA, 1011 bp, Homo sapiens
acactgagggcaggagcgtgggattctgaagagaatcccaaaaaactatttataatcaactgtctgttgcctagtgggagaaaaggaatcattggtatgaacaactccagttactgtttccacagaaccagcaggctttctggttctttcctgaggcactccgctttacataggaggaaactgagattggaaggtaagtgtatcacctgatgtcacacagccagaaaggaggaagctgggtcactgatgctggctgagcccaaaatgcagaacccacgtgtgtctgtctcattcagccaccatggtggctttgggttgaattttcacaagctcacggtggccacctcatgagcatgcacagagagcagtagatagttaatagggaagtggctgagtagaagttggcctgaaatggaaaatttgctgggaataatttacaggccaagtaatatttgtgaacattcgtgtgaacttaagcttggcatgagctatctatacagaaatctaaaatcggtctaaacgtttgggttgcacttggagccataggccatcgaagagcaatgccgttgtgtcactttggttagggagtgtctggctcagccactacatgtcactcagaggatgccagtgtcagtgatatggggggtagcgctaattggaaaatggaggcttgtcagagtcactgctaactaataaaatcactgggaagtgggtgcagtttttccaagagtgattattgtgggtggcaagtattgagtgaggcgtagagggaataaaatcaaactgtctatacacatgctgctgcagtggaaagaaccctgggctgggagtcctgggagccaggcccggccctacccctgggccattcgtgggaccccaggcaggttactgctccactcaggccctttctccttttctttttagtatgttgtttaaaaaaatagtaataaaaaacattataccaaaagatatatagtgaaaagtacggcattctcttgtcaaggaagtaca

SEQ ID NO: 77295 - DNA, 4615 bp, Homo sapiens
aaagccgcatcctgcaaataagatgagaaaggaggtgtgggcgctgggtggggcgggcactcagatgagattctctgcccactctgtagaattactcttcattgtggctctcagaactcggagcctgtgaaaaccatggtttcagggtgaggggtctctaccctaggctgcatttcctgatggcctttaaccttcccaggcctggaggaaatcatgccccgggaaaatatatgttttaacttaaagatgtaacacaattaaaatgtaaacaccagttctcagctttagccctttactgtgagggtgatgtaataagaaaggccactgacattttggggttgatgaaaatggtaacttttaaaggtaacatgggttttattgaaatataattcacataccaaacaattcacctatttaaagtacaattcagcggttttttttcgcagagttgtgcagccatcagcacaagcagttttagaatattttcatcacccagtgcgggggaaaaaccctgtacccttaagccatcacccgtcctcacaccaaatgatgacttattaaatcaagctggcaagtcgtggcctgcaggaaagtgagcaatgattctcagcactctgattagcaagtggctttccagcaagtgtcacagggctgcgggttggggtctgggggatgccagatgcgggatggggggctgatctcactacttggagtatctcagggggctgcctctccggctgcgtgtcctcaggagtttgtttgtttaacaagtcacttggcccacatagaataagctccacttttttggagaaaaaggaaaaatgtgaattttgaagcattcttttatatctcttttatctgaaaatttcttctttctcactcaaccacttttccaaatgctggtcctgatggatggaacaggctccccttttactttatttcataagtggtttataaccctgaggctgagaaacgatataaatgagggggaaagaagtatcctacaagaaatacccagttaaagaaaagaaaactggagaaaccaagcccccatttcttttttttttttctccaatgcctttttgaagcacctaaaggccaaggaattttgaaatgagaactcgacagtgaaatgtttctcattttcaaacaaagaaacatttcttactcttgggtgttttgtgtgcagaaacacttttttgatatgtcatatttaaaggtgagaatgatccacttggtcagtagatccgtggagcgtcaggaagatggaaagaggaaagggccccgaatgacccacctgcgtatcttttgcatatgtttccaaaaatacaagtctgttcatcatactcgatttttcctttgtttttattcacgttttagcattccttttctgcattaaaaaaatgtatgcagtcctgctgctgccttcaaactagctttgtgatttgaagcttcactttctcatctataaaattcattcagcagcacccactgtgccttctgtagcacttccatccacctgacagtatgtatctttgttacttccaccacacccctagagtcgaaggtctgaggacagggactttcttcttcattcattgtgctatccccagcatatcgaacagtgcttggcatctggtaggttattggttaatatgagttgaaggaaatgaacgcacaggtgcccagtgcaaaaagaaaatttgatgatttctaaggagccctctagcttgaacattttatcatcgtgctgtagcctctctccagaaactgacactgttttgtacgtatctgaagggtaaccggattttcacattccctgatcttaacttttggtatgtttctcttctctgtaatcttaagcaagttaagtatggggaatcttcattcttgtagctataagacaaggtaagtggttttcctttcatcttgtttgaagtgaaattcttatactggtcttatcctgaagggccaatttctttttgtatttcagctttgatattagcatatgcccagaacctataggaaatcagtcaacagacctagaaaaagtctaatagctttgccttttcatactcttcacactttgcaaggttttcatgacagttggtaggtgaactctgagcatatttggccagaggcagattcctgtgtctctttgcttactaaggatacaataggagggcttatagatgacatttgtaggtatggcttagacggggaaatatttgaaggttcctgcattattttgggaacttgcctgaggttgcatttgtattataaggtcaaatttaaaggcagggaaggccgttaccaatatcatgtatgtatgtctaaggaaatattttgtcttttgcagggacttgatttcattttgcttggttttctcaggggtgatttcacctcagttctgtgtaaagaggattcccagatctctagtattaagattgaatgcctatcttgactagttgactaagagttgggtttgggggttggtttgtctgtagctgtttcctctgcaaagccaccttagcatcagtgcaatgagcttttcttgtggagccagggctgaagatagctttctattgttttcattctcctgcgagttggagcttaggggagcccttatgtgaactgatgcatcccggagggagggcttatgtggtttcattggcgggcgcgatgcagacgcagctatgtttagattcttccctctcagttaccaggtgcccattcatgccactccctcacttccataggttgtggaaaatggtgaaaataggattgttgaggtaattttttgaagcactgttattgtggttgacattgatcatttgctacttcaattgtattccatgatgtcaaatttactgtatttacctgtagcagaaggaagataaaccctctcagaaaatgaaagggcagcattattatgtgttcatgaagtcatactgtggcctcattggctatcattgcagtcatcaaggatacattcttcataaaataacacaataaggctgatgtgtggaggtcacgggttgtcacaactgtatctaggttaaaaaatgttgctatccacccagccctccttaaaagaggctatttataatacaatgcgggtgtttgtgctgcttgcatcgggcaggcgcatcctgaatgaagaattagctctttaaaaagaacattaaaaataaaactcatgttgtaaagatctgacagccaaaagagattgtgggctgttgtaaatgcttgcttatttcccaaggttgctgagttacttgctctgggtcatgaaatattttgatctggcaagtaggctttgctttttttaaaaaaatttacatgttctagatatgaatatacctacctacttcctaacaatcacttggcaggccctttggggataggagccccctcctgggagggagggtctgtcttctctcctccctgcgtcggccacactgctgcctcttattccaccaggctctggcttcctgcatgggccattccacttccgtctcccatcagggggcaggactcggggaagaaacttgggcataaagaatgtgtaaattacaccttaataaagctgttaagaaaaaataagcaccccgattaatggactgtgtcaccatcagatgaatattctaagtgatttttaaaaatagctctttcacgagagtgttttggtttggggtgtgtattcttggattgtttttattatttttctgcatagccttgataggaaaatgtagaactctgttatcataatacatgcagtatttagattggatacacttcttgctccccttgcattgatttcctacttttctcctttgccttttcccggtacttaagcattaagtcgcgggcattttcccagtgtaattgttgattaagtgctgcatatcccgtgatgattatgagaagattactgtattcagcttttaatcttgtgagtgtcaaatattttactttagtggtatcgttattattattattattcatagctctttctgtttgagtaatgcaatcaggcaaaataaaggtaatgccacaaattcagcatttttatagtaattctttgtctcagaatggaaagtgccaccttcaggccattctcaaatactgatggagatttatacagataggaatcagaatattttaggcttcttttggttgcaagtaacagaaagcaacaagtttaggaagaaatgcatatatatatatatgagggcagggaatctattggaggaagtactgtgggtctctcaggaccccaaggccaagcatgtataatagctggcggtcatcaagactggaacctggaaggctgccaggaacgcgggcaccactcgtaccttctctctgtcactttctgtgttctctttgttttctctaatgccatgtgcaggatgatcagtggtcaccttgtggcattcaagccaaatatcctccatggaagagaatagctcaggtggcctggctgtctttcagttccagtgcccacttcccaggagcaacagaagttctgtgaatggagtcactgaaagcatgtgacctacctggtcctgacgccttgtccgggggagcagcagcatggagaaaaaacgtg

SEQ ID NO: 77296 - DNA, 1007 bp, Homo sapiens
aggtggcctgtaaatatactgtgtagctctgcaggaatttctagaatgttcctttccactgttggcaagctttagtgagtacagtgtatctgttgtgtccagactctcaagagacttgatttgaatgagcccctgaaatacttattttataccttgtttataattttaaagcaagagctttctttataatttcaacccaggaatgatgtttggcattcaagtagcctggtttgtgcaggcacaggcttgtatacgtggagggtataatgccaggatgcacaaacaagaaattacaaccatttacttgtgtattattttctcaatttgaagcacttgaattccagagctcttaaatcaagaggttgaattcctgacattttaaagtattccacttgaataagctgtttaaaccattagaatggctttaaaaaaattcacctgtttcttggatcatttgctcttgagatttacttaattgaagtttttgccttttcattttacttcaaatcaaaatcatgtctatagcggaggaagttctaattttattcctatgggtaaagtcgatttcatgcctcagactgttccccaccaagtgaaagcaggcagttttccactgcctcacgtagcacagcacacgtaggcatgcacttatcttttcttccagaagaaatccttaaactctgacttttccccccagggcatcatttctgtaaatacagcagcttttacattttcagggtctctggcccatgtcagcttaaagctgaatttgactaaagccagtccctagggaagagagtagacagggatggggagagtattaataatgaagtcacaaaattattctgctgggcattttttataaatcatttgctcctgttggtggaaagtgagacaatactaagatgcaaaagtatggaaggtggaactaaaactgaaatgatcagttcacatatttgtaaactgcgtattttatatcagtcgctggattaggcccctagagacag

SEQ ID NO: 77297 - DNA, 1459 bp, Homo sapiens
ttgaaaagctcacatattaaaagtattaataatccttggctctatagcctggatctggctggtagtttagcaggttattagctgagtaacctttgtcaagttacttaatctctgtttcttcatttgttaaacgggcataagaatcactactttgtagggttgttgtaagaatgaaagatgatcatttaaatggccaagtgtaaaagtggcacctagtagacaatgaatggttgttattcaagacacagttcttccaaagaactatccctgtttcagccaaagcctactgtctgcagttgtagctagtttatcgcaaagcaaatgtctttgaatgctttaaaccttggatttgttatataaggttgagcatgtttgtgtcatttgtcttattgcttgtgctttgaggtcagggaccacatgtaaagacacctttgcatttcccatagcacatcattggtgttctgtaaatatgccaagttatttgtttatagtaatgattttatgaatccaaagcagcatgttgaattattgtacaaagaaaataaatttaaaatggaatatttcataaaggagatggcagttgagtgggatctttatatcgaaggaaaacagacattttaaatttaagtacttgattaggtccatgtactcttaatatttggaggctttttcctatgccagtaaagtaactgaaatccacccacattccacattaaatatcattatatgtaagctatgtaagagttgaatttagttgctcttgattggttaacatatgtttatagacatttaactgagcatttatttcaaatgtgcgaggtgcttttccagtgaattttgtgttttgggctgacccatttgcataggctacagaaagcttggaggcccaagcaccagaattaggggacctggtggatcaaacaactggtaaaggattctaggcagaaggggcagtctgtgagtcaggtcagctgcctagggtgaattccgggacagtacttgcatgggtgtgctgtggctgtaggaggcgtctgagaaatgtaggatatgtgggaagaaggctggaggctagaaaaggaggaaatgccaccttctaaggcaccagtggctcacaagtaggggcattttgttagaaaaaacacaaagcataaatccagcactttcaaatactaatctttttcttcagccatttcttggccaagataattttttccagtcagtgctgtggaactgtattagtctcttctcacactactaataaagacatacccgagactgagtaatttataaagaggattaatggactcacagttccacctggctggggaggcctcacagtcatggcagaaggcaaaggaggagcaaagtcacgtcttaaatggtggcaggcaagagagagagcatgtgcaggggaactcccctttataaaaccatcagatctcatgagacattttcacca

SEQ ID NO: 77298 - DNA, 1056 bp, Homo sapiens
gtggtgaaaactggaaccgaatctccaccttgaggccatgcaaagacgtgctggccctgggcagctctccctggggagctcttgaattcactcttccagaagcttcatgccctagagcgaatgccagatccctgccagaggctcttttccgcgatgccggtgagcactccctgaaaaaggaagtttccaaactcaggctccctccatttttggtcccctccccaggtgcaggctgtttcgcatcaggccttaatgagccctgacaacctggggcaggagggagccatttatagctaaactgtggtggctgcaggctgaccatcatgaggcagcattcttctccctggcacagtccaccaggatcagcaccgaggcaaaacaccagacacttagtgtccttgacaacccccttccaagctctcggagcttgtctcctttctctaaagtgactgcgcttcccactttggttcctgcagtcctgaatctacccaccctttgggacagtacctacccgccatgttgtgcacacactcagttgaaaacgcatgccagttttatatcctatttcacactgtatctgttgtttctctaaagataataatatctttgcatactttaactctttattccaagattttcatataaaatcgaggaataggtaaaatgtcccatttgcattttgagtcctcatatcttcacacacctcttcgagatatttatgtaaaatttcctgattttttttttttttttttttgagatagagtttccctcttgttgcccaggctggagtgcaatggcacgatctcggctcactgcaacctctgcctcccgggttgaagcaattctcctgcctcagcctccagagtagctgggattacaggcatgcaccaccacgcccagctaattttgtatttttagtagagatggggtttcaccatgttggtcaggctggtctcgaactcctgacctcaggtaatccgccctcctcggcctcccaaagtgctgggattacaggtgtgagccactgcacccagccaatttcctgatttttaagta

SEQ ID NO: 77299 - DNA, 2451 bp, Homo sapiens
ttcataaatcatatgtttgcagctgtgtgaccaaaatagacgtccacccagcctgtttgtcctggccttgtggaatgtggcgtgaccgtaggtcctcaaagacatctgtgattcctgcccctgcttccctcagtgccgttcatcaatcatctgtccaagcctaactctcccctctgattgccagtgacatggtcctactgattgattgattgattgatgattgactgattgattgattttcatatgagagagtttgaagcatattgtgtggagagccttttttatgccagttattcattgaaaaactcgattttccccttgaaaatgacaacaggtgtccttgaggggacagggcagtgtgaggagggtggcaggcagggaagggtggtgccagcacactcattctgacccgctggcaccaggcaaccatgagttcttttattagggcatgtcagatgtgcctctggggctggtgtcagacccacctccaccctgccctctagacttactgtgagcctctggcactcatggggaggtgtcttgttccttaggtgccttggtacattgcaaaaaacgaaagtgtgagagccactggaggctggttgtagaagggtaatggcagggtctctgtgcagagtggcactcctgcttcttactcctatgaagaccttttttcttgaggacagtcatgaatggtgtgcccagcggtttctcctggaaggtcagtttgctgaccccaggccttgttagtggtttagttggagtccgcttagaatgtcctgcgtgctgctttgaaaagagccctgggccaggagcaagggccttgggtttaaccttggcaccttttgtatcctcctttcatagccaaacagacatgtgcaatttatagtcaactccctgggcctcagatcctcaccaggagaagagtgttggatgggaccatttcttaagatcccatctagcctctggcattctgggtgtgagggagaagacttttgtcataggactttttgttcttaattgttctcgccattcctagagcctagtactgttgcgtctgacaccgagagaaccaatgcttgttgaatgaatgagtgaatgaatgaatgaacacagaccaacagtaattcatcttcataggcagctggtgcctgatttaaatacagagagccggtttccttgtgtttgactcaagtctacacagttggagatttgggcatcagttgaaatgccgcatttgtgaaaatgagaccggaaagtggcaacgtgggctcatggctggtgttgaaagaagtgttaatgtgtgaatttcttctaaaagacatttcacaatgcactgtgtccttagcgttctcgcccttcatcagaagaaggagtcgctgatgctgaggcctgtgctccctgtgttcagagagagctttatagagtagcccctggcctctgggaacttagcctctaagaatttgcactgcccccaaatgcgccgcacatgggaaatcctcatggggggaataaaaaaagctctgaatcgatacacaagtgtcattaaagcacttagctttcctgcagatctctgctaagtgctgctaagtgcgtcgttagtgggggagtggacaacagaaggcccatggctgggccgcagtggcaaaggtgtggtcagagaaggtggccttgagcactctgggtctgaaaaggtgagtaggactagtatctcttctcaggccccctaggaaggcctcatggaggagacgagtgttcagaggcagaacttggaggtgatcccaccccaccaggcagaggacacagattgatggccccgggagcagagccagcacactggtacacagatgggtttttttattgttggacagagtgattttgaaaatttgaattcattgccactacttaaaaatcaggaaattttacataaatatctggatttctagcttcccttgacatctgggagatggagcatccccgggcatgccttgctacagggcagcaactggctggacctgagcagccacactccgagctgtctgtctggccgtgcagttctgaccactcgctcctttccctgcaccaccccttctccccacctcccttacagacactcagccatttgaactgagtccctggttagggaacaagcttgctgacttctgttggggaaacgttccaggctcaggcaattcaagcagccttgcagaaggcaggatagcatggcgatgatggtggtgatgatgcagctaaaacatggaactttctactatgcgcagagcctcttctgagcactctccttgctttaactcattcatcctacagaaacgtgtgaggaaggggccattatgatcctgctttacagatggggagactgaagtgttaagtttcacaggggcaagtacctgctccatgtcatgttgttagtatgtgacacagctggggtttcca

SEQ ID NO: 77300 - DNA, 1996 bp, Homo sapiens
agacttccactatctgctgttacttgtagagaatcccatagactgacctgatcagttccataaggaccagcattttagaagttctgtctgtggatatgctggttgagagtagattcagaactgaatgtcaggattccagaggttgaatgtgtgtagctgtttttatttcacttaagtctttttgtaatcttaaaacatatttaatatgcagttcagataggcctccagatgttctgtgacaaccaaagctggaaggaaggtttctgtcgggggagttgaccccaaagcctggaagtttctgccgagccctggtctgtactttggtgctcactaccatctgctttagagctgctctgctgtgagaggctgtatgtcaatgactatatttaattaatttgtctaacatatcccgcctagttccaaaaagaatttgcaatggcctacaaaagtgctgtatacctagaggttttattttttatcttattttattttattttttaaaggaagtgcagaaattataagggaaaataaaggcaagaaacccaagataaagttagaggataacattaatatacaaaattaatattgtaaattctaggtattggtttgggagtgggatcagtcatgaatttggctctgagcttcctagtgaccagagcaaagagggaaacatgatcatttgtatggtttaaatgttcagaagattaaaactgactcattacccaagagaaacacagaggtccgtaatactaaaacctgagagatgcttgtcctttagattctcatagaaagagatcatcagtcatacagcaagacgcatccttaataatatgcctggtttcaaaggcagtttcctgtaacatctctctaggcaaagcaatgcaacagagatgtagaagtcaattattcagtgatagttccaggaacattgccttcttgtctctgagtgactgggtctgaggtccggcccagaatctgtagtcttcaaagccaccaggtgattctgttgtatagacaggcttgatgctgtctgctataggcagtgagaaacagataactaagctaggcaagtggccagagctggaaacacagagttggtgagttgttcgtgatcaggggataaccgagcatgtgagaggatgtgagaggtgaagctcagaggaagtgagcctagtaaggaaagagggtgtggacgaatgagcctgataggaccccaaaagaggaaaagacctgggcacattcccaagggagaaccttcatactcgttttaaaccctttcacaaatgtggtttagaagaagctacatagatgggaaaggtatactgtcatgtgaagaagacatttgaaggtaaagcgcattgaatatatctttaattgggaccactgtaactattagttacatttatcttctgaaaaaagctgcttacattttagcaaataagatgtaggtgttttctgggaaaatacattttagaaaataagatgtaggtggtccaggtggtatcacaatgactactatttattaacctggcctgttgtgttccaggcatggagcttggcacatacctgcatgccttcacttgagcctcaccagagatctgtggaggaaaagtggcatcatcatcatcgtcatcatcatcatctccctatcagtgacagtgatttactcagatttgcccattccaagagaattcataaacttggcactctatctgtggttatgaagctttctttcccctttccttttctcctcccttccagggggttgaaataatatagaacatgaaatcagaactgttgtccattgttggtgaactaagggaggtgggaggctgagggtcacttggctcagcctcctcctcagccccctacagaaaagccaggcaaacaccactgctccagggtgttgctgcctctcagagcactggcccaccatgattttgtgatgcatttgtcatggctctagtgcgtgtgtgtgtgtgtgtacactcaagga

SEQ ID NO: 77301 - DNA, 1209 bp, Homo sapiens
cctgtcagttcagtgaaccatttgttatcttcaattaaactgaaagtctccatacatcagccctttgtaaatactgagtggttaatgctgcctcttaggtttccaaatgtcttaagaatgtgttgtaataaaaaaaaattagcatcattttaatattaatactccgacatagattttatcttgagagtgtttctgaaccaaagactctgttagccccatattcaggggcacagggaatctcagatatgtttgtatttgttttcccgaaagagttaagacaatattttctttttttagttaaggttagttacccacatgtcctgattttgactagtttaactcttgaattcttcctctttagcatattttccctgttctagttgatcctttcccctctccaatgtctaataaaaagcttgttttcttggaacaaggtagtttaaatagtatttcctatgtgtctgggatcattatttttgtgatagcagcaaagtgccacagatcacactggcctccagtttgcatatttgtgtgtgtgcagggtctaagttaaatcatagcattttagaacgaggaggtttcttagatacctagctggccccatcctcaatgaatagacaagtaaactgggcccagagtcagggcttgccctgagtcacaggcaaactggtggtaaaacctgccccttctcaggtcagtccagctctcttttccagccatcaaattggaataaactctccttctcttcttcttcttctccttttttttttcttttgagacagggtctctctctgtcacccaggctggagtgcagtgcgcgatctcggctcactgcaacctctgcctcctggattcgagtaattctcttgcctcagccttccgagtagctgggactacaggtgcccaccaccacacctggctaattttgttttgttttgttttgttttttgagacggagtctcgctctgtcgcccagactggagtgcagttgacatgatcttggctcactgcaagctccacctcctgggttcataccattctcctgcctcagcctcccgactagctgggactataggcgcctgtcaccacgcccagctaatttttgtatttttggtagagacggggtttcatcgtgttagccaggatggtctcgatctcctgacctcgtgatccgcccgcctcagcctcccaaagtgctgggattacagg

SEQ ID NO: 77302 - DNA, 6175 bp, Homo sapiens
gattggcaatggggaaaaaatgaagtaacaggttcattctgcacaagcatagtcggggttcatggcatctcaaaggaagtatgttcagtaaatggcagcattagcgtgatctgggggaggtggagcttttggccctccaatgtcaaaaggccacctctccggcacttgctcaggcccagttgaaggggcagtggtcctaactggtttgaactggacaggagcttgccctagtttctgaaaaacaactgttgcgaccattaccgtggtgacctatgaatgttatctgtaaagtagccagtgaaggtcaagttccagcattcagtggcaaggcctcagcttcatggaaaaaggaaaaaaaaaaacaaaacaaaacaaaaagcaagtgaccaaaagcaagcagtacaggcagatccgatcaaattaaccccttggtttcaagaatgcaaactagactaagacatttgcaaagactagtttcagagaccacagggagactgcaagacagccagccatacttgcagtgatacggaactttacaaagtcattgaagggcttgtgctgaacttctccctacctcatggtcaccgcagcatacactggttggcccctctttccgtaggctgtgatttctaatggggcttgatcaggatgatctggtcctgctaatttgacacagttgcagtttggagttagaaccacaggtcttggtgttgatgacgtctgccagtagagatgctcccaacgtcctagttgtggattcatttcccacattttgaggaattttgtgaggatattgtgataagaaacaagaaggctgtgacatgtataaaggtcgattgtgtgctgatcatttgtgtattgtatttctcaggctctgggagacttttgtctctgtgttttgccatgcatggcctggaaaagaaatagttatgaagttttcactttttgcagctgtcatgggcccaagttgcggtggctcacatggacagtatgggttccaggaaccctgtcaggacagctttctcctcccacccctccacttcccatagattccaaatgggaggtgccagcttcttacagaaactccctggccttagtgactggtggagggataggcacgtggcccagtccaggccagaattccaccctaggcttcacatcctggctctgggagctccacagggtgtgctggcctcacgagccctgcacatggaatctgctggggtacgggaaatggcaccagcccagagacgcacagacaggggccactctctccttgccctacctgtggctggatttgatgggctcatcaattctcctttatacttaagccagcttgaattgggtttttcttatgtacagtcgagagtcatgatgaatacagtgtttctaattaacagtgttagttaaactaagtatacagcactggtgatttctgtgtgtcagtgtcatttcagcctctttgttgtcttaagaggcccacttagtggtttgactgtcccttgagagaatagaaggtgagcttggagagttttcagagacagtgacttgatttaaagaaagtaggatcatagtagtaatactcctcacatccacgtatcccccattatagctgcagagacctggcttacatgtaatttcacttacttcttgagaggtaggtggtatcttcctgatcttacagatgaagaaacagaagcttaaagtcgagcatttggctaaaccaagcagcatatatgtatatgtgtaaattaatgtgtagctgtatgtgtgtgtaggtgcatatatgtttaagtgtgatgagcatgtgtgtgtgtatgtgtgtgtatgtattattatgaaggattttcagagtcaggattcaaagccaggtccctcaaatgctaaattcaggtctatagcacaaatgctattttaggcaatccccatttcctccaagttcattgactcacatgtccaaccaatgccatttatagttagatggccttatatagagaagaactgtgttcaccccctgccacggcccccaccgccaacacgcacgcatactctgatcgttttggaaatggaacacattttctcttttaacatctgatcttcccctcactgcattttagattcattgtgaacaattttgagtctcattagaggtgtcttaattttaaaaattaagttgggaactagcaagtgagattgaagaggctatatctttggttctgacctggattttctttactcaattactcttcaaattatactgatttgagatgtgattattattatttttcctaagtagattggataatgagagaaatgcaaaggcatgctagactaatagtgatctgagtttctgctacctcacttgtccttccatttcccctcccccagccagagcaccgccccagcccctgcttcctggtctacctggtgagccacctaacctagcgaaggcagctgcttccctgtctttccagcgtcagcccagctatgaccactgcagcgccagggatcctggccaacttgcgcattgtaatcacgtgatgcagtgctcaccatcctgcagcagtttcccatgttagttcccagcccttccttatatgcctcatttaaatgtaagatttaaattgtaccgtctaccctgagaacccactgtgtagccaccctcatctcctcagggtcaaacctgctcacagtacctttatcagaattgcccctcaactgcttgaaacacatttctttcatctccctgtcttttttcctgtagggaagaagggaagaaggtaaactacctaaaagggagatggtgatgttttctccccgcatcctgcttcatcacttttcccctttgcttttacatacacacgtgtcatgctcaagtgctgtctgtgcattgactcatggctcgtgcctttggtatgagcctcattactgggtgagcttcgccaaatgagcttttggtgttgctgcaaatacaatggcgtctcttttgttttagggcctggagtgacattgtgatggagaagtgcacagttgaccatattgagccggtcaggagggtagatttaagagaggcagcaacagcagcctctcgtataagcagcagagtcttccctgacaccttacttatttcccccaggatctgagctcattcgccatggcaggaaccactaagattgtttggttatcccgttacttctgtcttccagccagactgtaatctccttgaggctggagttttcttatctctatctccagcaccttgcaggttacccagcacacggtaggagatcaatgaaggtttgtaaaatatatccatgtaacttactgttatggactgaattgcatctccaccgcccccccagccgcctccaaaatttatatgttgaagccttcaccaccaccgccccgcatgtgactgaatttggagatagagccgttaaagaggtaattaagatgaaatgaggacataaaggaggagtttttataaggactggtgtctttgtaagaagagataccaggaatgtacatgtactgaggaaaggccacgtgaggacacagtgagaagtcggtcacctgcaagccagggagacagcctcaggagaacccaaacgtgccacctctttgctctttgatgtcggacttctagcctccagaactgtgagaacatcagtttttgttctttaaaccacccagtcttagtattttgttctggcagcctgaactgacttaatatatttaccaactgtcctagcaccttgtatcccaaagctgggactgtaggggtcaactttggctgctaagggcagtttgggaagatcccaaggttggctgcttaagataaatccacagtaatgggcagctgtgtcccaccctgcactcctccttcaccaccagtgaggcaagtctggctaaggctgtttcaggcattcccaccctaccagggaacgtgaatgtcatcatcaactaagattctgggcctcttggaaattgttttaacttgacctacatcaccgtatgccccgagaccttggcagttctgtacacccatgaataatagcaattagcatgaaaagaaagctgaaagagtctcaagtaggacgatctgcagtctggccttggaccttccacttactagctgtgtatacttgcatgtgtaattttacctttttggggtctatgatttgtttttaaaagtggacgtgctgctataatggacagttccttttccctcttttaggcattaaccctggcttgcaggtggagagccctccatccccccagttcattcatctgtgtgcttccaagtgacgtctctaccactagtttaagtcactctcattcctctggctacactggtgtgtctgggtggtcatgtgatagaggctggtctgattacagtgattctcagaccttttccagtgaacactggggaaatgctagattcaaagctgctgtttgtagccccaggggctgccggcagccacctgtgaacagaggagagcctgtccaagcctattttcaccagcagcgttgctgagttgggggacagagagtagggcttggtaaatgccatttgaaaggcatcactgttcctggttttcccagtcacaggcgataaaatctcttcaattcggtttttaaaaatcgctaaagatggaaagattactagctgataaagctattaacacctgccctgtacaccatacaggagctacaggagctttcataatacaatttctaaataagatcatgaaggcaaaggcaaaggttgtgacatacagtttgaacacagggaattattatttggaaaatccaaataataatttggtgactggtgcctcttggactcaatatcatgctctttgaacatctgtgaaaagatgtgtacattcttagcacagtgtcacctggtaaggaatgaatatatggaagctgttgttatcatcagtaagaattattgcagcagtgataggagggggatgtagaagtctttgagaattttgatttgatgatgaagatagctgcatggaatcctacttgagaaggaactgattctgtttcttttggggttaggtggtaccagcatcctcctgatgtggatggcacttgtttgtggaaactgagtagcgtcctcatagccaggttcctgacgatggaaactcatggggagccctttccttgtgagcccaccctgagggtgttcctgctcttcttgggcctgattctcatctgatcaccttggctgtatgttgccccagccaaggacagtatacaaagacaggccaaggttctggttatccttgtgatgtgatatagtttggctgtgtccccaccgaaatcttatcttgaattgtagctctcataattcccatgtgttatgggaagggaccccatgggagataattgaatcatgggggtgatttccccatgctgttctgtcatgttagtgaataagtctcatgagatctgatggttttataagggttttccccttttgcttggctctcttgatttctctctcgtctgctgccatgtaagatgtgtctttcgccttctgctgtgattgtgaggcctcctgagccatgtggaactgtgagcccattaaacctttttctttacaaattacccagtctcgggtatgtctttatcagcagcatgaaaatggactaatacagagtgcaaggtaatgattagggaggacaagaggggggctcctcaggtgccaagagccccctgttagttcatagggtgctgattacatggtaaattttctttctttctttttttttgagatggagtcttactcttgttgcccaggctggaatgcaatggcgtgatctcggctcactgcaacctctacagtatcctgggttcaagcaagattctcctgcctcagcctcccaagtagctgggactgcaggtgcctgccaccatgcctgactgatttttgtattttttagtagagacagggtttcaccatgttgatcaggctggtctcaaactcctgacttcaggcgatccccccacctcggcctcccaaagtgctgggattacaggcgtgaggcaccaccctggcaattacatggtaaattgtttgggaaaattcactgagctgtacacatacaagggctttgctggacatacgttattccaatagaaagtttcaaaactgatt

SEQ ID NO: 77303 - DNA, 1416 bp, Homo sapiens
gaactcctgacctcaggtgatccacccgcctcggcctcccaaagtgttgggattacaggcatgagccactgcacctggcctgcattatttctttgtactagccttatgcatttgatatggttactaccattttgtagatgggagaaacaaggcctgaagcaattgttctgctcgaagtcacagaaacctgaactcacaccagtctttacttcaaaatggcataaatatttctaaacagttttctactttagatatttgggtgttctacagtgttttgcagactagggctgagggagaatcctgttacgtttataagtaatttacaataagacaaaaagatggaaatgaaaactttgtcttctttcatttaagtaattaaggtgcttcattttccctcctcgttcctacacagttcactttatgatttttaaaaactagatagagaaaaaaggaaatcctaaaattagtcattcaaagattaacacagtgagaggaacccacccattctttaatagaatgaatattttattttagtctatgtgaattttatattagtagatagacagatgcagatacaagtaattttacaccaattataattcatgtataggaatctttccttatttaatttttgagcatttaaaaatgtttttctagtctattaaattatatcagttagattataaaatataaagattaaacaaccttggatcacattgcactgcagaacctgcttttatcacagtgctcagtcttaaaatacaattgaaaaagtcattccccttgaaattctgttgaactgtaaatggaagtctagaaatatttttatacaattgccaagagattttaatgaggaagaataactctttagaatatattctgagcgagctgtttgcatgacagtttcagacgtggacttaaaatcatccacctataaactgcaaggggtcaagtttgtgttcctgtttggttcccttgacaaccaaaaggtgtggctcagagtttctggggagtacctgctgcggtgcacgtgacatgggagtgggtgtgtgtgtgtgtgtgcaggtatgtgcacatgcatgagtgaatgtggcccctgccctcaggcctttaccagtgccaagtgtgaactttcagaatgaatctctcctgccatccctctgcccgtctttctccccaggtcccctgttggcctttgtgagtcgtgacacacaggcatagggtaaatgacctcagcttttaagtcaggtatacttgagtccattccacaccttgcttcctaattgccacctgattttggagaagttttctaaccctctttgagctgctatacaatgaaaaaaaatccctcttgcaagattactatgaggattgatgatgatctgtgtagcatccctggcacttagtaggtgctcc

SEQ ID NO: 77304 - DNA, 1660 bp, Homo sapiens
taaatctgaaggagaattcgtacatatctttatctcagacacttttaattcctcataaataggactgcctccttgagaagttcacctagctcacaagtaccaagctgtactcgatactctcaaagtgtatattcacagcaggtgcacatatagctttgtgaaggagcacgggctttagcatcacagttaactggggctgaatccctccctctctgggcaccagctctctgaccttgtgcctcaggtttgattgcctgtaaaatgggcctgcgagatgtgtttctcacaaccccgttttacaatcaaacctgaggcccaaggtctttgtgatctttgtagtcttggtgaagattaaagaactgtgaatgtcagtcactctggtacctgacacctcacaaatgctccatacgaagtcagctttagccttcaatgtttcatgcctcaggtttctgaccattcattctcataggtatattccagttgaaaaaacttccaaaactctccaaacgagcattttcccaaataccttcctttctcatgatttccattttcagtgtcactgtctgatatgaccaggatgtcactaccagactcctgtgtctggccacagcctctggtctggagtcctggcaccccttacctctctgtaagggccaatgaatcccaggttttgtttgaatttgccctgaccctcgcccactcattgctttcccatttggttggagcttgaagcccctgggctctttggcctcttccatctaatctgctccgcaagctgactcttttgtccattttgcaaaggagggcatccacctaatgcataaatctcctgattctcaccctcaggcatacacattaaaaaaaattagcaatggcagaaaaggaaaataagaaaacctctctccattccccccaacacctaagtcctaattgccttctgtcctctttgggcctgcagaggccctctggtttcaaggaggggccctttattcttggcatcatttgtcttattgttctgcactgcattatttgtaaagatatttctgtaactacagtaatagagtcagctagctgcttttgcttacaatcagcggtgaatttacagggctgctggtctgcagctctgatctctcaaggttttatgtggtcagtgagaacatgcagaacacagtcttaagttactttaaaaatacaaggaaatgcaattttaaaagaaggctttggttgattctgatctttgccatctcttgaggttccaaatttgcccaatctccagttaccccccttcttccccagtggctacagcctggtgtggaatctgggaaaataccagtcagatatcctgtattttcctgtctgactttaatttcagctcttcccgctacccgtctatagtaaccattttaaccaaaatccagtgatgcacactgagaaaatggcagttttgtgaacagaaacagagaagtcaggaaatcgagggcctttattaagagcttcctccaggccaggtccctgctggggtgtgtgtgggcttaatctcatgtttcagggtaactgttcagtaggaggtggaaactgaggctggacttcggaagaggggaatcagggcggggaggaagcttatgggcataggttatgggcatagatgagctttgcagga

SEQ ID NO: 77305 - DNA, 1012 bp, Homo sapiens
tgattcataattaaagacattcctcacccctaatctgacccttcatctggtctctgatggtttcatcccaaaatgacataggcacctctgctcttggtagcttcatgccttctgctgaaagttgccacaagccatgctgattttatatcctacttctgccctcttggtcttggtaggccctgttggcctcagagctccccacggagttttgttcagagaggagctactgcctgaccattttggcctgcttttatttctagctcttcctccaagcaggcattccctgggcctaccctccccaccccacctgcaagcatttcttgatggtacatctctgtgtgtccagtcctgggttaggctggagatccccaggggaagtccaggtcccaccctctcaaccaggtcccaccctctcaaccactcacagcccgttctgtggtcagaccacgagtcctagcccttcttggaaaaggctgcttggcccacccactctaagaagcccagccactctcagcacagatgaaaccactggttttacaaacctttccagtgactcacttgacacccttatacccttctggtcattcttccctcttccttttctccgtcactatagtattgggcctctaattattatcaactctgtgtccctaggatgcggtggtagaattaaaataaattatctaacatattttatttccattcacttctgttggttgttgttattgttgctgttgttgagacggagtcttgctcttgtcgcccaggctggtgtgcaagtggtgtgatcttggctcactgcaacctctgcctcccgggttcaagtgattcttctgcctcagccttccaagtagctgggattacaggcatccactaccccactcagctaatttttacgtatttttagtagagatggggatttgctgtgttggccaggctggtctcgaacttttgatctcatgtgatccatctgccttggcctcccaaagtgctgggattacatgcttaagcc

SEQ ID NO: 77306 - DNA, 1108 bp, Homo sapiens
ctgatttataggccacgcaattgcatactgtgattttaatagcctgtgaaattgggaaatcaagcgtttctttgtatttttgcttcgtacaggtgaaatgtagtcaggcaagtttggttaaacctaattttaataatcatcgtagatatcctaaatgtttaagaaaacaaaaggaagtccctccactctcaaaaattaacacataatttaaaaaaatctattctgttttcccttcagatagtagaagtggaaactgattaggatcagcctttgggttcttttcaagtgagtttcaaagttatgtgcgtcatttttcctctagaactatagcagtgatatgaatatcattcaggtttggattattttgagaaaagagattttgttttcttagagccttttctcacgatttttattcattcactttggcattaggtaagttctttttgttcgtttctgtggggcaaaaacatgagggaaatattaatattgataaggtttctgaagttgagagatgtcagtatgagattatcctgcgggtgtagacttcttttctcttcctgatagggttacaaattcccccagttgctctaggaactgtgaattaaactagtacagatttcagatgcttattgaatccacatccagttaaatgcaacccattaaaattttgtacatttgaaaatcagaagaatcttgatgagagcttgggagggtgggcagagatttgttaacattcatttttttttctgtgatgtttcttcattccctagagttctggagacacttttgttgtgataatatttttttggaatatgtgggtattcttcctaattaatatttttgtgtcctttggtgggtggttctgggccatgggaaagttgctaaggcccacaagcaagattttacgaataaagatatgagtacctaaagaagggactgtccagtcatgccaggggaaggtttgggttagaatcaagtagaagaaaaatgtgcctgtttaatgccactctctcaggtttttgatttctcactttctgttttcaaaaatgtacgcacatccctcgtttttccctatagcaagtggaagaaaatttttctagataatcag

SEQ ID NO: 77307 - DNA, 1211 bp, Homo sapiens
atatccttaagttatacgctatgccgttaaaccatgtgaatttgccattttgtgtatctgtcggtcattccagtgcccaggtgtgagcagggtcaagatgataagcagaatactcacacagataggttctgcactgtgaaatatgaagcctgtttacaataaagcagacctcatggttttcgaggatgcattttcaaagggtgtcagtaatgcatacttggggaaatgttttgagggaagtgtgggaaggggttgcaggtgtgtgagtgcagatgaacttggccttatgctagtttcttttctctttcagcacatcaggtccacccatctggccgggcagtaccttcttcaagagaaatggagcccttctccaaggtaggtccctagtaacaccccttcctctccctccccctcacccacccgcctttcatcactcctttgtgcttggtgtcaaataggacagttctgtcccgtttaggagtggccgctttctggagaagtgtgactgttgtgggtggggactatttgtccagttctctttatttgttcctactcaagcttctcggtcgctgtgaatcatgagtctgaaaccaggcctctaaggactgcttctttggcccgccgtcactgttcatattctggaagtgttcggcttgctttggtgatgttggaattacatggtaattagaatgcgacagaaacataaactaggctgataaaagcaaacccctttacatgtttcaaaaacttgagctgaaaaaggagggtttggttattctggcacttgtatcatcatggaggtgcatgcatttcttactgttgcccaacatctacatgtacctggaaggttggccgtggtttgttctgaggttcggagtccagtcaccctacattggtccccacaagtgtcacctacaggggacacccttgctgttgtccagctcaactcagctgccttgtcctagtccctaggcggtgtgctcatggaattccaatgacctttcacctctacttttgccattaagttccttttgaaatggccaaagttaaggaggaataaatgatttaaaaaatagcaaagaggttcatttttaatccttttagaaattactttggggttatcgctattttggatatctgttctgtaaataaaatggaattgagtggttcccggggccttcgagctttctatccctcctacttctgttgat

SEQ ID NO: 77308 - DNA, 2015 bp, Homo sapiens
gcaggagctcttgagcctaggagttcaagagcagcctgggaaacatagcaagacccagtctctacaaaaaaaaaaaaaaaaaatgcaaaaattagccaggcatggtggcatgtacctgtagtcccagctactcaggaggctgaggtgggagtattgcttgagcctgcaagtttgaggctgcagtgagctgcgattgtgccactgcactccagcctgggtgacagagtgacagagtgagaccctgcctcaaaaaaaaggaaaaaaaaaatccttagtgtttgagataattctgtgtaggaggtgcaggtagcattcccgctgtttttcagaatcacttagaataatgacaaccatcttccgtgtgctgtgaacctggccaggttctaagagaggagtcactgttagcctctgctcacgtgacgtctgccaaggtaaggtgagacacacatacctgtgggttaaaggtataaggcgttagaatgggaagacactgcagagtgcaattaattcccagatgagctgcacagaaggtatttgccagaaggattcagaggagggagaggttgtagggtgagagtgaccagataaggtgtcctgggtacctgggattcgagttgaacattaaaggatgaataggctgtaacaggtgaagagaacatgggtctagggcatttcatgcagcggagggagagattgggctgggatgggcccaaaaagcctcctgggtgcaggtgttctggagacctgtgccaggcggcatattgaaagcaggaaggacatgctgggaaggaacaggagggcttctgaggggtaccagcaccgattggctctcaccctgccctgtaagcatttgttacaggaaaggggtcccgatcctgactccaagaggaggctcttggatctcaaacaagaaagaattcagggcgattccatagagtaaagtgaaagcaacttgattaataaagtaaaggaacaaaatgatggctacttcatatatagagcagtccggagggctgctggctgcccatttttatggttatttcttgatgatatgctaaacaaggggtggattattcatgcctcccctttttagaccatatagggtaacttcctgatgttggcatggcatttgtaaactgtcatggtgctgtgggagtgtagcagtgaggaccaccagaggtcactctcattgccatcttggttcggtgggtttcagctggctttaatgcaatctgttttatccgcaaggtctttgtgacctgcatcttgtgccgacctcctgtctcatcctgtgacttagaatgccttcaccatctgggtaggcagcccagtaggtctcagcctcattttacccagcccctattcatgatggagttgctgtggttcagacgcctctggcacattcacacttctgtagccaccaaactcttcgaatgaagacgcacatggagagtcggtgtatgagacacatgaaaaatgagaggctttgttgacattgggcagctctggtgataccattcccccacccctgatagcactctgggcacctctccacgttggcaagccctggggactgtgcctgaagatattgtgctttgagaatgctgctgaggtgtcaggcagggcggcctgctgtggggagagaggctggagacagggaggcctattaggattcaggagaggacatcttaacttgagctgaccccaggcctgggagtagaaacagaaaggaaaggaaagtgcaggagcccttgggaagaacgggtgggccccaatggggactggaggcagggacgtagctgaggaaggtgtcagagcctccagaattttgaactagagcatttgccaggtgattaccaaaggctgggtccgttgttttcttctgttttgttctttgcggaatgctgaattaaaggataaactttacttccctcaacagacatttgtggcagccaggttccaagcacagcagtaggtattagggattcaggaaaagacagccacaggtgtcttgg

SEQ ID NO: 77309 - DNA, 1052 bp, Homo sapiens
agcaccccctgttgtctaagttctcttttctatatgatctttgccgcctctcctgcccccacctccaccatagtcagaaatctcacatctcaacaaacatctctctcctgtcttcaccgcggttctgctcacagccactttccccttcaaactggacattttggattttccctgctaaccttaccgccccttcccgccccttcccgggctccagctcagcaggaagaaatgtcgtcagcagaggctgcaaacccaagcctgtcccttttcagtggtatttttactacgagctgaactacttcagcatcatgtaaacacgctggagtgtgttcacagctgcctctcttttaaagttgaaccagctcagaactaaaaggggaactgctttcaggttctgttcaagtttgcatgtgacagcatcaaagctatttttagcagagtgatcaccggcaagaagctggaaacggctgccttcaactatcaacagtggaaagaaaggatcatttatggactgctgcagctcttgagtccatttatatgggagacacaggggtgtgtaaatctcttcttcaaagttacaaggcgtcttgtcccccatcacctttgcagagacagggcagtgttaatttagtgcttggttgcctgggctccaagttaaagtagatacactgataatagtgaattataggactgtcctcaatgtctgttctgagaagaaggcgatgtatagatgctcagaaacatccattaaacttttgaagtgtttgtattgtttcttcagttttccttttcttttctgtagatcaccaaactcaagagacagcaggaaacgggaggtagttatgtaagcatcatggcaatgaagagagcatgagtcacttactagccatgcgaccctcattaagtgacttttcctttctgaattaagtgttcttagctgcaaaatgaggatcataataccagccctatatactttatagggctagttttttttttgttttttttttttagcagatgtttattgaacacctactccatgccagctcctgggg

SEQ ID NO: 77310 - DNA, 1015 bp, Homo sapiens
gtgagccactgctcccggcctaatttttcattttgatgttattttcatgctcttcttccaaaaatgcaaatactgacaaaacttgaagatctttgttcttttctttatgtcggtgcagagtgtacaaaagttacctatatcgggcacacattgaaatttgcattagcagagactgctataggatttacttatgagtgattctgaaaggttaagaatggcactttttctaagctttggttgaggttgggattgggaaggatggttcctctcaccatggttatgcaaaaactatgggttgtaataggatgcaaacacgtgtctcccaagaataagcagaggtgcaggctgccaacgagctttaagaaatactgtggctcggtaaatggagaaccgaagggagagagggtagcaaaagcaaagagacctttggtgtttccgactttcacgagagcctgtccaaattttcatctgcatcagcacttttctagcaaagttcaccggccatccagcattatctggtgggcggccttatttacacacatatatataattgattccatattcctctcagacctacaaacagtacccatgtttgtttttaataaccagaattatttcagcttaaaaaaaggtgtagatttacatagacagtctgatgagtgcctcagattgttccattagtaacacagaggagaaacaatcttaagaaaaacattttgaatttgtgtgtggaggtggagagaggattgggttagtgaaatcagaaagcttccaagtaatgattattacatttaataataattagattagcgttccacagggactgttttctggaaattttggtaggacagtcactgagtaacacacacactcagagcaacctaggtttcaggccattgggtgggacatggcctatttgctttgttttggtcgcgtttaaagttaatccaaaatcaatttctttttcaagattaaaatgtcactactctgtcttccacttcaggcttctgcaaac

SEQ ID NO: 77311 - DNA, 1008 bp, Homo sapiens
gcagtcttgtcagttcatatggatacacagtactctttttttactatgtgtgcaatgtccccttgtatggattcatctgtttgtggctggacattttggttgttttccatttctttatgttatgcctcagtaaacatgcagagacttagacctttgcacccttgcctggtaataaaaatcctaacagttgggtcttaggctggattctctagaagcagaatctgagacagggacttggttgtgagtgatttgctgagggactgttctagagttgtcctctttgggacaaagcgacagggcttttgtactatcagtcatttatcttgtaatcccaggcctcttgagaccttcagcgaaaaggatttctgtagaaggtggtggttgtgagcttacagggcagtcggtagtgggggcagcctctaacacagaggatatgggttgaggtatcactgcgagtgctcataacctctgtggtcctgtctttaggcctggtgctatgctaagtacataaatgcagttctaacagtccaatgttgtaggggctagtagtatatatctactctacaagtaactttcccagggtctaccagctagcaaggtgtggtgggattgtaagacacactcaggtctgtccagtattaaagcccgagtccttttattggtgggctgtagaatgtaaagtttaattcctagaagctgaatttatggaccaaggagatagacatatttatcccagtttctttccctaccccttctccaagttatatcaacttagatgtcctgtgatattatatttgactgttctcctgtcatccctgggtcttgtcagttttttaagtatctgctaatccaattgatagagatttttttttggcttgattttccttacttttacaattgctgaggctgacacccttgcccgtgtggattggccagctgtattcttctcttaaggcccagtttttagtccgagggccttggcttctttttttttttttttttgagacc

SEQ ID NO: 77312 - DNA, 1010 bp, Homo sapiens
atgggcactcagtcccacaggagccaccaggagaatatggctggatcagcacaaatctgatgttaatgctagaaaaggaactcagagctggtatgcaatatagcccacgcagatctttcggcagagtgacatctaaaattccctgcagttttctcagcctgccctgagtctgagctgcatattcattctgttcgacagcaattctggggtctgcctgttctttgttcctctaaccgtgctgtggacaacattctgaggacagcaaagccatggaggagagttcggggaagggggagaatcaaagacatgcctacgagactggacacccagattcgttagttgggtttgctgcccttgcctttgatctcctgtgcaagtggaagggtgagctgatggactattgacgcctggcttcatcctcgttgtaacgatcttattttcactgtatatcctttcagggttatgccgacgttaaagattttatttagcaattatttgtgctatctcatcaagatattgctgtgtgatgctgcaccaagagacaataattcaggaaatgattttaagatcagaaaggtgtttggatttagagtctagaatgagtaggagaaggaataaaaaggatcgatggtctttgtgccctagaatgatgctgggccctgggcatcaaagacacatttatcacccccttctctttgtttgtctgagccaggtgatatggagggggctgatctggtatcaaagaacatctatcaagtgcatttaggaaaataattcaaggagatgactaggctttctgagacatgattactggggaggtgacctttattgcaagccgtgaagagtaattaaatttgagcaagaaagaaatttccattcttttaggctgagtttatgagagtgtctcagattaagcaaattcaactgtcttggtcactgaaaatctcttactctgttgggatttttgaaggttctcggttagctaacatcaacatcattgagaaagatgg

SEQ ID NO: 77313 - DNA, 1055 bp, Homo sapiens
gtgtgcttctaagagacagtcgtataagtgaagtcttcctgcgggaccctacactttacccctgctgaaatttgcctttccctcaggtgacattttgagctgcttaacaggaaacaggcactttcagaagtacaatgactgtctaatgatttctgagtgattccctccagggtgtctagatttcttcctggctctcagaggtagaaggaactctcagaggacatttacctgtcagctccagcactaacacccagaactcttgccttctaaaacatcgcaggaagtggggtggctgttcctgaagctggcatcactgagctggtaggaagagttaccttgagtgagctgctgttgaatgtaaaacagctgtgccatgtgcagatgatttcatcctatgagcttcctcactcactgtcagaggccaggctttataaagtattgtcaattgcttttactgttttacttattttttgtttttttgcattaggtacccactaaagtcacctgtcaaactacatcttgaagccaattgcagtcttgaaatcctgctttgtggtgcaggttctactgcatagaatgttatatgagttagctcctgctgctgatcaaacacctcaaattaatggcttaaaagaatcatcattggtggccgggtgtggtggctcactcctgtaatcccagcactttgggaggccaaggctggcagatcacctgaggtcaggagttcaaaaccagcttggccaacatggcgaaaccccgtctctactaaaaatacaaaaagtagccaggcgtggtgataggcccctgtaatctagctactcgggaggctgaggcaggagaatcacttgaacctgggaggtggaggttgcagtgagccaagatcgcaccattgcactccagcctgggtgacagagcaagactccatctcaaaaaaaaaaaaaattcatcataggctgggcgcagtggctcatgcctgtaatcccagcactttgggaggctgaggtgagaggatcacttgagcccaggagttcgagaccagtctgggcaacataatg

SEQ ID NO: 77314 - DNA, 1189 bp, Homo sapiens
aaccttttgtttgaacttctattattaaaaatacattccaaatcaatgggtctgttttctgccaatagatagaatacgctgaatgaatacttgatgtgttggaggacactgaattttgcccttcagtgttcactgtgtaattatgttgatgtaaaatacgtgcccacccttgggaggctgcaagagatgatgattttgaataaattccatatatgagcctctgactttcccctttttcttaaaaatgaagtactgtaacctctatcttccccttcccggctgcccgcaaatgttttttatttgaagttgggggctagttaggtttcagttaattaaagttttaattgtgtttgattctgcagcagatctgatgtttacctgtcttagtaatgaaatgcaaagcgtcatccttgagcttccgctcttactggatggcaagggaagtaccagcaacctcgagacctattagccctggttggtgatttgtaatatgttgtttatttttgatgttatattcaaatatgagaaaagtattgactcaagtttaatcatctgaacattactcaaggattactatcttgtataaaatctgagcacttggatgttgcgtgtaagacatcccatgtataaaatggagctacatcatttcctccagtgcagaagattgaacatagcaagtctgagggttctctccttagaaagttctgcttgcaaggttagcccttggttggtgtctgcaaatttggatttcaggagggttctcagcactcccagacctagaagtggggctcctggtgcctgcatcgtttgtggaaacactgtggttggtggaagaagtctgacattttggtgtgctctaggcatagggtgtctacctgaagagtccccagtaaaaatcttgggcactgaggctctgaggctcttcccttgcaaacagcacttcatgtgtgctggcaggatgtgtagctggggaagcaagtgcattctgtgtgactttcctgggtgggggcttgcatctgggttcctctggacttcacccccatgcaccttttccctctgctatttgtgcttcatatccttttgctgaaataaatcatagccatgagcatgactgtacgctgtgtcctgtgagtcctcctagtgactcactgggggtggtcttggtgacccctcacataccttccaaagc

SEQ ID NO: 77315 - DNA, 1022 bp, Homo sapiens
cttgtgtggcccaagcatattgtctgtcctggcatttacactttaaaggcatctcttctcagtagactccaagttgtgtgagggcaggagcccgtatcctctcttgttccccttcatgcccccaactttaccttagcacctggcttcataaccatctactgatagatgaatgaagccatttaattgtatgggtagaaccacacaaaatatgttggaagcaagtctcacttctctggaattaaatgtttctttggcactacgagatcttactgttcaagctgtgagatttaaagggaaaatgcttcctgctaattattaacagttgccctgtaagagcagagccattatggggtcccgaaccctggcatgctgcccctcccagcagtgagcaacggcagcaagccgggaggaactttaaggcaactgtggccctggcacccacggacctcagattacccaaagagggttgcagtatcagggccagtggagtagggagtgggtaaaaggatttgaaatgagattataggacctaaaagattcttgcttttgttcaggaaataatttaccggttttctttaaggcagtgagacaatccagttgagggtctggagtggtagatcattgccgtgggcctcttcagatacttaaaaataagttgatctgtagttgtgtttgttgggcttcttgtttgtttttttatttaaaaaaaaaaaaggaaagaagaaagacaggaatggaaagaaaaagaaactcagttgtcaagtactctaaacaaacaaaattgaatgcaagatctattaagagaatacaaagacaacctcttttgaaagaacgtctttggccagtgtgtcttcaagccaaagtctagaaagtgaatgggaagtgtgatcagaatacaacttcttaatttttattttattttatttttttgagacagaatctcactctgtcacccatgctggagtgcagtggctcaatctcggctcactgcaaactctgccgcccaggttcaagcaattgtc

SEQ ID NO: 77316 - DNA, 1034 bp, Homo sapiens
attttctctttaagtgaaaatgtccccccacctccctgaatgtattaataatttctattccgtaatggtgctaatttaacccatcaaaaacaatagttacagaaaactttgcagatttctttgatgcccattggagaaatcactttagctaatgggcgtgttgcttggctattactgatattcggcaaagctgggaattggactatatgtttaattattttggtggatacttttcattcttgaatggctcacagacatcacatggtggtggcttagatgttgtctatatgatgtctgttgcaggttgcaacttaagctgtatctgaggagttgcccagggcaccacaaggaaactgaagcacaaaggcaccacgctagaggtccctgcctctaatgagtctctaaaacacatccaaggttacagtgctagtaaatgacagagccaaaacttggacccagcagcatggttccagtatctacacttcaccaccacccccaattgcctttgctctctgtcaggaactggccccctctgctacccactgtgcctgctcctttagatcgatgttgtcactgccatgggtcctctccgttttttgtttgtttgtttgtttgttttgcgatggagtctcattctgttgcccaggctggagtgcagtggcgtgatcttggctcactgcaacctctgcctcctgggttcaagcaattctcctgcctcagcctcctgagtagctgggattacaggcgtgtgccaccacgcccagctaatttttgtatttttagtagagacggggtttcaccatgttggtcaggctggtctcaaactcctgacctcgtgatccacccaccttggcctcccaaagtgctgggattacaggcgtgaaccactgtgcccagccgggtcctcttcttctttgggacctctccttctttgggtctttgctcaggtgtcaccttctcaaagacacctaccctaaccaccccttcaaaatactcgtgccccactgtcattctttctttctttctttctttct

SEQ ID NO: 77317 - DNA, 1224 bp, Homo sapiens
atccagggctgctggtgggaatgtctcttcccccattcatccagggctgctgttgggaatgtctctttgcccattcatccagggctgctggtgggaatgtctcttcgcccattcatctagggctgctggaactcctgtgtgccatgctttgtgcgggttacttgggatccttgatgactgagccaggtttcctgtcatcagagcgtacacctccagttagaaagatggacttgtaaacaaatctaatgtaacatgagacttgctttcggtcatctgtacaaaagtgctgtagtttaacgatcctggctgttttgaagctcttcccaagtattgaagtactgaaacacagtggtgacattttggaaggcattagcctgtggtctgggagaatgctatttgggagtctgaaaacctgggtttttagtgttgacactggccctgattagctgtgtgctaattcctgtaaacctgagtcacttcatcttaatggacttccctccctaggtttataaaatgaggtggttgggctagatcatctctaacgttccttctgattctggtagcctctgcttattataatgtttaaagactggaaacttcgagattagccagcctttgtgaggaggatttattgtaagtttttaaagtggcttccctgctcatttgtgcctttggggagacttgggcaactctggtatggtcagaagcctagcaacactttgaggccccatctgaggggtaaactagtagtctgaaagactaaacagatgtcttgccctgaagttccagaagaaagataccatctgtaaatagcctcatcaactttcatagggcttttggcgggtagaggtgccttttaccattatccttctgtccacttgtggatttgtataaatccattaggttaaaattatccattccttttgctcttgaagctgtaggtcagtttcctgcccagtttaaaccttgtcgcatacttgtcacttttaaattctgtaagcaccatcctcagcattccagggctggtaaccccaaagatggcagcagccaagctcctagcaaggggcacccagtcagggataagatctgtagtcgttaagcacatcatataataatggtagataaatatttggagcattcttctctccttagtgtacttcttcatatttcagttgctttgtatataaatctcaccttttctaaggaaacattatatgatctctc

SEQ ID NO: 77318 - DNA, 1474 bp, Homo sapiens
attccttcagcctaccccttggtgggcccaggtcctgaggattctgaggcaaacaggacaggctccctggccttaggaatccatggaaccgactgtggccaagtgtggccttgattctggaatccctggcaggtgatgactgctggcatttccacaggtgatgcattttacagcagcgagtgatgcttagccaatgacctttcatgtgctaatagctctgatttttccaattgcagcatttggataaacccacaatttgcttttggaatgccaaggaaaaacatcgtttatggtttttcttttggtctcacccctttcatcagttggtctttagccttaacccataaacaaatagccttttctctctttactcttccctctttctttgcaagacctccaggctccctgcaaatggcaattcaagcgacatgctcctacccacaagttacagtgattcacgctggctccattctgtactcttgcttcacatgtttggatatgagagtcagaagactcggggtgagccagaaatgaggtcaggggcagctgggtagcagaagcgggatgtctgtttctttcttgtagctgacttaagatttttgatactcccagtgcagggcaatttctgcccgtacaagctgtggcagataggagtctaccgctggctctatttgagggcattggagatttcttactacctggcaggcacccctgtgcttctagcccctccactgttattgacaaacaggtttgtgcttccagccaccctgtcagaatctctgcagccctcaagtcagcagcagcattaaaggaaacctggaggatgtctctctaactccaccagtgaaaatagttaactgggcttactgggagctaagaaaatagtttatttttatgttacattgaactttaccacaaatggcgggggagcagggatggctggcacacatcatgataatgatcttgaaaccgttagcatagtctgtgagttttaggtccacccagggtttttccgccttggtactattgacatttggggccagataattcttttttttttttttttttttttttttttttttgagactgagtctcgctctgtcgcccaggctggagtgcagtggcacgatctcggctcactgcaagctccgcctcccgggttcacagcattctcctgcctcatcctccctagtagctgggacaggtgcccgccaccacacccggctaatttgttttgtatttttagtagagacagggtttcaccatgttaggcaggatggtctcgaactcctgaccttgtgatccgcccgcctcggcctcccaaagtgctgggattacaggcttgagccaccgcgtccggcaggggccagagaattgtttattgtgagaggctgtcctgtgccttgtaggatgtctggaaacatccttggcctctacccaccaggtaccagtagcacccccacccaccaccaag

SEQ ID NO: 77319 - DNA, 1042 bp, Homo sapiens
tttaatggattgttcttgagaaaggaaggattggacatacggtgactccaatggaattttattcttattaaagccctttgaagttccctctttctaacaccaccctttcttaccctcaccccttagatgtggcatgttccatcatcagagttgttgaagttaaagttataggaaaaccaacctgaatttctctaatacaactctttgatgtagagtaaaacaaaaatctatttccatccgatattctaggcttctaagaaatgaactatgaaagtaagctgtttagcactataggactgtaaagaattttaaatttattttattccatctgctttggactccaaaccattctggattttgattgagaggcagaaaaccaagcatttattgggcacctactgtgtgtcagacttggtatacagacagcatgtgagaggctatcacgtgcctataaagagcaggtcacacagcttgcagatggctgagctgggacctgagccggcctcatctgactgttctgaccccatagcctgagttcttctcaaggtaatttgccaccttgtggtcactgtcttctgcagaaacattcttcgatgagctttggaaaggaagaatgacatatcacttgttaaaaaggaatttagggtttgtagcatagtgagagtaagagagatgggaggtgagagttcctgccattggaaactggcaatggtgaggaaacaatgacaattagagggagagccatggaaattgatgggggaggcgtggggaggaagcagagaggattctgtgtggatggatgaatggatggatggatggatggatggatggatggaggcaccgttaggagaatggggaaggggtgactaaggattatgaatgtgtgtgtgtgtgtgtgtgtgtgtgtgtgtgtgtaaggatcacttctgttttagacaaaatcgaaaagcgaatgtagggtggggagaatcacacaatattttagggattatttatacgtttgtttaataagaaaaaaagagagtcaaacctcaccatatta

SEQ ID NO: 77320 - DNA, 1472 bp, Homo sapiens
aggagaaattgatcctcatgttagaaataggaaaactgtcaaaagtgcatgaaatcaaccgtgtacaacgtgaaacaacaggcggcactttgtcttgtagaagcttaaaaatagcacatttttcatcaataatagaaaataaaaacctgttagcacatctaagatggtctcatagaatatttttgatctcagcattttgtcttctccaagttctggtcacactaaatacttgcaaattttctagattaacaaaggagggagattaagaagtagaggtgcagtataattagatgggaagtggaacccatcattcataaaagatttgaagaacatagaatgggggattgataaggaaagcgatcaggttggcaggggcatccatgtgttactgttgaagaacagggaatgtgtaacccgggaagagcaccttcagaaggttagcatgccagccatcctcaccatcagagaggacagatttggacttgatggatcgaagttatagaaagaaggatttggggtcaagacagaacagcatctgacagtgtgccaggcacataacagaagctgggtaaatgctagagttgttgggtgggtggacagatgaaggggatgaaggtagaatgagctacccccagggatgccagtcgaggctagacaaccagctgccagggtcgtcccaagatttaactcttactggagaactgcagggttatcgcttccagctcttgagatgttgtttctgagtttcttgggctgccatgacagtcgaggcatatccctctgcaacatggtgtttgtagtttataaggtggaaatgaaacttgagggaatagatgcatagctttgttagccagcaatgagaggtcaggctcttctcttgaaattaagtgcagatttcaagaccgtgatgggactaattcagttactcttcgttctgtgtcatccagctttttgattcatgccctacaattacctcccttgttttagtgacacttctttgcatttccttccgtgtgaataaaatgatcacggcagtgttttgccaagcagaagatcatttccaaaagctgtccatcaaatcatcccaacctcccccctattgtttatccactgaattgatgagaataacacccaccctttgcataaatctccatggaagagccaaactggtgtccttgttttgtggaagcacatgttcttggccagagtctctgatcacattcataaccttttgtttttcttacataaggttcgtgttgcattatttgtcaaagcatctctgagactctgccatggatgtgagaggtacggaaagagcgtgggaagcatcagagattccacattaattcctaacttttgctgatttttaaatcatctggagaaaacctccataaaccattgagacacattaaaaaaaatccttatcttctcaaattgagttgcttaatcaccatagtccaagttgagacatg

SEQ ID NO: 77321 - DNA, 1024 bp, Homo sapiens
aaccaaccaaaataaagtttcttttactctcatcttttttttttttttggaataaattccagacatttaagcttctccttttagctgtttctgtttgcttcctcagaggaatttaacgagccgcaaaaaagaaaaaaaaaaaaaaccacacacattaatggcctctccaaagattttggcctttctgatattgaggttcttaatgaaaatggcagattttagtgctgactcagcaagttctattatcctgcctgctgccctattgatgtccttttttttttttaatttaaatgtcttcatagagtaatactgctaagggtatagaaattgtacagagtggtcactgtatattcaaattaacaaagttatcagtcattgttcaccaggtaaataatctttggctgtcatagtgaggctgggaatagtagataggggaattgcattgggaggaggtggggaaggtactgaggtgtttagggaactcatccttttagacaattagaagattagaaaatccttaaaatgttaatcttgttaacataacggtgttaattcctccactcagaatgctgaatttgcacacagcaaggaatagcttattcattgcttggataggatccaataattttttaatttataagacatctttcattctagttattcagagtgttgtgcgtttaatagttggcagaagcactgcaaagccacaatgaaatcagttttaacttacattgaaggactttaattgttagattgtggtgtcattgcaagtgttaattcagtcaagcataaagaaagattgcaaggatttcgattagttgcttcattattacaaatatatttacttgaaagcaacatatttgatggaaacccgaaatagttttttaaatgcccctcatattcaatacacttatttggataagtttaatttaaaagcgtgaggcattatgcattttgaaagattatgtttaaacagcactttttgctgggagtaatttttgaaagaatattaaatttaaaaaaa

SEQ ID NO: 77322 - DNA, 1053 bp, Homo sapiens
gaaggaggggtggtgtgtttgggttgcttgcccgtacctcttcggaaaagtccactgagctgttctaatctttatgttgcctgtgcccctccttcctagatacgtcatttctcattaaagaatatgcgtattttaatgtttccagtagacattgccaaattgccttctgattttacactcggttctagtccacattcccaccaactttttaggaaatttctatttttctaacctttctcaatgtctgacagttaaatgaaaagacagttcctcaatgggtgaccttgactttgtgattttggtacttatagtgggggtatttaaacttcgtaacactacattaacaccctataaacagcagctctccccataataatgtttatgacaacagattgtttttagagagtgacatatatatgggtcttatgtaataccttctctgctataggcaccaatccaaagtcagtttccagaaaaacattttaatcctctctcaccatggttggagaacaggttttgcatttaatcaaacagtatggtttatggagagtttcctggatgattggttttcagagccagcgttgttttgtgtttccttggtaattccaaagaaatcccagcatcctacgtacctttggcctccatgatggattgaccatgattgggtgttagatggtcagaaactgagtgagatggtttttttttttttttctttaatgagctttccctttttttgctttaaaattttcaatgtaaaaataatgacatcatagtctatatttcatgtaaagtattgtggcttaacatgtacaaagttagaaaaatccacaagactcatttgctgatctaggtctaaagatttattttttggatgactataaaatttgcagagttagaacatttcaagaaagtttctcggctcgatgcggtggctcacgcctgtaatcccagcactttgggaggccaaggtgggtggatcacttgaggtcaggagttcaagaccagcctggccaacgtggtgaaaccccatctctaccaaaaaatacaaaaatt

SEQ ID NO: 77323 - DNA, 1074 bp, Homo sapiens
ggaaacacagtaattatttaataattcgaaggattatagaggagctctgggggttggaacaggaatgcatattcaggcgagaggcattctgagctggccttagcttaatgacttcatttgatttttaatatagacataaaaatgcagatgaaccagagcttttgtaatgaaaatcatttccgaaggaatatttcagaccccactccgtcacctccagcctttatccccagttgactgaggggggaaaaaaaaccagtttctgcttctgcccatgcggtgcttagatttcacctccacagaggtcactggcggtggagggagatgacagatgagattctagtctgcctcttccatgccttaagtccatgagaacaagtcactttctctttcctggggactgtcatcccttcatctgaaagctgagagtttgcttcaggatcctctagtgtgtgaaattgcactgaagccactgaacactgggtaattgtacaatatttctgtgtcttaacagtgatgtggcatttggttcaattctaagccatcaggccacttgttgacatgacctagagaagatggaagtgaaacaccgagtcattaaacagggaccccaaaatgccgaattgacgtgatctggctgggtccactgtgatgcggggaatcacccgtcagccccttgctggatcgctgtgaggggtacctgggaagtgcttggctttcatggggctggtacttagcatcctgaagaagatggtgattatactagatgggcggttattgctaggacttgcaggtgtgcttggcaaatgtcactctgaactgagctgcaggtggctggaaatgctgcgggaaaagcgagacatttgagagcactgcccagaccttgctcacatccaaataccatgctaaatattgagatgtgtagacccgtgcctctgttttccttttttgcttttttttgagacggagtcttgctctctctccaggctggagtgcagcggtgcaatcttggctcactgcaacctccgcctcctgggttcaagggattcttctgcctcagccgcctgagagtagctg

SEQ ID NO: 77324 - DNA, 1080 bp, Homo sapiens
gttgtccttcatttctttgtcatattatttttgtagcgttaagattaaatggtcccaccctgaaagccaccatgatgagaacaaaagccattgggtttccagaattgagacaatatcattgcagaaatgtttgggtcacatgtcagccatggccctcagtgtagctattgctggtttggagccttgggtgcaagggatcagaaaggcaggtcccactggcccagggctccaccgggagcctttgatggaatcaggccagacccctactgttgacaggatttggtggtttgttttatgttttccaaatttggtagttacctgtctcctgtctttccccccaaacctctccactccttagcttttggctttcttctgcacagctcttttccaaaggaagggatgaagcttccagggcagattattgagtggcccgcctgatttacttgcaaagtctcactgctccccctgaactattctgggtttgagaatgtgtgcgtgaaaggaaaaaacacgtaggaatgttgaattttccaaagttgaaatctttcaggtctttaaacatccggttggttaaactgagaacattgatgtttaagcatagagtgtccagccagactctgacctgtgtctggggtcaggcctgcacgtgggggtgggtgactagagtggtcagaggttccagcccctggctgtggttttgagcaattctcctattctcattgcaccagaaagagttaattccagttgcacggcttgctgatgttgttgataataaagtattttaatgggctctgtgaataatgtttgtaaggaaactactcgggtgaactgatgatgaaacacagatttttttaaacttttaaaaagattttaggagtaacttgtttttacagctccttcagtgggattttcttggattgtccccttcccccatgttagttaaacagcttcttgtttgctttctaaatgttggaggacaacatcaatcttactgttggctgaaagcaggaggtgggcacgggtttatgtaatttaacttcttttctctgcaaatcagtaaatatttacaaatgaccttat

SEQ ID NO: 77325 - DNA, 1032 bp, Homo sapiens
gggcactcatagtgaaataaacctaggccgtttccaggagaagccttcaagcctgccagatcctgggagaccgtggcatatgctggacagaatgacagcttgatgaggagtaccaactctaggccacctctctataaagttacaagtatcttttggtgatgaggaagtggaccatatccgctccagttcccaccatgagctcaaggatccgtgagagaacagtggcctcagaggcccagctgccccagccagggagacccttctcttatccacctctgcccactccagctttattctctaagtcaggctgttgccctgtcctgctcccttgcagtatcggggtcagggcctctcctccttaaggaaggaggtggcaggtggtaagccctttggggcaggacctctctaggaagccctggactgccataccggccggagcatctctcagtgtgcacgaagacatgactcaaagcaagtagctttctcaaagtcccatgtccttcttggcactactccagtggctggctctttgctttgttctatttcgatccttccatttccacctctatcttagtgcatctgagacaaaacgcttcttttggaccaaggaaattaacatcagactatggaaaacaaatagtcatgtgcaatttttttagatgaaatctgcatgatttcacaatttgacaagtacctattccatcaggcaggcactgaatggtttggagctcagtgtcaaggaaagctggctatttaatattttgttgccatcataataacaagagctgattttttttttttttaattttattttgagatggagtctcgctctgttgcccaggctggagtgcagtggcgtgatctcggctcactgcaacctccacctcctgggttcaagcgattctcctgcctcagcctcccaagtagctgggattataggcacctgtcaccatgcccagctaattttttgtatttttagcagagacaggtttcaccatgttgactaggctggtctcaaactcctcaggtgat

SEQ ID NO: 77326 - DNA, 1064 bp, Homo sapiens
ggctggagtacagtggctcgatcatagctcactgcagccttgacctcctaggctcaagcagtcctcccatctcagcctcccaaaagtcctgtgaccaggcatgagccactgcacctggccttccttccttacatattttgaagcagaggctgtaagttcatggtgaataacttggctctgttctgtttgttcttctgctagtaccacctaacttctactgtgacgtcccttgacagagaggagaattaagtggattaactgcctttcccatgctgagtatggtgttaggtatattgtatacgtcatcatcccatttaagcccaaaatgacttttggagaagatggtatttttgccaatatacagatgaagagattgtgaagctaagaggacaagtggtttgtccatccagtaacacagcaagttagcagtgtagacaagaaccataccacttgatccccttgttgggagctacatgtggggattctttccagaatgttctctgggaaagtcctggcattgcctgtggcccctcatgggcacatagtcatgggttagtttgtagtatttgtctctcatgatcttgaaagagacacatgaccctgggaacttggaccccatgcaggggtttggtgggaaggccagaggaggtatggtgacaagaacccagcctctaagaggctggggatgtgggggtgttactgtggggatagcccaggtgggagctggaggggcttcctgagcagggatgtgaggccccaggaggagctggtgcacatgtgtgtgcacgcctgcagttttaaccccttcctcccccagggctcatctcttttgtcctctgttgtctggcagcccattggccagcttgtgtaatcctttgtaatcacttcttgtttgtgttcctctagaggttccccaccttaaggaaacggaccctgcctttgtgtcacagggccctgcccaactcctgtgctgttagctctttacaagcggtgttcagggacctgcttcaaaatcaggcccaacgatccacctttcgttaggcccacggaagtttgaatgggtt

SEQ ID NO: 77327 - DNA, 1023 bp, Homo sapiens
ctctgggagacgaggggagggtttctggggcaggaggccggcttgctgagccctggctctctggacagccactgggacagatagctcaggcatcagtgccttttccacgtggttgctgccactgttcccaggggccaggtcagttggtctttctgggtagattctgtttgtttaattttttcctccatccccctacccgtgaatcacagtgtgaatttatcccctgcgtccaacccccgttctgtctccctgaccctgtgttcccgctggagcactggtctggcagcctcttacctgcagttttccctggcacccctgtcctctccctggcaacctcgggcatatcctctggttcccgggtgctttgtccatatcttacccagcgctgacaagaacgctggaggaatcgataacactgacaatgttatttggtccctgcagcttctcacatgtgggtcggagatggtttcggatttatctttggagccgggtgccgccacatcagggtgcagtcggtgttagacaccctttgttgaaagggatctgcttcatggttggagtgagtgcttgttctagaattgagaggcactgtagaggcagtgtctccttaaaagtggatgtgttggttggccggatgctgtggctaaaagccaggctcacaacccaggaactcccaggaaagttccctgttgaaaattagggaagatgggtgactggtgatctcgtggccaatggccactccgcaagaacaaacaccaaacaacccagtgtctgtgtttcactgagagagaagggctcatgattatttattaaaataaaaaaatcataactgaagctctctggcttagtacacacaccctgtcactgttacctggccaggtactttgaacaacttccagttatggaaatatggtgatcaaattatgtgccaatttgataagatcacattggaacatttaaaaatagatgagtaactacggacaaccagaagataaagtggcagtaggtgggccagttgtaatc

SEQ ID NO: 77328 - DNA, 1055 bp, Homo sapiens
tttttgagacagggtcccgctctgttgcccaggtcagagtgcagtggtgcagtcatggctcactgtagcctcgaattcttgggcttgagtgatcatcccacttcagtctcctgagtagctgggaccacaggcctgcgtcacgacacccagctagtttttaaatttttggtagagatgggattttcctatgttgctcaggctggtctcgaactcctgggctcaagcgatccttccgccttggcctaagcgctggaattacaggtgtgagccactgcaccagcctacatttaacttgttgaaagccattttaaattttatttttaacattgtgatattgacctggatttgaatagttccctcagcgattaaagagtatcagtgcatattgttattagtgtggtgttttttgttttatatcttgtaggtttgctggagattttttttttttttaccccatgagacagcgcatagtttttaaatttgaaactttggttcctgttttaatttcctgtgggttaccctgacctagtaaataacaacagtggtcttcaggatgaggttgactgttaagtcttaaactcttggaaagtttggttgtatggtgctcttgttacaataaatgaattcctgttataataaatgtagttaatatcaactctatatagtggctcaggtaagattttgtttcagtcagctgttgtcaaattggaagcctcactgacactgttgtcctatttgcaatttttatgtgcgtttagactgactctgaaacataatagtaaccattgatgatgcacttacaaggaattctacagagaatatttttagtaataccatacttttctaatactgtaatcgagttttcatgtttcaaagcttactgtgctttttaggaagatgaattctgttttttcaagttttgcaggatagtaaattattatggtagtttcggtggcatatttttttttcctgcctgattgctatcctttatgacttggggaaattgcaggggaattattatgtacatactgtggcatgtagattccaagaatgaa

SEQ ID NO: 77329 - DNA, 1026 bp, Homo sapiens
caattgacaggcagatgtgtgggctgcagacacaccaggtcaagcttaggagtagttgagaggatcaagcaaagggcctggggcattgccgcccctccctccgtccctccctttccccttcccttcccctcccctcccctccttctctgttgcccaggctggagtatagtggcatgatcacagctcagtgcagccttgaactcctggactccagagatcctcccatctcagcctcctgagtagctgggaccacaggtgcgcaccatcacacctggctaatttttttaattttttcatagagatggggtcttctatgttgcacagtctgttctcaaactgctgggctcaggtgatgttcctacctctgcctccctaagtgttgggattacaggtgggagccagcacacttggcctgtaccttcacttaagcaaaccttttttttttttttttttttttgctttttgaggctttttttgggctgcaggtgcagggcctagccagacttggcagcacactttacatggccaggatgtcgggcaatgttagaattagttggagagggctcttatggttatgtcaccagatgttggaaaggctttagttataaaattaaaaacaaacctatcatctgtgtgattttgtaggcctcggggttcgaggtatcctgtgagtcacccaaggaatcctgggagtacatagtccacagtagacaattattattgctatttgtcaataatatctgaagatgactgttacctttgtggtgatttatcttagaaggaggcttttctcctgtgtttgctgagtttgatttgagtcttttttttttttttttttttttttgagacggagggagtctcactctgttgcccaggctggagtgcaatggcatgatcttggctcactgcaatcgctgcttcctgggttcaggtgattctcgtgcctcagcctcctgagtagctgggattatgggcacacgccaccacacctggctactttttgtatttttagtggagatggggttt

SEQ ID NO: 77330 - DNA, 1053 bp, Homo sapiens
acaagtgtgactggaagactcttagaaaattttttacttaactgtctgtcttgataaactctatgttcattatctttggttctttgacttactttgaaactcccccccctccagccttagagatcagcttatattgggcaggcattttttcccagaaataataatattaatattaataaatagtaataaggtaattacactactcctgtgtggtatcctaaactttctcataacttgttcatccatccagctaatgttgattccatgcttgtaaacaggcttatgctaggcatcaggaaagccggatgatgaaggtatagtttctgtccaccaggaatttctagtctagtgggagagacagacacatgaagaaatagtcattgtacaccttcgtgtatgtcaggcatatgagatgctgtgctgggcaggagagggtgtgagtgctgcttcattttacacaaattggtgagagagaaagcttggatgctgtactgagcattgaactaggtgttaggagatctgggttttattgctaatttggttgctaaccagctgtgtacctctctgaaccttagattcctccattcaattcagtaaaccttctcttgtgggcccactgtgttcattcagtatgtttaattaatcattcatctgtaagcagaattgtcccggacacgtgttcctgaactacttgccacaggggactcttttattctcctccttattctgtgcttttgttagacacatgagcatcagtcacaggctgtgaccagcatcagataaccagtgtccatagggtgtgttgagaatatttctgcccaaagcaaaggagctagatgtggcagcttacataacaatgttgcacatgaacgcgtgatttccaaaaggctttggggaagtgtcagaataaaatcctgtcctcataattctaactctgcagaagagcctttccatagcagaaaacccggatgggttgtgtgtgattttcaaagccctctcctatgctgttattacaattctaggagatcccttagttggggagtcactagctgt

SEQ ID NO: 77331 - DNA, 1024 bp, Homo sapiens
ttctgccagttgccaggggattgggcaaaggccagaattatgtggttggggaagccaaaggagaaggggactcctaaggtttagcagtgccactggaagaatcctgaagacagcattttattagctggttccttcaggatagtcagactggggctggcgacagggagagaggaggtcccttgagtcatcagacgtggcttgtccagaggtagggacgcataagggggaagactgagtgtgaaagtgggaagtgacatttccataggacctgctgggtgctgtttggagtcatgtgaggcatttgtatccatggtcttacatctttttaacaactataagcaggtattatatgctctttgcagatggggaaactgaagctcagagaggttcagtggcttgctaaattgacacagccagatatttttagccaaggtctgacacttccttgctcctccttcactctaattggctaaaacaaagggtcacagtgggatagagagagaaataagtttgggaaggtaggctgagctagactggggggttttgagtgccagggagcccagactttccccctaaggtggtagggggtcctcagacgtttctgagcctagccacagcacagacaaaggagtcaagtgcttccttctgatgccctagaggttcttgcagagcctcggtctccacagcagggattctttttttttttttttttttaacttttattttaggtttgggggtacatgtgcaggtttgttatatagataaactcatgtcacaggggtttgttgtacagattatttcaccacctaggtataagcctagtaaccaatagttttttcctgatcttctccctcctcccaccctccaccctccaataggccccagtgtgtgttgctccctactatgtgtccatgtgttctcatcatttagctcccacttataagtgagaacatgtggtatttggttttctgttcctgtgttagtttactgaggataatggcctccagctgcatccatgttcccg

SEQ ID NO: 77332 - DNA, 1030 bp, Homo sapiens
tagggcgctgtaatgtagagccgcacacacggcccctgccagtgtaaaattggtctagctttaaaagagatcgcagcccctcccccttccagaaggaagggcttacagctgtaataaatcagacaaaagtagtcgctgtcagttgaaatagattacaagagggatctcctggcagaatttatttagtttagctcaaaggagaatgttacagtcaagggtacatttggttgcaaggacaagagagtcactcgagttggcttaagtaaaagggtacttgtcccaaaaacataacagccagtcccatggagcgggagcagtgtcagagagcaacaaagcatatctcaggtccacggccattggaagtgcctcctctgttcctctgcggccacgtggacactcatctctgcctttctctgaggatctgttctagcctcctctttgcagcccagctccctctgtgtgctcttgattcctgccttctcacactgttggcttgccctgctgggatgttggtgccagtccctgtgatgtgatggttccagtgcccagtggcatcagcaccatcatctctgcgccttgtctttgtcatcatttttagatactaggacttgtccttttcctgggccaagcgttcagccctggtcagaacaggggcctgtgcaccggatcaagatagctgctcggaaaatcccttcatctggggttgggctggggcttgagtctgaaacatatctgcaacaacaaaaaaattcaggaaagcctttgatcatttgaagaccattttattgattgattggctgatttgagatgaagttttactcttgttgcccaggctggagtgcaatggcacgatcttggctcaccacaacctccgcctcctgggttcaagcgattctcctgcttagcctcccgagtagctgggattacaggcatgtgccaccatgcgtggctaattttgtatttttagtagagacagggtttctccatgttggtcaggctggtcttgaactcccgacctcaggtgatctgg

SEQ ID NO: 77333 - DNA, 1003 bp, Homo sapiens
ggggaggaggaggaggcaagtggtaaatagtagttccttccatggacagggtaggtaatgtaccagattgtgttacatgcaatgaagatataaaacaggataatgtactaggggaggagggtgggatggtgggaggcttctcagaggatctgactaggccgtgccttgaatggcaagagggatgcagctatgcaaagatctgggcagagagaacagcaagtgcaaaggccctgaggtggcaatggctcaaaatgtccaaggaacagaaagaggggtcgcagttagtgtattagaaaggggagaatgttatgtctaaaggacaggaaggggatctacctctctggggcttgttccagtggtgcaagagagagatggtgggagtgatgctagcttgagccagggttgggggttgcagatgaacatgtgtgggcaaatttgggttgggaaattggatgggcgttagtgccaacattctcttttgaccatgttaaatttgagatggtttgcggacatctaagtggagctgtcaggaagtttcctatatgagtttcaagctctgtggagacattcgggtggaggtataaatctgaaacacagtgcataggtgttggaaaataaagagatttctggattacctctcaatcaaaaagagtgaaatcaaacctctatttcagttcttacaggaaattgtatttccattagtgtttgactaggaaattcattttggggtatattcagcatgggaaataagaacaaaagaggtttacatttagagggagaccctctcagaattatttcagcaataacttacctctagttgctggctgtagttttgcaggcagaagagaacaaacctttacttttgtaccaagagtgcaacttctaaatgtgcttggggcagccgcatctctgatatcaggagagaaatgtactccagtaaacatcttacttagcaaagccccctaacccatggcttctgcgagttctctgccatctggtccct

SEQ ID NO: 77334 - DNA, 1581 bp, Homo sapiens
tgtactcttagtagtttacattccagggaagcaggaaacataatgcaaaataaaaaagaataagttaccgtaagtactggaagtgtgccgatcagtgtgagattggtatcattcaaagttaggctggcttccctttcccaaagaggggcactgggtaagctaaaagatagtgatgggcgagttttgaatattccttatgttcacttgaataagctgttacaaagcattcttcgggtgtgggaatgagcattagacctccaaggatggattgatcagaaggaggcttgagtgtttattgtagaaaaccaattaacaatgatttaaacaagctaggggcgtatttctccattacatgaaagaagtcttgaggagctagacagagacgcacattccctcttctctgctgttcttagggcattgcgggtttccattctcagtcttctcatggtccaagatggcatcagctagcatgttcccattttaggaagcaagaaggggagtgcagggaaggacaggagggagtcttgctgacttctggttttaaggggctttcccagaaaccccaccctctgctttgatcttattggctagagcttggtcacatgacttctagctgcaaggaagcctgggaaatggactcttttgcctgatccattggaaccccaagttaaatgttgattctgttgccaagcaaacttggaactttctgtcacaaaggtctagatgtttaggaggcaaatgttactggaccccagggatgtgttggaacagcgtcagaggaaaggacggagagagatggtggctggaaggttatgtaaataagaatagggactgttggaggagctaggatgctaaatggaaaactttacattgcattggtaacttaagtaaagcagagatgctgacccattttttaaacattccaaataaccaaggttttgctttaagagattctggttaaattgcatttagtgtcatcaaaagcggtagcttgattgaggtgaagatgtagtctgtgccaaggatgataagaagaaaagcaaggaaatagatggttgaagatagagagtagtgtgaagtcgttcttttagtaataacttgatggattgctatgtaagattacagacagttccatgaacaggatgaagtctttgatttgtgtatgtgtgtgtgtgtgcttgtttgagtacctttccttgtgaactcagcaggagacagtaaatacaggcagagaggctatacgcttcccaggggaaaaagctctccaattacccttccttttcttcctttggtcttcacagggtgtgtgggatttccctctgggccccgtggggtcgagttcagtgtcttctttctatttattggagttctgtgaagtgcttcatagaaggctgtgactgtcctcctcgagggacaggaccgataagtgatttaactaatgtcattagacagaaaacacccacctagcagaacatgtgcacatgctttgtttttagaaggccaagtcatgtgagcgctgactctaatcgtggctatagtagagggggaagaaaagtcccgaatctccaagaatcaaggtac

SEQ ID NO: 77335 - DNA, 1068 bp, Homo sapiens
ttacaggtgcgtgccaccacacccagctaatttttgtatttttagtggagacagggtgtttgttggtcaggctggtctcgaactcctgaccttgtgatctgcccgcctcggcctcccaaagtgctgagattacagccgtgagccaccgtgcgcagccccatcctgctgatttgttccttccagactgttcgttccttcttcttccagtcagtaggtgtcttgggtgggggcacatttccgttgtcttgctctggcaaacctttcatttgtctgctcattcattcatttattcaacaaactttttaaagtacctactaagtgctaaaagaatacagaattgaatgtaccatggccactgcctgtaaggcactcatggtccagcgagccctcccctcagagtctccctctcactagtggaacttctctagcagaagctcttactccactgctgtatgccctttgtattctctgttttctgtctcacatcgttgcttttctggcccttcatggatacactacctttctactcctcacagtgacttggccaggaagatgccactaacctggataggggtctgtctgaggctgctgggaaagcttctgggcccgagggccctatcaatgtatctgtccagtatctccccctgtttcctattgagaaaatgttgcattctctttggtagggctttgtggcacctggataggtctaccagatacttcatcgatgtactgcctgtatatccaaccagcaagaaatggttttcagaaccttccccattgggctgggatttccctttgaaatcattttggctgcaggataattctctgcagtaaataacataggaagttggcactctgacctcctatttgaaagttatgagtttaggctgggcgtggtggctcacgcctgtaatcctagcactttgggaagccgaggtggggcggatcactttgagcccaggagttcgagaccagcctaggcaacatggtgaaaccctgtctctacaaaaaatacagagattaattgggcatggtggcatgtgcctgtagtcccagctactctcctga

SEQ ID NO: 77336 - DNA, 1158 bp, Homo sapiens
aaagtcttcaaaagcaattccagactgagaacgtggagaagaaagtgctgctcaggtcccccaaagcctcacagcagtgataaagcaacaaacagggcgtttagtttggtgtaaaacgagtctgcaagttcctgcatgcttgaatcttcgtgtttgacataatgccggtgcacatagaagtaatttagcaaatgcacactctgaaatgttagaaaagaccaacgccaaggcgtgcagcgagacttgggaacattattcatcagtcagccttgggagtgacaagtgggtgttggatgccctgtgttgaggcacactgggaggagctgttctcccgccatgcgacccccccgtcccccaccgctggattctgggagtcatgttttccagggatgaagattgtcaatccggatacattcaggtatcacctgttgaaagagaatggttttaaagacttgagattgttaatgttatgaaacattcagttctggcttcccagccatcctgacctgtgttgacatgtttctgatcaaatgccagtcagttttgtggttgggagtttgttcccagcatttgcgattctgtgagaacaaagcaagaggtgtgagtttttccacttttctcctctttcttgggttcccccaggccagctgctggctgctgtgagaggtgcaggctcccaggtatgctcaggtacacccaggtccttccagggcattgacctggcccagtcacttggggtatgctactatggcattctccctgatactctgcccagtgaaagctcctttagctctatgggtaaacttgttttttcctatgagattttatttggcgggagctcccacactgaagttgccttcaacacagtgactaaatgcacctgaaggttggtgagaaataccttaaattgaacgagaacattgaaaccttgcaagttgtatgcagtgaattagctattccacttttaattttcttctgaaagtgaagaatacggttaggcttgacgtagcagtgaaaatgtggaatcctgtgtgatccctgtccctgagggcttggaacacataccctgctggacaactgtttggctgggatgttggggagggaacatactagattacatcacctgtggcacttaaaaaacaattcccagccgggcac

SEQ ID NO: 77337 - DNA, 1812 bp, Homo sapiens
tgcctggccggtgttactggtcttattttatttaaggggcatcaggtcaccttgctatatgaatggcgggctgatttttctcatcagcctatctctctgtggtggaattgtgggattgtgttgcttagtgtgggagtcacaaggtggtgttcctgtgtagcaggggttccatagaggcggcagagggaggcaacaggatcagaggggtacagtctgcctttctgttttgggcctcgccagctcatcatttctttgtgatgtctttactaggagccttcacgtaaatgggtccagtcatgcctcccagtaagaagccagaaagctcaggaattagtgtctccagtggactgagtcagtgttacgggggcagcggtttctccaaggcccttcaggaagacgatgacctcgacttttctctgcctgacatccgattagaagagggggccatggaagatgaagagctgaccaacctgaactggctgcacgagagcaagaacttgctgaagagctttggggagtcggtcctcaggagtgtcagccccgtccaggacctggacgatgacacccccccatcccctgcccactctgacatgccctacgatgccaggcagaaccccaactgcaaacccccctactccttcagctgcctcatatttatggccatcgaggactctccaaccaagcgcctgccagtgaaggatatctacaactggatcttggaacattttccgtattttgcaaatgcacctactgggtggaaaaactcagtgagacacaatttatcattgaataagtgttttaagaaagtggacaaagagaggagtcaggtaagcctctgtgtctggaacccaaggttttctttttttttttttaatttaaaatttttctctattaaaaatgaatttctattcaccacattgaagtagcagttgtaagtgggttttagtctatttaattcatttagataattttaaagaatttcctttccctaagcctattagttatgtactgtttattagcatttgtactatttgagagtttcccactgatagggtttccataaagataaaacagtggtttacagaattgattagttctcagttaacatccctcagtgtggatgggtcactttggttttagggtcttaacaaaggtcagtattccaaggacagccattaaccgtgaagtatgtgtgtgtatatacactgccaccatgggctagagaaaaatggtgtttctttttttccctgaatatgaactaggagaagggaaatttctccagtgttctggcataagtggacagtgatgaacattgagaagagacttgagtatacttacgctcgcagactaaacagacatgagttgcccaggtgactgtcatgaaatctggtgtctgtataagtgacaactttgaaattcccggctcagagtgagggtcccattagagactgacttttaaaaagtttaatattgactttaaagcagaggtccccaatgtttttggcactagggacccattttgtggagagccaagggggatggttttggtatgaaactgttctacttcagatcatcagtcattagattctcataagaagcacgcaacctagatccgttgcatacacagttcacagtagggtttgtgctcctatgagaatctaatgccaccgctgatctgacaggaggtggagctcaggtggcaatgctgacctcctgctgtgcagccccgttcctaacagaccactgattggtacatggccccaggttggggacccctgctttaaagccatagtttgtacttcatggtcagtg

SEQ ID NO: 77338 - DNA, 1024 bp, Homo sapiens
ccataaccctctcttcgtgacaatgccactttttctcctaaaaccatattgctggcagtgtttgtttaaaacaaaaggaaacatggagaatagcgtgttagttcctctgggaagctactgacaaataagcaaattaaaaagaaagagagcagcatgttgtcatagcaacagtgcaattaaattactttactgtcagccatgatataattttcctgtttggaagctcaggagacataaaactttcatttagagctaaagttgacttcagtggctgggtagttctgttttatactctactgtgggcatatgctggtcatcagaaaattttctgatgggatctgaggaaactttaagaaagacaagtggtgctataattcgttcataaagaagttaaaagcaggatcagaccagactctgttgtatccccaagccaaaagatgctagcttgttttttgtctgaaatgtgtcagggtaacctccttatttgacagaaagaaatattccctgtgagtgaacccaagacgtctggagcatcctgcctggtctgtactgcaatgcctcatgaagttttctctccttaagagttgggcatcttggccaggcgcggtggctcacgcctgtaatcccagcactttgggaggccgaggcgggtggatcacgagatcaagagattgagaccatcctggccaacatggtgaaaccccgtcttactaaaaatacaaaaattaaccagtcatggtggcacacgcctgtagtcccagctacttgggaggctgaggcaggagaatctcttgaacctgggaggcaggggttgcagtgagcggattttgcaccactgcactccagcctgggcaacagagtgagactctgtctcaaaaaaaaaaaaaaaaaaaaccggttgggcctctcaccacagctcccccttaggccttgcgtctagcaggttctaccttttggaagagggaaggtactataattcacaggcacccttggctggtaggttagtgcccaggattatgccttc

SEQ ID NO: 77339 - DNA, 1241 bp, Homo sapiens
agaatagatgtagttttatgtgttcaaatttaaacagtttggagagggaagagggttttaaaaaatatggttgtgacatgtttattataaacatgagaaaatggagcttgtgattatgctggtggtatatatattgtaccttgtcaacaagaaagcttctatgtttgtgtatttaaggtggtattttctttctttaaaaacattagaactgatgatgtctcttggaagacttaaacacagtctggtttaaaatattgttccataactacgcttcttcctgaagtttccatggctttctctgggcattgcagaccttttgaaattgagctgtttttcagcagctgcagtcagttacttctcattctctaagctagtgcttcttggctatcagtgtgcatcagaatcacctggaaggcaattaacagccatctgggctctaccaccggactttctgattcaggaggtctggggaagggccacaacactggcatttctcccacattcccaagtgatactggtgctgccagtccaggtatgatactttaagaaccgctggagtttaaggccaggtgtggtggctcatgcctgtagtcgtagctactcaggaggctgagggggagaatcgcttgaacctggaaggtggaggttgcggtgagctgagattgcgccactgcactccagcctgggtgccagggtgagactctgtctcaaaacaaaacaaaacaaaacaaaacaagaaccactggcgtttaagtctttgctaagtgttgtccagaaccagcagcgtagatattgtactttgctgatgcatcacctggaagtttggcagaaatgcagaaatgcaggctccattccaaacctgccaaatccaaacctatattttaacaaggtgccccatgtgatttgtttgcacattaaagtctgagacatcttgcttttaactccttgcaacatcatgaatgctccagtgatagcactgggattccacaagtgtcgaagcaagagagaaagagaaagtcctaaagaaatcagaactcctaggcacttattctttcagagaacattctggcaaactgaggtcagtctgaccttgtttgaacttgcttggatgagttaacttctatactgttcaaaagtaatttttaattagtttctgaattctagagacaatgatatatgtatttattataaaccactttcctataaagcatcatgaaattataaactgtttatcaaagtag

SEQ ID NO: 77340 - DNA, 1069 bp, Homo sapiens
caacaagaggttggaagatgtgggagctgctttggctctgcaatttacttgttgcatggctttggacaggccatccttccatccattcatccatgcattttattcatccattgagcatttcatggaattcactagattggatagtccatccatccatccatccatccatccatccatccatccatccatccaacatttcatggaatcctctaaattggacagtccatcaatccatccattcattcattcatcaaacattccatagactcctctaggttggacagtccatccatgcatccatcagtcattccatggaattcattggatggaacagaccatccatccattcatccatccacttattcatccaccaagcatttcatggaatccaccgggaatcctccattctgtggagtcccaccaggctagatgttggtattacaaagatgaataggacattgtccccattctcaaggaacttcctgtttaggatgtggattcagacacataaaccaacaccctcagagaaatgctgtgggtgctttgttagaagcgtgtccaggtagaatggcatcccagaggagagaggagcagcattccttctggtgctctggagacgctttgtggcaaaactgacatggggttgagttgaggagagaaacagaagatataatcaaggggtcatgccatgataaagaatttggattttatacttctttataatttcccggtgatgggggccactgatgattttaaacagagaacagcacaaccattgtttttggaagataaacctggaggatgaccttatttaatctttttttaaaaatctttttaaatttttttttttatttttgagatagagacttgctctgtcgcccaggctggagtgcagaggcccgatctcggctcactgcaacctccgtctcccaggttcaagcgattctcctgcctcagcctcccaaatagctgggatttcaggcatgcaccacaatacaataatttttgtatttttagtagagacgggggtttcatcatgttggtcaggctggtcttgaactcctgacct

SEQ ID NO: 77341 - DNA, 1064 bp, Homo sapiens
ttttctttgttctgttgcatcgtgatatctggctatcggatttcatagaaaagtagaaacagccgagggcactgtttttgtaatttcatattaaactcatttccttgaaaatctggcttgagatgagtgttcttcagacttctcttccattttggtatgtttcctttttcttttctcatgcagcctatgtctagtttttcaagcacattgaagttgaatatatttttgttttagtatcagaaggcacagctgccgtggactaaccctaacgagcctccctctgtcacccatcagtgtctcacgcagcagttcctgaccatcaaagtgtgctctgtgctaagtactctgctggatgatttggcttgaatttctcaataaatacacctacttaccctaagaggcagttaatattattcccatttgactgatatggaaactgaggctgagaaagtggaagcaatttttaagtcaagtcacacaatgtaagtggtgagcaggacccaaggttgtgtttatatgattttgaaattttgttatcgaccctacttatgagccctgctttatttctccattatagacatcccattttgtttttcttttaaactgagacaatggcaaaataaaaacaggggagtgttttatgtatcattttcactggaccggtattttctgtgtttttcagaacactagccagcaagctcctaaaaaacaaacattaaattaatttggtcaaaactgcacattatatccttttctaggagatactgttttattttatttccttttctcaaatttccatttgactacataacctttttatcttcaaatgcctttaaaagcacaaattgggaaaggtttcagttaaaagacaagtgaagaatttggtattatacaactaaatttttaaaaataaaaaaaagaaaagtggccaggcacgtggctcacgcctgtaatcccagcactttgggaggccgaggcaggtggatcatgaggtcaggagttcgagaccagcctggccaacgtggtaaaaccctatctctactaaaaatacaaaaattagccag

SEQ ID NO: 77342 - DNA, 1045 bp, Homo sapiens
ggtggccatcttggttttggtgggttttggccagcttctttaccacaaagtgttttatcagcaaggtctttgtgacctgtatcttgtgctgacctcctgtctcatcctgtgacttagaatgccttcaccgtctgggaatgcagcccgagtagatctcagccttattttactcagctcctattcaagatggagttgatgtggttcaaacacctcttacagcaccacccacatgatgtgtttgaattgaaccaggaaggaaaagtgcttgtttctgtagctctggttccattcatatatccaacaaatatttgcgagagatctgtctggtgaggtcctgagcttccaatgacacaatgtacaaattgaaatcaaaatcggtaagaatcttagaattcttccaattctaacatactgtgactcagccagagatactctgactcagccacttagtttattcattcattcattcattcagttccttcatgttgcaaacacttattagacatttcctacttactactgcaaatctctgcacaacaaaagtatttttaagacccgatctgagtcacttatatcaaggaacattccatatagatttttcttagcagcagcagtctttggatgttttatcctaacaaaatttgatttttaaaggcatataactcgttcattttcctttttttttttttttttgagacatagtctcactgtgttacccaggctggagtgcagtgttgcaatctcggctcactacagcctccgcctcccagttcaagcgagtctcctgcctcagcctcccaagtagctgggaccacaggtgcgtgcgaccacgctcggctaaattttttttttgtatttttagtagagacgacgtttcactatgttggccagggtggtcttgaactcctgacctcgcgatccgcccgccttggcttcccagagtgctgggattacaggcgtgagtcaccgtgcccagcctcattttctttgtaactggttgctttaggtctccagccaactttatatgcgagattttaaaaaaatg

SEQ ID NO: 77343 - DNA, 1034 bp, Homo sapiens
tggtcggggtttttttgtttttgtttttttaataacccagcaccgtgtttctggcttctaaaccctactgctaatttcattgacttctacataaagacttagagcttattaatattacttagcacagtagaagctaaagaggtcagtcttgtgcctccttggcccctaaggaagctcattgtttcatctctgtagaaactacctcacaggcaatgggtgtggaccgtgagcatccaagttgaagggggagcagagaagactgacctcatttgcccccatacttactccaagtcctcaccaggtgtacttgttggctgtgccttccagaggcaaacttatttggtggttgaagctgctgtttcttcaagtatacgtgatccagctctgattgaaaagcacctgtgtattccttcctcttacacttcagtcaaagagtgtcttttctccttttgtagctaaatacttcaccggcaggattgatggtttccttctaccaggggagtttgtgctgctggcagccccattgttttgcttctgctgttaatgtaatagctttgggttgtagtgcaggaagatgatgcctaagtccagcgtcaggtggctggagttctttgccactgctgaaatgcaattttaataatggactgtatcagccaaatgtgtttccttgcctctttgtaaaacaaaagaagatctcagcatattaacccatcgatggcaggaaaaaatcaaaatctccaagaatgccaattaatgaaatggcacttgcatctcaaattataaatctccttaatacacttcagaaattctctgggtagacaaggaaggggttgctccaagccatctcatcagccccactttttctaaggcacaaatgtagaaaagatgcagaaagtagtttgtggtttggtagagaaacgagctgttctacaaaagcaatgacgaacttgactaacctcaggttgcgtttatttgttctgatcatgctgaactttattaattgtgaaaagtctgtcagaggcgttcgaaccaga

SEQ ID NO: 77344 - DNA, 1036 bp, Homo sapiens
ccacagatcagttaccttcacaagctcctgaggatacccattaggcctctttttcatattaaaattaacaactttttgttacctgagggcatatgtattgttagggagcaataataatttatcagtttccatcaagttgcactttatcatcataatggtttcagaggaggctgcttttagctcttgcagtgcattttaatgtgttgcaagaaacatggaaactgactaacggtgtaatggatgtgtaatggactgggagctggggaggccacgaatgggacatgctatggctggaccatgaaagtgcttctctagaagtcatatgcattctccgtgttagaaggagccagtaggcacagtttggtttcacccgacactcttagacatgtgggcacgattgctcgtcttcttgttttggttgcatttaccctcagtctctcctctggtggcccccgtatcgacgaatgagatcccaggttcagggttgcaaagaagaggaaatgtcctgtccatgccagtatgtgcagttttttgaagaggctctcactgaaggtgacgattcattacaaatgctatcaagcatgtgtttctcaaagagaaagaaaagttagacatcaggtgtgaaggtatttatggcattcagagccctggcaggtaggcctgcttcattccagaaccctgggaaaaactgaccacttttagagtccagccagcttgttcagtatctctgggaggcatctttcagaaatgaacatagtaaatgccaaattaaccttttgtggaagtagtccccacttatccactgttctcttcatgctttgagttacctacagtcaactgcagcttgaaaatattaaatggaagattccaaaaatgaacagtgtatatttcagttgcaccttgctctaaggattgtgatgaaatctcgtgctgtcccgctctgtcttgcccggtgcatgaatcatccctttgtctagcatttctacactgtatatactacccatctgtaagtcacccagtagctgtctccgttaga

SEQ ID NO: 77345 - DNA, 1032 bp, Homo sapiens
ttatctatgagaagtactattcaaatatttgttatttaacgtgcctttatatactcacctgtaaaatgggacagtacttggtgaggattaatttaataaagcatgtaagacagtcctggcttatagaaagtcatcagtaatagttagctgtcatcgttgtgacatctgcattgtcaattctttgcagataggactgtaagcccctttaagacagagtttgtgttttggcatctcttcgatgtacaggatagaacctgatactagctgcttggtctatttgctgggtaaactgaaagtccccttcttgttactgtgtgcagtacttagactctcatttttctctcttttcccaagacattaaaattctcactgaccactctttaacctggaggttcttaaatgaatagaaataaactctctgacagcagtgttgattttggctctaaacctaaattagtttgataggtgaattgctgtggtaacgcagatgtcatcattcaaaagtggcacaaattcattttcttttgatacctcctcatgaggatgtaacctgggtatgttttgaaatggagtatcttctattagtttaattgaccatagttttgacagcatcaaggtttgtgtgatgtccttgtaataaccctttgaaggtctacatgaggccagaattgttctacacattgtgggggagtttctggtacagtgttctgttccaccatcctgtgtagagtagctatgtaaataatagtggataggctgggcacggtggctcacacccgtaatcccagcacttggggacactgaggcaggtggatcatttgaggtcaggagttcaagaccagcctggccaacatggtgaaaccccgtctctactgaaaatacaaaaattagctgggcatggtggtgcatgcctgtaatcccagctacttgggatgcgagacatgagaattgcttgaacctgggaggcggaggttgctgtgagtcaagatcgcgccactgtactccagcctgggcgacagagcaagactctgt

SEQ ID NO: 77346 - DNA, 1065 bp, Homo sapiens
tttataccaaaacattaggtcatttgaagaaaaaaaaaatctgattaaatacctctgtaggcttttctgattagccgttcttaaaagagtcagtgacagtaatgaaagggtgtcatttgacagccacaatttacttttgaaaaaaaggtaaaatagtacagtgtgtatgggtgaggtttttacaggaatttcttgttggtctttactcgtgggatttgttttactaattgtcagtttctagcagttccgaggagcccaccggccaggaattatgtgagatgaaaagtaagtgatattctggggcgagggtcacagggacagcttaactgccaggatttcttttctttcttttaccccttcgctacacagcaggttttatatttccggggcgaaatgaccttgacactagcaggttagagaaataaaatgtagttgcagagattctccttgcatcccttgtattaattttctgcgtttggcagctcccagcatctctttgtgttaagttgctgtggcatgagggctgcaggccagatctgacgtgaagatggaatgattatgtggcatatggcaaatgcaaccaccaccactaattactctttctttccactttctccttgacttctacttgtgggcatagggttctggagtttgaaagtggtttcctttttttcatctcccctttggtagatatgagaccaaatgcctattttggctatgatgtgatagaatcctagagctttaaagctaaaaatggccttaggcctcgtccagcccaaacacttcatgtcaaagatgaggacggcgggcccagagagcttcacctgggcagggattgcagaagggagcctggaactcgatcatgtctcccaggtcctgggtgagtctgtgttttttcttttctgtcctacctcttaaaagtggacatgaagccagtggatttgtttctctgggttgccataacaaaagtgccacaaactgggtgggaaagcaacagaaacttactccctcacaagttctggaagcaagaagtcaaaatcaaggtgttggcggggctgtgcagcc

SEQ ID NO: 77347 - DNA, 1046 bp, Homo sapiens
tcggggctggatcacttatcgcttctcatttcctttggcagcactgtcaaactagaagtgcatctcggggacactcagaagcactaggtgacgcacctccttctcccttttcctgtatggcagaaggtagggagaggtgaactccccaaaccacagccctgctctagggtctaagcagaaacaggaccacctttgtggttaggctaacagaagttgtgtccctgcctccctctctgccaggagctgtcatggaagtgccacatggaaccctgttcgatgaccccgagcaattagaactcatttgcatggcatggaaggccaagctggggccccgaggctttttcagctcccccttcttccctgacttctctgtagacaggtgcatacttctggctatggcaagggccagctggcaggaggactctaacttgtcatcacagaaataaaatttgtcacctctgtgttcccaacctctgttctttcatgtttaaccagcactctgcatctttgtaaacatgtcagagttctatttttatttcctaattaattcagaaaaggagcagaagacattgctaatgataggaaaggggaagatcacaaaggtaggatgaagggtggcttttatttttcagttgaatgaggcaattgaatgaatatgtggcatccagcaattagaaaaattacttagggccagccagtgcctgggcgattctcgggctgccctgaaactggtcagaatttattcctatgagcatgtctaaacttatcaacttcagtggccagcttttcttcttatactaatagacagtgagacttcattttcccaaacacaagggagaatacaaatttccacatatattaatcttttaattatttgaaatgtgttttagcactgcttctaaagttatattctctgagtacattaaacctaatttaacctttgacttgatttaaaatcatctttataaacatctggaactgtatgatctgtatactttagtgattccagaatcttaacaatctcaagggtgtagtcttttaattaa

SEQ ID NO: 77348 - DNA, 1071 bp, Homo sapiens
agaagtgggcatctggtgttgcaaaaccacagggctggacacactgtagacattcaaagagagttagtttcttctttaatggaaaagtatcattcatccattttaggtctttcaaaggatattatattacctttcatcccagcataaattcaaattgccatggcattttttccctttcatatgtctttcaaggttgaaatatagagccctgaagagctgtgggttggtcacctctcttcgaaagcatgcatttgctaggttgcaaatccaccaagggaagatttctctttttccactggaagttcacatgatttaatttgcctgagtaacctgctgtcataggttttcatagagtcctgacatctaacagagtaattaatgctttaggcttttaggagctgtttcaggtttttattaatcaccgttgtgattgcacgtgtgaattatgaaggagttattttggtagttgaatttcctcctcaggaaaatttccatatttgttcatgatgaactgatagcctgaagaaaaaggagaaaatggagaattttccccgggtccgaagcaggcactccacattatccagggtaagaatgacttcctagagaacagaaggagtgtgaggtgtttgaagctggtggttaaccgttttctctttccctccctgaaatttaattagaaattccccgtgattgccccgggaatatatggattttgtgaactttgtaaagatgtgtggcatcatttcatcctgacatcatttgccatgaatttgcaggttttttattcctttatgattcctgccattggaggaatcactcctaggaccttcctgattcgtctactggtctttttggggttttccagaagacggaggtatctaggtaatcggaaggaaatagaaacctatccttataattttatttatggaggactacatggattttcaaaattatgtgattgtacttgagatcagtgtatgaaaaaggaatgcactgagcggagtctagtccttaggattctcttctgaagtgtgaaaaagaaaacacaatagctgttatcttggaaactcc

SEQ ID NO: 77349 - DNA, 1042 bp, Homo sapiens
ttgtttctgagacagggtctcactctgtcacccaagctggagtacattggcatgataatggctcactgtggcctcgaccttccaggctcaagtgatccttccaccccagcctcccaagtaactgggactacaggcacacaccaccacgattggctaatttttttttttttgtagagatgaggtctaactgtgttgcccaggctggtcttgaacttcttggctcaggtgatcctcctacctcggcctcccaaagtgctgggattacaggcatgagccaacacacctggccatttccccctattctctaggtaccatgtaagcccccaagatgtccctctgaccccagaaggggaataggtccctaaaaacataattgaaattaaatttccattaagtgaggccttgggatccagatttaatttgatttagaagaaataaagtaatgtcatgtcccttgccctcaacttgcatcaattatggagcaaatgtattcccactagaaataaaaccaggtcaagatccttagggaacacatatttgagggagagctgcctcaattctggagggggatcaggtgttagtacaaagaattacacagatggaggttgggcagaggtgggggaccatctagaaacgaactatttccatcctttgcctaacattttccagtaggatgagactgtatccccttaaagggttttgagaaagtggagtccatatatggcactgttatgtggtccttaactcttgactgtatttatacaattacccagcttgactgacagcccttggtggtggtttccttcgagcacagaacaggttttggctaaaactactcagcatggtacctggaaaaccatcctctgagagtttacagaacaccttgtaatctggaaggaaattattcctcctaacatgtctgtaagaaactcattttgttcatccattttagagatgaggtaattgtggtggaagagccgaatacaagttcctgggcaacttatttctggagactcttaggaggaaaattactgctcttgac

SEQ ID NO: 77350 - DNA, 1042 bp, Homo sapiens
ttgttgaggtctacgagtgctagtactattgaggggctggatgtagggagataagaccctgccccagagaggattagatggagtgtagacaaacaagggagaagcaggaaaaaaaaacaaaaacaaaaaaccttgcactcatttttcctttggttttaggcctcccataagaaggctgacctgtctccaggccagtgttgagcatatcaacaagcagaggaatttagctcttgaatattccccagggccatagataatctcagctgaaacagaccctaggttattggcctcaatatcaccctgtacctgagtttaactaattgctttgttgctaggttcagtgttttcaatgcctcatttttattttctgttgtttttggtcttaaatgacaatggcatatggacctaagttaaattgtggaatcatattttgttttcctttcattgagtcctttgcagtgtactatggatgggaaaacacactgacgttttagtaactctaatctattatccacttgctaggatgcaaacacaatgcatgtggcaaattactttatatgctgataaagcctgtgttttggaaaaatgttggaatgtttgtatccaaaacattgttttgaatcaagccatcttaaatatgcagattatgaataggaagtggtatcctgaatagcatcgtcaaaattccaggaagggtcaggctgcaaaatacaagacatggtgagtctataattaggcatcaacgctattttatctgattgagcatctccctgggcttggctctggcattaatcagagaacagctctccagcccaaaggagttcacttaagaagatgacccaggaggcaaatctagctctctcagaagccaagacagagcaagccctttacttattatgttgtttgcttcatggaataaggcatagaatttctgctaaatgaaagcaagatacagcatttctaataaaatagaaaagggaatatggtgcagtgctcttcttgcaaattgtactcactttcttttcaagtctaaggtttctct

SEQ ID NO: 77351 - DNA, 1027 bp, Homo sapiens
gctaagtctcattgccatttgtgttgaaggtattctttctccaagagtactttacgactgttttttaagatattttctttgtttttggtgtttggcaattttatcataaagtgttcagatgtcaacttatttgtatgtgtttattttgtttgggggtttggggctttataattttgtggattggctttctcatcagaactggaagattctcaggctgctattcctgctctgtactctttctctctaattccaggtttgagattaagcatatgttatacctttgttctgtcttttccatgttttagcttctctgtcatcttttctatttctatatttctatgtgctgcagtctagataatttactcagttttttccctctggtttcctgtgtctaatctatctgatctagctcgattcttatatactcgttcccttttatttatttaaacaatattttatgttttgtgtctaattttaaagtttgaagtctttgttggccgggttctcctctctattgttttcactggttgttgttcatggtgctttgtttctctctctctctctctctgtgtgtgtgcgcgcgcgtgtgtgtgcgcgcacgtgtgtgtgtgtgtgtgtgtgtgtgtgtgtgtgttttgttttgctttgtttttggaaactctattagtgggaattctttatcagtgggttggagttgaaagtgagtttctccagaatttgcatttgtttttgtcaggttcctaggatcattatcaacctgcaaagcaaggacttaaaattctcaacttgaggttttggggacaaaacaggtaatcagtttgtcctgtaaacccctgtgaggattaccttgtggttacacatttttagtaaagacttttccctttctacttagcacttatttttgagacaggcagtttaaagtcctctctgtagctggatgcctcttattatacactctatcttggtgggcctttgtaaatgtcaccaagtttatctgctttcccctgtgtcttgctaagttgtaaaa

SEQ ID NO: 77352 - DNA, 1293 bp, Homo sapiens
cttaacctaagactcaagtcctaggtgatatttccataagtactatggaaataaaactctgtaatgtggaaatcctgaaaggattattgggagggctaaatcatgagtccctgaaaagcacttggcacggagcctggcacgtggttgcaactcaaattattgtagctatttttattgttatgttgtcaatgttgttgtgttccttgtctactaagaaccttgatgccagcctgggcaacatggcgaaaccccatctctacaaaaaatacaaaaattagccgggcgtggtggtgtgcacctgtggttccagctactcgggaggcttgatgtgggaggattacttgagcttgggaggttgaggctgcagtgagccatgattgcgccactacactccagcttgggtgacagagcgagaccctgtctcgaaaaagaatcttgatggcttctcattgcccagtctaccaagttctctctttttctgcctcactttcaagttcttttataatcttgccccacttattaaactgctcagagaatgccccaggatctagtcagtgtctcttcacccctgaactcgctgtggtccttctagcttcccagcctttgtacatcttgttccctggccacaaccttcttcctccatgttgtacagtcaccactttcattcactggaaaactccaatgtacagagaaaatgcagtttgttcattttgtctacagtgagccttccttcccagcacacacccattgatcgtcaagagaaagaataacttttgatcacacccgttaaaaaacttagttggatctgctaatccaaacagttccctaagataattctagtcttccataggaaaacaatgctattccctcaggttgtctcgcctaccccatccccagttcttcgcctatgatagtgcatgtgggaaggaatgtcaaccttgctcttctgtttatttcttatgaaggaggaacaaactcagggtccctaggctcggtggcctctgctgttggaggcaaggtttcttgccttctgggagctgcttgtttagctatactagcagttgaagtctgtggttttataacacatagtctagtctagtggttttcaaagacctacagtaagatatagatacattgtacaccacatatatgtatgtatgctgtggatagatgaaacaaaagtttttataagatagcatgtataggccgggcgcggtggcccacgcctgtaatcccagcactttgggaggccgaggcgggcagatcacgaggtcaggagatcgagaccatcct

SEQ ID NO: 77353 - DNA, 1019 bp, Homo sapiens
tagacagcactcacttttacacttggtctgaacggctcaacaaactcaggtgttaagatacactgacatctccttgatttctttcagaataagaaaaactggcttaagtcagcagatcagcaagatattcagtcttctttttggggctcccctgtacccctaagtcatataaagtctacagagacgaagttaggttggggttcagcttgattttttcatctaagcaagagctctgctcttgcaagagtgtaggggaaacttaaaaattaaatcatcactgggcatgccactgtgcctagtatacgtgtgaccaggtggaactagcaatggaacagatgtagacattttcagtcaaatgtgtgtctgctgcttttctaattctcttaaagagttcaggtgaatgatcagaacttgatggaactaattaatatttcacaggtctgatttcacatatttcacatgtatgaaattattttaaaagatcaatcaagggaaatgccaaagacatatgcacaaatcgggggaaacaaatcatcctcacgttcattcagtgagcagttgcgggcacctactgcataccaggaactgtgccctatgatagggatacgagggtgaagaaatcattcccagacagactatcccctgttctgtaattctcataggtttcttaactggaaatatccccaaatgtggctcttttgaagttcatattctaagcagatatagacagactgaagtgccaccctcatgagatccttcctggagatattatgcctttggttttaatttagaaacagaccctgcaagggggattgaagggtggatggttttcttgggagaccatcccaggaagacaccagtaggtgcaggagagggaaatgaggaagggaaggcagccagtcgtgagttatcccgtcagatccattgtgggcggtggagctcagccgcactggggcacgtggggcacctatgccagccacgctgctttcggtcatgggttgaagactgctctcagggcg

SEQ ID NO: 77354 - DNA, 1120 bp, Homo sapiens
agccaccacacccagccagtttaagagctcttgttgcactctgaaatttcctaattcagcaaactgaatacttttgcagcttttaaaataaaacagtgactctataaggactacttaataaatatctctaaattaagaccatcatgttttttcttgtgactagattcagcatttagaatggcctcttgacacttctggggaagtgtggcagtattgggtgatacagaaaaatcacatcacactagcgaggggccttcctttgtcagatgctgctctctgcattattttaattggttctcatattagcttaataatactgctactaatacctaatgataatatgcattaatgtcccattctacagatgaagaaaccaaggcaactgtgttcccagagtcacccattctttggtacccgactattaatagttctcactgtcaagtcccctgactccaaatcccaggctttcctccgagactgaccacctcacaactgctcctctgactgtttctatcccagggttgaagacttccccttccacacagaaaatggagttcccttcggggggaagaaaaagcaggatgggttggggaatatttgctgtaattcccaccggaaataggattttgcttcttcacattctgtgttctcacatctgaccattagtgatggaaggggctttttaggtcccttgtcagtgattttttttttttttttttttttttgagacggagtctcactctgtcgcccaggctggagtgcagtggcacgatctcggctcactgcaagctccgcctcccaggttcacgccgttctcctgcctcagcctccccagcagctgggactacaggcacccgctgccatgcccggctaattttttgtatttttagtagagacggggtttcaccgtgttaaccaggatggtctcgatctcctgaccttgtgatccgcccgccttggcctcccaaagtgctgggattacaggcgtgagccaccgcgcccggcctcattatttttctttatttgtcttcaccttttgactttctcttcgtccatccctgagcacgtttacctacttggtaaataaaaagtcctaattccagaattacccaaagattat

SEQ ID NO: 77355 - DNA, 1025 bp, Homo sapiens
ccgggcgcaggagccggggttccggccgcgatctgctgcagctcggccgggagacggcgcgacccggcggcggggccacccgcgagtccagcgtcgccgcagccccccaatgcggccgcgagaagcagcgggggggcaggcgatcgaaggtaacgaaaatggggctcatttcctgcctcctaatctgctcgggtttagcattgtcacgagaagccctccgtgttcaggctgctgcattttggggcactctttgattttttttaaaggtgtccgcccccctatttccacctggtttcagattgatttatagcttgcagcccaaatgggaaagatccagccatggcaagttgcttattttcattagttttgtctcaaaagtaagttcattaaaaaaaaaaaaagtttcttaggaatgtgtggatagtcgctttttaaaattttttttaaaaaattgcagacaaatggatatttataaaaataatcaaataattgatgcaattctgttaattacttttagggaagcacacttctgtgggctccccgggcgttacttttattttcaaggaaggaacgtgttaaatgtggagtttgtttggctgggcagagtttacagcattgctgtcgcaactgtttggctatcaattataaacagtgtcaaatctatgggcagtttcagcctcttttcaaatactgtaacgggttatcctgatatgacatctacagatgagtttccactgagggtaataagaagatttctctttttggagaaacattgttttgaggggaaaaccatgattgccggctgggaaggctgaagagactatttttcatgctttgtttatactcccgggatgacatttggggaagggaaatgcaatctttctccggaggttttaattgtgggattattaatttatttaatttattagtttcaattggttgggctcggggagccctccgtcacaggctgtgcttaaggtgacacatttgctagcagttgggacacatgattgcaaatgtaaaat

SEQ ID NO: 77356 - DNA, 1004 bp, Homo sapiens
catatttattttcccagataaacttttgatttatcaaatttcccaaagaaagtaaacaaaaaactctacagtccttctatcatgtattattaaaaatatatcccactcaaaatattatactattaaaataagcattatttgacaactggtattttctgactctgaggaagtatgctttttaaaaggcaagcttccgtctaaacaatggctaacaatgtaattaggagggcatttacaaatggcttgatatttatagttcacatttcaacttcaactctatttgttgcattagcaaaatgaaactcattaagccttattcttttagtccatctctccaagcttctgaacccactaatactcagctttcttgtatggaaatatgtaatctttcctacattacacttgaaagttcagctcattcctaaacctccagtcaaggagatgaacttgttgctttcagagaggccacatctgtgcactgagccattatgccatctgttaaagtggtcagagttcattttattgcctcctttgtggaaggacttgtactgtaaaaagcctgtgttattgaaaacataattttcttcatcattatgctttctttctagccagatcataacctgctagaaatctattgagcatagagggaaaagctcttcagaatagctgttcttaagagattaaatgattgccatctctgtcccatttcttttatctcataatcaagttcaagatgatactgggtatctcagctgaagtgattatatatttgaaatagaaatggctttctctccattcatatttcatattgttgatggtaggatcttttttctttatatttatatatgcttatgtttccttataaatgtccacggggtcaaaggttcaaactacttttttttaaaaggctaaacatggctaacaggagttgggttacattttccaattttctgcatacaaagatactagttgtataactaagatctggcttagattcatcaaaa

SEQ ID NO: 77357 - DNA, 1010 bp, Homo sapiens
ctccccccagggagctattttcagtaaaacttccatatggggatatatttattactaaagagtgtcaaacgagtcaaatagtcagaccatgtagtcactgaaagagagcagcagccgaggaatgcgcgcagacaccgggcaccctggaactgcattccttctccgcagaagtcaagcacggttgtttctctaaaagttctgcccgtaacatcttttctttcattcctttcttataaactcacattatgtaaactctcgaagtgtgaaatggttttccttggttggccatcactcacaaaatgattttatcaaacatgaattttccctcagctatcagctgcacgcaatgggaaactcacaaaatagagaagtggttgtgtgctgagcacataggcattttatagcgggtggagggtagaaggtggggcagggggtgggaggtggacggttgggaggagatctggctgaagtaacaaatgctcctcatagaatatgttggaaatagagaaaggtctgaagaaagaaaaacaaaacaaaacaaaacaaaaaaacaaaccaaacaaccatattcataccaaaccaaagataattatcattaatattttggtattgattcttccctgtttctctctgtttttgttaagatgagtgtgagttttatataccatgcttttcaatcattttgccattttcctttataaataaccctacaataaacaaatttgtcttcacttttatcttcttaggagctgttcctagatatcaaggtatcgtatcagagagtatgaagttattttatcatttttacagctcctggttcttcttacccaattgcctaataaacaaattctgctcccctcactgtatatgcccttctcgtcctgttctcaccaatgaccgagtattatttttcaaatgtttacgaatctaataggtggaaagagtatcttatttttttatttctccaattgctaataactttgaacatttttacatgtttattagccttt

SEQ ID NO: 77358 - DNA, 1048 bp, Homo sapiens
gactccaccaaaaaactattagaactgataaatgaattaagtaaagttatatgatacaaaatcaacttacagaaatcagtaccatttatatatgccaacagtgaacaaactgaaaggaaatcaaggaagcaactccatttataatagctaccaaaaaaaatataaaatacctaggaagaaatgtaaccaaagaaataaaaaatctctataaggaaaactataaaacactgataagcgaaattgaagaggacacacaaaaaatagataccccatgctcatggattggaaggattaatattgtgaaaatgtcagtaccacccaaagctatctacagattcaatgtaatgcctaccacaataccaatgacattattcacaaaaataggaaaaaatgctaaaattcttttcttcttaatttttatttttccagttgaacccgagaaatgagtcaaaaccctaatctttaggatgttccagaagtactcactttcttccatcagtttatttcctcaccattgcccaaaactcaaatttacagcaatctatatagtactaattagaaaggatttcggccgggcgcgatgactcacgcctgtaatcccagcactttgggaggccgaggcgggtggattatgaggtcaggagttcgagaccatcctggccaacatggtgaaaccccgtctctactgaaaatacaaaaattagccagcgtggtggcgcgcgcctgtaatcccagctactcaagaggctgaggcaggaaaattgcttgaacctgggaggcggaggttgcagtgagccgagatcacaccactgcactccagcctgggcgacagaacaagattccgtcttggaaaaaaaaaaaggatttcataatgaaattcctttaattatgataccagtgctcctattaaaatcaggttttgtgaaagacttttttcttaagcccaacccagcctccgtggggggaaatcctaactaagaacttaaacaaatttttcacatgtacacttatgacaacatttttgaaacactaatattttgaaaagttt

SEQ ID NO: 77359 - DNA, 1028 bp, Homo sapiens
aacagagtgagacaacgtctcaaacacacacacacacacacacacacacacacacacacacacacacacacacacacacacgttgagcatccctaatctgaaatccaaaatgctccaaaatctgaaactttatgagagctgatctgacgccacaagtggaaaattccacacctgacctcatgtgactggttgcagtcaaaactttgtttcataaaccaaaattgttgaaaatattatataaaattaccttcaggctatacatatgtttataaagtatcagtgaattttgtctttacatttgagtgccatcccaagatatctcattacgtatatgcagatattccaaaatctgaaaaaaatcagaaatctgaaactcttctggttccaggcatttcagataagggacctcagcctgtatcagcagtgtaaacatgctgggcctctgcctccgggcatcctgctgtgttctctcaggcagctctttctggtttccacagaagcactttcaaacctttgccacttttctcaggctcctgccccattttccctgtcactctcagcaaatggccttgcctcctatatctccaagaaaatagaagtcatcaaagcataatgtcttttactttctgcttccctctgcagttactatacactgttggtaaggatgagggtgatgggggatgatggctaactttcttcagcactaaccactgcccgcttcattctggtcacaatggcaggggtactatttctcctatctcccagccccagacaaatccttccaccatagctttggattctgcccttttctacttcctctggtcctaactgcatcaattatcttctctgtctgaagctctgcattaagctgcagtcacttctctacttctcatatccaaatctctttcagtccactgtgattttatttctgccccagtaactctgctgaaactgccttgaacctctttgttgctatccgtgggtacttcagtccttgcagtattgggcactcttgagcctaccttcta

SEQ ID NO: 77360 - DNA, 1972 bp, Homo sapiens
ccacctcacttgtttccctcttgtttttattcttcccatcatgaccccaaagagacctcatgttccatttcttaacacatataatggatcctcctgtaagtatctgggctgtggcagactaacagagagacctccaacctcaacaccagctaatgccccaggctcacagtctgaccactctgttagaaaaagaagcccctctctctggttgtcccatccccattctactttgctctttatttgttctcactcagcctccacctttttcctctctcaaacttgtgaaagatgttcctggaatcctatttttatagtaaatacacccacctccttaactggatggtagaacattgtacctgccttcttgccttaactgaaatttgactcttccctgagagcttttcccaggtgagagaatcctgctccagaagcacagtgctgttcggagtccattgtttcccactctgttgtagaccctactcttctgatcatcctgctatctgactgatttgtcctctgtccataatactgtcatccactaacctcatagtcacctatgtcacatatagcctcccccaaaactcaaagccctgccatcatcaaaactactcagtcctttagattttcatttctttcacatcatcaattctagtgaatttatctgtgttactttagccgcctgcttccttagctataccctggatcattaccaggaaacacatctttgctaaaatatcacattgaaataactcttttttatgagtcaggatctctgatataatgttgggtagtagaaattatagtggacatccttatgtgcttttagcctttttaaggaaatacttctaaagtctcaccatttagtatgatgttgctgtagggttttggtggaagcaaaatgcgtttgtattcccaatctgctcaatttttccattataaatatctgttgggtttctttgaatatttttctacatatgtgaaatgctgttattgtttttctcccttaatctgatatttgcagcattaaatattttctctccttctgaaatttcttttagtttaatgttagcactttcccttgtgtcttctgtgtttttttgactttcctttcagggtttttttggtttttttttttcctttttatctctctgtagtgcatattgggagatttccacagttatacattccagttcatcaaatctcttttcagctctgtcaatcctgctaattatataatttttcattctaagactttcagttggttccttttcatttctacctctttttatttcacaactttctgattttacaatcttgctagtaatctctattatgactgaggatttttaagtctttattcagagtgttctgtagtacatatttcctcggatatgaatctcctcattcattgaactgcttttaatcatggtgcatatccttttgtaattttctttaattaagagcttaacttccctacagatttgccctataaaggttctctttgggaattgtctcaaccccaggcctatgaattcctcagctctgaaacaattcataagttaggcatagcttgggaatcctactgcagggaagtgatttctatgcccatgtgaaatgcagactcagaagctagttatatataggtgtcttatcttcatctctaatcataggtaatttggggccttgaccctcactgaaaaaaaagaaactgatatcacccccacagctccccgccccacccctagatttatgtggagtcatgctcaggattcatattcttttccctttgcagatgtagaaacctcagaccccatgtcttttcagcacctgcccctacctccaatctcacaatggccatagtcttacacgtcactaccagcatgggtttattatcgttttttattcacagagacttttctttcttgtttttaaaaatggttctatcagtcagggccccagcagaaaacaatgt

SEQ ID NO: 77361 - DNA, 1030 bp, Homo sapiens
ggctccatcctcagagtttctgatttggtagatattgtggtagggcctaaaattagcatctaacaagctcccatatgatattactggtgtgcagaccacactgtgggtcgcacagtctagaaacattcggaatgccaaggtaaggaagacacatggtgtctgtaaggcaggtaggattaatattaatactccatggtgtgctaatattaattatactgtatcacagtgtgtgtgtgtgcacaggaccatgtgttctaaaatcatttcagagaacatagtatgtgcagaggcttagagaattgaaactacatgacacattcaggaatgtgaagtttgcatcactgcagcagagagcatgtggctggccgggaggcagggggtagtctagtaggggtggggaggagaggaacatgtggcagaagagatgccaagatctaggtagagctctgatggtaattagggggcttgtgtactccaagagattggattgctttcctaacctgagaacaagagaaatggaacagagaaaataaaagattcactagagttctcaaggtggtagaattaatgatagcgtagaatttatctaaatataatctagttaacccattaatcctgctgaaattacacttcagttgaaagtcaatctcttgggtatctggtttcttcatttctggtcatttttgtgcaccatatgatgacttacgtgttcttaaatatgacctgttttccattattttctaggttctttttctatccagtgaatagtcagccagtaatccttgtcccaaattgattataataatgaacaggtggaataccaagatattagcaataagagtatcttaccaaaaaaaaaaaaaaaacagatttccttgttacaaaagcaatgcatacttattacggaagctacagacaagcaaagaaacctcccacaatcccactcacatttagaaaaccactgcaaaaccccctagacactaactttttagattcttttccatgtagatgtgcattcttccctaccaaa

SEQ ID NO: 77362 - DNA, 1033 bp, Homo sapiens
ttcttagctgagaacaatcagcaggtaacactccagcagctgggggatctgagtggtacactacagcatccacaacagtgtgtctccattttgtgtgtggttttccctttataacagacttttaaagattaactgattaacttctggtccagattgcttcaaataagagtatcttcactgcttatgcataatcttctgaaggtctcattgtatttgatcttctttgcatatgacagttgtcccatctatgatacaacaagactgcgttctcctgaatcctgtaaacttaatcacagcaaataaacgtgtgatgtgttggaagcacaactgatgttagggcctctgtccactcctaagtattttccagtatttattttgagattcatggaaccaacttcaggttttctttttaaatttccaaagactcttttggcattcgatggtatcctttggcaaactctccacttttgtactagagatcatcttcctttcgtgccctatgacctgtaggtctctctctgcatgttctttggtgactcttccgtctgctgcaaataactgccatccctcttccttttactttagccttttgccttagacccgcgtctctttatgatgatcccaaagctcctgacttgaatgatggccaatctccaggacgtctaaatttcattttggaatatagtcttccaattcttaaaacaggagccctgtttatatggttgttttgtttattgttagatccaaatttgcttttcgtttctctcagcttgctttgccccaaattgtcaatgctaaagtggaagtctgaatccctttgccagtgtgaccataaatatagcacaaagatcctatgattaccctatagtgtctgttttccttgagcattttagcatgtgctgaccttttagcaggaatactattcagcctcatttatgcttagcccttcatttagccaagttttgttttttccttggtttcaaattttctctctttttgtgaactgggagctgaagcccttcatttgacttgt

SEQ ID NO: 77363 - DNA, 1173 bp, Homo sapiens
ctgactaaaaaacaagacaaaggtatagcaccagtagtgaccagaaatcatggaatcattcagcagttcaggtcctatttgctgatggtgaggcaggagacctggttcctggcttcatactcagtttataatctagtcaggtaaatagactttatgtaaataattacactaaaaacaagatcaggccaggcgcagtggctcacgcctgtaatcccagcactttgggagaccaagacagatcacttgaggtcaggagttggagaccagcctggccaatacggtgaaaccctgtctccactaaaaatacaaaaattagctgggtttggtggcaggcacctgtaatccccgctactcaggagactgaggttggagtgggccaagattgtgccactgcactccagcctgggcaacagagtgagactctcaaaaaaataaaaataaaaaaaagataaataaaacatttttaaaaatgagatcattacacatttctctacctgctgtcatagaaaaccaaagaacatcatgaatgattatagcccggggcctgattgagctggagtgggggtggcttctctgagggagacatgtttcagcctagacaaggagatcaaggctgggtcagccaagtgacgagggtgtgggcccagggcttaggagagcattttaggcaagacgcatggtgtgcaagaccatggggaggaaacactcttggtgcctttgagaagtggctggtgaatcttgaagagggagaacctgcaggtgctggagggggcccttggagaggccaggaggcagctttgtcccacaggcctcgtgggccacgttttgaggatagaacctgaaaggcatggggtctgacattaggaattttaagcaggggagcaacagcttctactgtgtggccctggccatgcgtttaattggggcttaaagaagggaatctactattggtgagggcaattcagatctgaagggaacagaaggggctcttgccatacggtgtcatttaggggtgcccagaagggcccctgcccaaaaatgtctttccaaccatccctgacggtgtctaaaatcctatcattgaacttcatctcctttaaaacacaagtcctctgacagtcaagcaggatcagacaaaattgcaggatatttaaaaattttgtcaggccaggc

SEQ ID NO: 77364 - DNA, 1051 bp, Homo sapiens
tgaatgttcttaaccctgcctccctttgtcttatcaactgaattgtttaagacccaacgtaggtggccaggaggaaacatggcaaatagcaatagaacaaatggagagaaactgttgaattattatatgagaaggcatcttgttcataagaacacaaaggaaaagaatatggtaatgtaaattaggctgttacagacttttgtcattctgtggagcccctgaaactttcttaaagggatggatgataaaatttacatcttccttttcatcagttacttagtcattagttcagggcccatctctccatatgtaatcactgcctagccttcccaaatcggagccccgtcatagggctgcagtgggatctggagaacccactgtcagcagtctctgttctttaaccctagacacaggaacaatgcagctcttccccaccttttctgaaaaatgagtacaaattgcaagaaatgcagcacagattgtacgatgtcagtacattagcagtgacatgggaaatctgatggagtcagggggaaaaggtgtaaattgcaggataatatcaaggggaggtcagtatgttagtaatgcagggaatatgatggacttaaagaaaaggtataaattactgggtaatagaaaggagaggtcagtacattagtaacatgggaaaactggcagatttgggaggaaaaggtgcaaattataggataatgcaaagtaggggcatcactgtaaagatgcttcatttcctgtttataaggaggagttggggagggacttgcagtggattcacagataattgcctagaaagtgcccgggttggttgctacctctcctccaggcaggaagacttcctcaccaatgaggtggtcagccccaggtccacccattgaaacaactgtacagagattcatcctgggttggcagaaggctctaccctctttcagataatagttatatagacagatgcctatattgagtgagaatgtagggaaatttatgatttccataggcagaaaccagagaatcattagaagtttgttttgggaga

SEQ ID NO: 77365 - DNA, 1041 bp, Homo sapiens
tctcctgatctcgtaatccacctgcctcagacttccaaagtgctgggattacaggcttgagccaccacgcccgctggctgggtttttaattgaatttatattgaatctttagactagatcaatttggggagaactgacaatgccaaaatgttttaagtcttccagtgcatgaataaagtatatccttttgtttttaaaggtcttatttaactttccttgctgttttgtagttttaatgtaaaagttttacacatattttatcagataattctgaaatatttggtttttatgtagttatatagatttttaaattttattttctacttatttagatatacaattgttttttatatgctggtcttacaccagcagcatgactgaatgtcttagtctagtccgtctgttgtaacagaataccatagactgggtggcttaaacaacagaaatttattttctcacagttcttaagactgcgaagtctgcaatcagatgccagcatggtctggttctggtgaggaggctcttcctggcttgcagatggctgcctgcctggctgtgtgcttctgggtcctttcctggacatgtgcacagagtgggggatctcttgctcttcttataagagcactaatcccttatgatggtcccactctcatgacctaattacttcccaaagacaccacctccaaatactgtcacattgtgggtgagggattcgacacagaatttagagcaggagtgggcacacacattcagtacataatacaaagttaacttattctagtacttcgtcttagtaattgtaatagtatatattttatgttttctaggcatgcaatcaagtcatcttcaaacaatagtagttttatttcttcttttccaattcttatgtcattgatttctttttcttttcttactatatcagctagggtctcccacatagtgataaataaaagttatgtgagcaggtatcctgtttcttccccatcttggtggggggaggggaaaactttagtatttcacattaactatggaatatgcaat

SEQ ID NO: 77366 - DNA, 1055 bp, Homo sapiens
gagctggcaaatctggagtctggggagggcccactttctggttcacagatggtaccttctaaatgtgtccttgatatagtttggacatttgttcccacccaaatctcatgttgaactgtaatccccaatgctggaggtggggcctggtgggaggtgtctggatcatggggacagatccctcaaggcttggtgctgtcttcatgttagtgagttcttgtgagatttggccatttaaaagtgtgtagcacttcccctgctccaactcttgttcctgctctggccatgtgacatgcctgctcctgctttaccttctgccatgattgtaggcttccccagaagccaagcagatgccaacgccatgcttcctgtaaagcctgcagaaccataagccatctaaaccttgtctttataaattatctaagctcagatatttctttatagcaatgcaagaacagcctactacagtcttcatatggtgaaaggagagaactctagtctcttcagccccttataagggcaccaatcccattcatgggggttcagcctttatgacctaattaccttccaaaggccccacctccagccatcacattggtgattaggttttaacatatgcatttggggcaggcacaaatattcagaccatagcaacagcattttctgttttatttccttctttgtaattctcatcattgtattggccgtattatctacctcagtatgttgaacagtgacttaagggcatggcctttaaatgctgctagagggccatctgggatatagctgataactaagagcttgcctctctacaagtatactttagattatttttttagaattgaaatgagaagattcactatttgctatatccatttccaagaaaatatattatagcttcaagaaaaatgcgagtgttaacacgtgctgaaatatgatacagatgtttaatgtcttactgtaatattattttactgttcatagtcacctgcttttttgatccctgcctaagtttgctttctttattccataacacctgttcccaggaatatatttac

SEQ ID NO: 77367 - DNA, 1031 bp, Homo sapiens
aaaaagcaataatttacctttcatgttggcaaaggtaagctctagaagtctttctgtgatttgctgatattaattccactccctggatgtttgttttgctttattctttctaactctccctgattctgtggtttaatagattttcctcctgtttagaataaaattgtagaagtcagtaccacatttagtatctatctccaggcatggccaatccttcccactggctgtgttccggaaggttctggaaaacagctgacaaagcctgaatgtgacagggcaagacattttaggcagccctcatggctttttcagctgtgcttcttattttcttatagatgtatgtgtggtatgtaagtgtgtatgatgcatatatgaaatattcaagtcagaaaatttgtccatttatgttcctcccaggttacgaaacaaaatattccattctagccatggttaaagccccctgggtagccctgcctgattgccctagagatcatcactgtcctgatttttttttaatcattcgtgtatgtctttatattttatgacatggatttatatatcttaaatagtacagagtattggtttgcttatttttataccttatataaatgcatattgctttttctcttattatattcttaggaattatccacattgatccatgtgtctttcatttattctccctactgtatagtattctgttggggcaccagggggcacaataaccagcaccttcttttcccctccagaatcaattgaaaattcgactccaagtgcaagagagtaatagatagaaatttcagctttcttagtgacatagctctattggagggattggtttgctaaaatacagcccacattaagcaggtttaccctttagagtggagtggcagggtctttagtgtattcatatcagcagttgacttgtttcccaagtggttgggccagttcacagtattaccctcagtgcaccagaattcctttctatccatatactcaccagcacttgttactgaactctagtttttgcc

SEQ ID NO: 77368 - DNA, 1032 bp, Homo sapiens
catttgttatattcttggaagccttgagattaaggattttaaattgggctggcatatttttattaatctactggaaagtggttattggagcaccttctgtacaccaggggccattctggatgctgagaatagagccaccaacacagcaaacaaggtccctgctgtcagggagttcacagtttccttgggagaagacagataataactgagtaagcaagttaatttcagatagagataaaacactgcaagaaaagtaaaacagaataaattatagaaaacgtttgaatggggaaggggttgcttaaaattgggaagttagggaagatgtttttgagggctgacatttgaactgagacctaaatgacgaagagccatccagaaagaggaaaagcagttgcaaagggtctgagatgggtataagcctagagggactgagaaactaaaagaaaaccagagtggctgggttgcagcgaacaagaggcagcaaggtctgagcaaaatttgagaggtaggcagggcaagatgctgtgttagtcatgggtgctacctctttcttttatatgacggtgagtagcccttatcggaaatgcatgagaccagaagtgttttggattttggatttttttttttagattttgtaatatttgcattatacttactggttgagcatgcccaatctgaaaatttgaaatcttatacattccaatgaacattgtctttgaatatcatgtataatatcaaaaagtttcagattttggagctttcagatttcagattctggattaaggataactcaacccatattatattctgtattgtgttacattccattatgtcatatcatatttcacaccatgttgtgtatttatattgtattatatatttatgtccctgtaccttacagggaaatgaagagtcaaagaaagaccttagatttctcaagatatgtaggttttctggcattcccagtgtacaaagtcatgctagtgggttgctgtatcctggcttggggtccccagcttcttttcatgt

SEQ ID NO: 77369 - DNA, 2120 bp, Homo sapiens
cctcaacctctcgagtagctaggattacaggtgcccgccatcacacccagcaaatttttgtatttttagtagagatagggtttcaccatgttggccaggctggtctcgaactcctggccttaagtgatccgcctgcctcagcctcccaaagtgctgggattacaggcgtgagccactgcacccggtcactagacattttaaatcctctcaagacccctgattgtatgtgtggccttcacctcacacttaacgtggccaaaatgcactcctgccttctctttgtcccctaatcactgtaagagagatctttccctgtgctcttttattctcaggcttatatctttctttgttttggaaacacatatttgttagaatcttctgcattgcagatactgggattgtatgaaaatgaacaagatagaaactgctctgccctttaggagcttagagtctagttgaggatgtaggtggttagaatccaagatggttaatcctgaaagatgactacaaagtactatggagaagaagaacgcttgctgcagactggggagggggcaccaaggctgacatcagagaagtgatagccggcgtgagacctggaggatggtctccatttgcctgacttcgccttagccagggaaggagggagggcatattctagacagagtgcatctgcagaggtcagcgggagagcatgaataacagagttgttacgcatagttagcctactatcaaatacacctatttttttcagtgggtgggtggaacgagagatgaatgcagagtgatgagactggagagataggcagtgccaggtgatgagggtcttgtaagagttcagactttatcctgagataccgggaagccatcgaaatgtagggaagtgaggtgatcagacattttttgttttgttttgttttttgagacagagtcttgccctgtcgcccaggctgaagtgcaatggcgcgatctcagctcactgcaacgtccgcccccccggcttcaagctattctccctgcctcagcctcccaagtagctgtgattacaggtgcatgccaccactcccagctaattttttgtatttttagtagagacgaggttttgccacattggccaggctggtctcaaactcctcgccataggtgatccgcccaccttggcctcccaaagtgctgggattacaggcgtgagtcatcatgcccagccgatgtgatcagacttacatgatctctcctagtgtagtgtggagaatggattaaaatgtggcaagaatagcctctatttgggctgatcctagggaccgttttcccaactcagccttctctttaactccacagtgtttgtccagcccagcatgcatttttctgattagcatgagggttcatctcaaacatcagctccctttctctagcttcctgtcttaaaggccaggactgtgtcttttccctagctctgggctggctcttactctacactaaatgtgtcatctggagcaccaactggatccaggctttaccattgcccagagagtctgttgttttgcctactatcttggctcccctgggattttggtgccagcttagatctagcctgagttcagtgatctcctttgacccctgaaattcattgccattcacacgttggctcttcctgctcagccagtctagaacaaacctgccgctgagggaatccctctcttttcccacttgcagttgagtatcctagatacttcacaattgatctccattgtatacctacatagaacaataccttcgataagatggattgaggtaaggtgaggagaaccagctacaggttgagtatctcttatccaaagtgcttgggaccagaaatgtttcagatttttttattttttcagattttggaatatttgcatatcataatgagataacataagaatgggacccaagtctaaacacaaaattcatttaagtttcatatataccttatacacaaagcctgaaggtaattttatacaatatttttcatagttttgtgcataagaagtttgtcttaaatacttatgtatggaattttccactcgtggtgtaatattggtactcagaaagtttcggattttggagcatttcggagtttg

SEQ ID NO: 77370 - DNA, 1035 bp, Homo sapiens
gctcagtttttccagtttgtaaaatggagataataacatcttcccctcagagttggagtaaacatcacctgagataacggatgtgctgattaagtgctcctcaccctgtccttttctagtttaagcacagactcagttctttttgagcctccaccacatcccatgctcttagccagggccttaggaccggagtccctccttgggtgtgatgatgcctcatgctgcgttaatgagaagatgtttccaggttgtaaagttccacaaggattttgtaaagaactcacaaaagagatactcatattgttagctatatgtggtgttcagatatttgcccgtctaccctgggatgtttccatgttgatctgaatctgcctaaatgtttaagattggagaagggagcacagggttgctgacaggtgtagcaacagtgtccccaacagttcattcatccatttattccacaaacttttactcaacattattattgctgggtctccggcatacaaagatgaattcccagagagcctgaagatgcttctgagagctgcagactcaaggagcaggatgctttctgcttggcaggaattgataagcagccctgatctatgaaagagcaagaaagataaatttaaatattttttaaaatattattttacaaagttataagactgtaaaaaaaattttaactttgaaaaactctgatagttgtattaagcttttgatagcatcatgtttggaagaatgagcaaatcagaagaagccttcagcgtggttggtaaagtcataaaacactgttaattaggagctttagcccagtatagaattttaaaatacaactgtataaggtatatatattttttaggaatagcacaactaacatctttgattagattcgattgaaagattcagacccttaagatttagagattacggaatcatagaactggatggtggctgggactttaggaatcacatatgccatctcccttattttctagctaagaaaatggaagtcaaacaaacgtatgtgactca

SEQ ID NO: 77371 - DNA, 1042 bp, Homo sapiens
tggtacttgttaatggtcaagtgttttcataacctcaaaatgttattttcttgtttagaaatgccactgcctagtaatgataatgatggagtagactgaatttacaggtagaataaaatgtctgcactcccatgttaattgcagcattattcacaatagccgagatatggaaacccatattaagtgcccaccactggatgaatggataaagaaattgtggtatgtgtgtacagcagaatattattcagccttaaaaaagaaggaaatcctgccatttgcaacagcatggaggaatctggggacattatgctaagtgaaagaagccagacacagaaagacaaatattgcatgatattacttatatgtgacatctaaactagtcaaacttggagaaaaagagtggaatggtagttgccaggggctgggaagtggggaagatggggagatgtcggtcagaggatacaaaattttagttacagggtgaatgaattctagtgatctagtgtacagcatggtaactatagttaatgtgttgtgtacttcagatttgccaagggagcagatcttaagtgttttcaacacacacatacacacacacacacacacacacacacacacacacacacacacacgaagcatgtcaggtgatggatatgctaattagcttgactgtgagtcattacacaaagtatacttttataaaaacgtcatcttgtataccttaaatatagacaattttttgtcagtcatacctcaaaaaatgtctacacagacttagtgagactcatgacatgagtcatgttaaaggatataagaaacaaataaaagtttaaaaatgcttttcttaacccaagtcttattgttaggattcctcataatccagtcatgacttcaattagaaatccttgccgtgggatatcaagactcttgtccaaggagaggaaggggcaggagggtctcactcttgttctctccttgtaaaaatttaactctgtttgcaggagagagtatttgacgaatacatgaacaaataaatgaatga

SEQ ID NO: 77372 - DNA, 1337 bp, Homo sapiens
tctgtccaaggcccccgccctttgttctgacccatactgcagggcctgcactgttaagtgggctcaggtgcttggacctgctcttggccgatctgagatctgaagcttacttaccacttgccttctttctttaatgtgtctgcctccccatcatacattccacagtgaattagtgtttctctctctctctctctctctctgtctctctctctctctctcatcaagtgtgatgtctgagaaatctctaaactctgctatccaccttcctggatcctcttgcttagatcccctggtgccggccttgatcccagaatgggaccatgtcacagtacaggcagaaactgatctctatgtgaccaaagtgtttgggctaccagaatctgtcttctgtactcagttcccccaccctggtcctgtgtcattccagaatgccttccatttcatgcagagatctggtatgcctgtcactcaggtcagacaatacccctattgctatccaggagaaatgtaactcagctggcttcagttccctgttatagggatggcacgtagttgacatgcctgccactgacccctcctgtacctgtggctgccctcttctgcagaactcagagttcttctcagtacaataccccaagccagctcattagagttgtcatatgagatcaaatctcttgctctctctgtaaggatgtattctctgtgatggttgtaccaaacctttcccactactgtgctttgcaggtgatcttgcctttttcttcatggagaggatcatggcctcttcctgggtttactgccttctcttcatctcttttctgtattcctttaattttctttcttcttcttcttctttttttttttttgagatggagtctcgctctgttgcccaggctggagtgcagtggtgtgatctcggctcactgcaacctccacctcctgggttcaagcgattctcctgcctcagcctcccaagtagctgggattacagacgtgtgctaccatgcccggctaatttttgtatttttagtagagatggggtttcaccatgttggtcaggctggtgtggaactcctgacctcaggtgatccacctgccttggcctcctaaagtgctgggattacaggcgtgagccaccacgcccagccttcctttaattttatttctgaggaaaaggggtctcttctttttttcctaattcctctcttttgttctggtcttctctcttcccctttttttgatctaagacatttctccatcagccattcccacttctgtttataatgcctatccctgcctgaagatatactcatatccatcctagaaagctgctctcc

SEQ ID NO: 77373 - DNA, 1043 bp, Homo sapiens
attttggtttcttcatttaagctaacttatgaaggatatattattagattggaaggaatatttagtctcttcacatttaggaagctcagattttgaagtcctctctcatgttaaacccatccggatacaaattcgattcatccttcaaggcccagctgttaagatatttcttatcttgaaagccggccctactctgccaccttgcaacccccaaaaaggaaattgtcttcaccttctgctttaaactcctaatctttcataaatatctttcttcttcatgctttttcatagttatttgtacccatgtgttatttccagtgtcagaatggaagctaaacgtgagaaggcatagtagggtattcatcatcacactccccacacccgtagcacagttttgtaggtcttgaatagatgacttcatcttatgtaaatgaatggcttatttcattggaaaaaaaaccacaggctttttattactattatttgttttactctttaaataccacactggcaccatgttaaggtcaggagtctagtcaagccccaggatgagttctaggcccagctctgcctctgacccatttttccacaaatcagtgaacctctctggactgcactgtcatctgagaaaaaagggtgttgtgttatacaatctggcaggcttctccagctctgaaattcactggtggcgtcatctatcatggagaatggcatggccgtctcctttattttccctgcataccacagatattattcagaatccaccacagcatgaatatagatgtggtctgtcagtgtgacaaagactgttctcaagaggaaattactgggtttgacagctacccaaccctgggtttagtttttgggatgtcactatagcaagtgttgtggccgatgtatccaattcctcatctacatatatggctgaatatgctgttcttgctgtaatagcatgagggctatttttcttttaattcagctgtcacataggaaactgctgccatggtttccttctatgaccaaatgttgctaaccctttcagt

SEQ ID NO: 77374 - DNA, 1038 bp, Homo sapiens
catgccctgacccagcgtccaagatcctgagtgcacaggcagattgccacatgatgatgtaaagtggcaatatcgaggcaccaaatgctcccatcatgactggagacgtttaaagttatatcctgatatttttggtgtaagaatccctttcttcatattacacaagggaaggtcaaaggacataggacatctaactctccttttttgaatattagaaattgggtgaaaatgagaatgtcattgcttgttgaataagatattttcaaaatcagagtattagtgggggctgggtcttaggaatgcaattgtaaaagggagtgatggatattcccttggcagaaaaattatatagatgttatatcacagccattataggggtaaggactgtcaccagcttgggtaaaacaaataggctcttctgttatgctgattggaagagtcttacagagctgagggcctaaaggaaagtgatttcagagaacatttactttttcaagtcatttgcgtctcttttgaaatgttatttctcactgtaatttttagcttcccataattcctttctgccagcagccaacttgtggagtatcattttcctggtccatctctaacaagagaaaatttccagtcattattttgtgcttcagaatgattctgtgtatgatcatgcaacttcagtaagatcacagttattaaaatgagtacctaatttagtgactatgactattggtctttgagtatctgcctgcttccaggtatagaaacatccataaaaacacctacaaatcatatttcattctttgtagccatacatagataacagtcatcagctataccttctgtgtgaatggcatgaccgaagaagtagacttcttgaggtcccaacttttatttcatgaaattttgtgtcttctctggaatggaaatgctttagtttttatttcaatggttttgtttcaaaattatattgtcagagattcccttttctgattgtcctgttgcacatgcttataagatggggagtatgaatgtgtgtaagct

SEQ ID NO: 77375 - DNA, 1038 bp, Homo sapiens
gggtttctttacccaggtccacaattcactacacaggtccagaaaaaaagctgatctctgaaaagcactaggagaaggcagctagagagggagaattctaattaggccggggtcctctgtggcttgaatgactgaataagtttttatagtcttcaattcagtgactgccagattcttcccaaagaaatttctagagatcaagagtaggctctttcggaagtacttgcccgtattacactttaattttacaaaccaaacaacagcaattcaaccaatcaaacaacaaaaacaatccaaagaaagagacttggacataggcatcaaggaatcatttcactttataatttaatagaacactggtgtatcattcattaattctgaaagtgagaactaaatgtaaaataattttgtaaggtttgtgaattgttgcctaggtattctggtgatgtttactttagtgattttatcattaatgaaagcaatgtgtttttttagaaaacatattattagggttcataacgttgacattctgttgtgcaatcataatctcctgttttgttttagtcatagctctacagttgaatgaattcaaagctcacctccaggccttttgctatggtttctgtttagctgaagtttatcctcaagtaggggtcataagaattatattccccactgtctttcatgttcaaaaatgcttatctgggtcattgtatttgaataaaaatatgtaatggattgaatgctaacatttttgagtcacattctttttctttgagaacattggttatgcctattttggaagtccttttaagttttttgctaatttttattttaattgcttgctttgctcttagtatattaccatgtctcttcgtgtattttcaacaatatctattctcctttgtgctgcatccaatttggcatttttctttttctgttttggttttacttttctcttacatttctttcttgagctgtatctgctgatgtctcatatccttttgttattttgctgtatcttgttattttgtagta

SEQ ID NO: 77376 - DNA, 1036 bp, Homo sapiens
actcaaagtctaacaccgttgttagagtgcatgtctctatatagtgctatctctggtactgagagaatcagcaaaatgatagggccagaagtgaccttcaagatcagccgggactgcactgaaggaaagtattattagaatcttaaattattccgatgagacaatctcagattaccttatctgtgaaatcaatcgtaaactactgcttttctcctagtaatatattaaaataagttttgcacaaatgttatggctgaagtaacagttgataggtcttattaaagtaagtgaatattttttattgttttcaaatagatcgtggatttttaactttggaagatttcaaaaaagcatttaggcaggtggctcccaaattaccggaaaggactgttcttgaggtattcaggtaaggcatcaaaatccttctgtacaccaccttttgatttaccatttgcttttacatgtttttgactttatggaaagaacttatttattctgatttttgagtctggaacatttttctcttgcagcatagtgtcatggtccaggagggaaatctatagttagctatgggtccttccatgcccctgacagtgaactgtaaagttgggggagcgcttgcacaccaggcaggtgcatacaagcacttatgagtaggggcaggagaggaacaggaagaaagaacttcttcagatacttacgtgtgaaccaagggaaaatggagctttagtaatatttagcatggatgctggtgtcctcacatggtctgtatttcagacaaacacaggttacatgtggttcttgagttgtctggagagaacagctggagttgcctgatggtagcccccttgttcccttgctttcaaagctactgacacatgttgctgttcacacatacctgataaagtggatttaaagattatattatgtggttcttatgaacaaatcctgacaaaatggacaagtggcttaaaagcagtttttgttaggaaactgcagattgaaggtaatattaatagtgcaaacacatgctgac

SEQ ID NO: 77377 - DNA, 1101 bp, Homo sapiens
ttggttgtctccagagcactgaacacttcacacagctgaatggcaactcttcatctcgccccaattttgctcttcccccagactttctcctctctttaagtagctcttcaagccagaatctacgggatattcttgacatctctttctttctcacctgccacatctagttcttcatcaagctatgtcatttagattctaaaatatatctggaaaccttccactcctctcatccccactgccagcaacctggcaaccacatctcttgccagtaggctcctaactggtctctctttttacatttttgctcccccacctccgtccttttatcaggataatagccagaaagatcatgtaacttcccaattcaaaccttctgttgacttcctattgccacttaaataaaacccaaattatttactgtggcccacaagagcctgtgagttttggcccctgctgccctccccaacctcatcttgtatcacttctctctggctcactttgttccagccacagcagccttttttcattttcccaccttgccacacaacagcctcggcacaggctgttcctactgccagcaatgctcttcttcccaacattaggcagttggtattgtctcatggtttaggtcttggcttaaatatctcctccttgaagggctctctctgtcaccagagtctacttgacatgaggattcctgtgaatctttttcacaacctcctgtctttcccctcattgcccatgccacagtttgtaatgaggtgtgcatttgcagttgaacctgtgtaatgactgccttccccaccagatcagtagctcccttgggactggaatcatgtgtattctcttttcccctctatttccaaagcttaatacagtgcctggcccatagtaggtcctaaaaggaatcatttaaaaagagacagatttctttttcagtttataaatctttaaatgtaaataaagatgtaggaaattaagaaaatcatttctacatttttttaaatgattggaactattttagaaaaggtatacagcttagtattacatcactaaaagaaaaaatgtgcatgtggttattgtatgtttggaggctatttt

SEQ ID NO: 77378 - DNA, 1045 bp, Homo sapiens
gttccccagcacaagctctctcttgtctgctgtcattcatgtaagacatgacttgctcctctttgccttccgctatgatcgtgggggctccccagccgtgtggaactgtaagtccattaaacctctttcttttgtaaatcgtccagtctcatctttatcagcagcatgagaaaagattaatacagtggcttttctgatacatcaagtgtgactattgctgaaggcattttaacattcattattctcatagactttctttcttctgtatgttctctgattttgaattaaggatttgacttcacactgaatgttttctttccttaactagttctctaatgtgcagagaggtatggattctggaagaaagaatacagtccccacctgtattctcccagctgtactctagtgtgagtgtgtatgtatgtgtgtgtgtgtgtgtgtttatttggagaaactcaagaccacaaacattcaagaaaaggagtaaaatagcctagcaagaaatcactgctgtactctgattgctgctaacatgcaatttttctattagaattgttcaatactgaaccaatttcaaaccatccactttttcttctttccctcttattgatacgagtcaattttacatgctatttctcttgaaggaagagagcacatgtgcagattaaatgtttttccacatatattatctctcttcttaatgtttggatcttgaagaactgaaattggcggggtgtggtagctcacgcctgtagtcccatgcaatttgggaggccaaggtgggtggatcacttgagcccaggagtttgagaccagcgagagcaacatggcgaaaccccatctctacaaaaaatacaaaaatgagccaggcctgatggtacatgccagtcccagctactcagggggctgaggtagaggattgcttgagcccaggaggttgagactgctgtgagccatgatcacgccactgcacgccagcctaggtgacagagcgagaccctgtttcaaaaaaaaaaaaaaaacaggtctgaaatgctggccttgg

SEQ ID NO: 77379 - DNA, 1092 bp, Homo sapiens
aaaagggcggaggtgagttttactcagtgatgagacagttctcagcagagacgggaccccaagtggatggcccctgccctgaccccaaggtgggcagttcgctggtgtgactgagtctggggcttttatgggctcagaatgagggagtgtgtgctccatggtttgtgagtatgcaaaaaaggctaaaacaaaggcaccactcaaaggtgggcatgacaatgtaaaaaaccaattagggaagggtagatatatgtaaagtaggtgaagggtggggattgatcagaggaaagtgtgccaagtgggaagaggggttatcaatccggtccgtggatttacccaacacttgtagcttggctttcaggctttaaactgtctttggtttgcaggtggggtttcactggggccctgcccctatctgcctagggatttgtctgcctcctgccgctatcacatagactatcatatacttaatatttttgtttgaatccaatcattcttttacataaaataaactttattttgctatttcaaatataacgtagccataagataccttctgttgatggtaaacaaaattgttggtgcctgcagaagagcccaaaccctgctatttgttcaaaatcaagattaaaagcatttctacaacactacaactttcttcttgatttaaacagggagtttggattggaatggaaagggaagtactttcataatgtcaggtcccaatcacttccacttcaggaaacactgtgccgttctgattgagtgccaggattcagaatcaacacagctatattgtattctgattctttcagtaccacttacaaaaagtgtgacttcagatttatgctgtaccaagcactgcccaggcagggaagacagatgataaacaattgaaggaaagctctcaggttctacatttcttaaaactgtatgacttgattacaaagcactctgaaatgctgggcaccagagcctctatgagggaagtaaattctgttactggtgaccagttatccaaagtaaaagtttgatattggtgtttactagcagttcttttccaactgggcgggagccttgatgtcataaaga

SEQ ID NO: 77380 - DNA, 1027 bp, Homo sapiens
ggtgctttccagtctttctggaaagtctttctaaactgtccacatttataaaatctttctagaaagtttttctagtcttgagttgggagatttcctggagagggacttgaatgggtacttggaggaggtagaagttcagagatctgaaaagaatatgtatcattattgtccatattgagtttctaaacttgatcaatcattcagtactgaagttgtagattttggttttgcattgttttataaaagaatgtatgataaatattaaataccatagggaaattttttttgaattttatgaaacattaaagtctgactttgtagtaactgtttagcttactgtgttctgagtcagatcttgattgtcagtgactgttgaatgagttagtagtgattattatgactagaggatttttgtgagtgtgaatttgatatatgttttgtcttctcagatattttatctcctttatttgggacgcttgtttcttcagctcaggtgagtatacctttaagctgttttttctttgggtgaaagtagacaggtaattaaacaactccataagaaaatatgagaggcatagtttggggatctcagtcctgttcaaagactgagatggcacatacctggaggctggctcaagtgccacagtaatgagatccatggccatcaacatagaatggggatgtcactatcaggagagcatttgactcaagtcagcctccgctggccaagaagtcactttggacattccagcttgaaagactagaatgggacacttcttttggggatactgattaactcatgggactgagttaactctggtgcatagagtggtgaggtatggatagagtggtgaaggccaagtcaagtttgatttaatttagaaaaatgtgaattttcatgttcagtggctccttcctgactgagctagtccctttgtcttgataaatcatgtaatggtccagacccacaagtaagtggtccaaagggccctgtccctgaagaaaggcaggcttcctttatgtttgg

SEQ ID NO: 77381 - DNA, 1039 bp, Homo sapiens
aggttcttttaaccatgcatttaagataaattataggtttgttagtattgcagcataaccctccaggtttataaataatacatgtagtgtatcactattttagagtttccttaaatgtaataactaaacaattctccttatgaactgtttggcagaattacctatggcttagttactcttcttttctcccatctagtttaactactgctttgacgtggactggctcgtaaaacagtatccaccagagttcaggtgagttcctcagggtgacagacaacactataaactgtaaaggggctttgacacctaagatttgtatttctcaggtgaaagccactcatcttttgagtttttcttttgaaactgttgaaatcacacagacattaagttatatccggaaaacagcattctttgatctatttaatcctacacattctttttacggattttagcattttcctctgtgctctttcaggaagtagataaggacaggctttaactcaaataacagaatttcatgtccagtcttaatatgaaggaaaataccatctccacataccttctagatctgtgaatgtgccaacatgccgccaacgtgccatgctttccgtagcacatcaattctgttctgttttgaggatccctttgtgtttctgagatgaggaaaggaggcttatctgtggccttcccttatctaggctctggaggtgatggatttttaggccttctgcctgcacttcatcagcctcatgttaggcaatacagaccaaatagggcatcacacaggtgccacccttccctatttctaacacatttacggggcagattcccataacagcaagtaggatggaggaaaacacacaagaaataatgattgtcagggtcctcaaaattcttggtacatttagggcatcagattgtggaaacctttgacattaacagtagataaaatgctgttaaaatttttcaagcagctttggcacttggggcttttttttttttttttgacctgtaacacacagaattagttttagctgca

SEQ ID NO: 77382 - DNA, 1025 bp, Homo sapiens
acacagaacgccatttacaagccaagctcctagaagctgggagagaggcttggaacagatgtgcctcacagcctcaggaaccaatcctgccagcaccttgatcttggacttctcgcctccagacctgtgagacaatatattgctgttgtctaagcctcccagtttgtggtgctttgttttggaggccctggcacactaatacagtatccactggactctcagtaactaaagggacgaaagtgtcctccttctccctgcatccccttattgccaaatgcatcttgggaaggctattacgagccttagaaggatgaggagtgacctaaatggtaagtttaagtaacatccagaatttgtatgtagaaaaattcagatcataaggatttatacctcagtatgctattgttcaggtgccatctttttgtaataagtcgtagaaccaataaatttgaaagaattaatgaggacttcagtttctatcagtcatatttaatctttttaataacatgacttgatctaacattttttatttctaggtgctagatgcacgtgtgtttcttacattattctgtttttcttacctaatttctaaaaatcacaggtgcgtgtttcatagtttcattttacctgtcatgttagaataaagctattgggcaagaggtagtgaggtattagtactggaaatagatgtttctctctagttgattgttgttcctttgtgaatggtagagaatcattctgcagtgtgattgataaatgtggaagtgggtcggttgtttatctttcttgattgcttatatccaatttttgttgtgttgggagagcttgtagaaatatacttatttcttttttttttttttttttgaggcggagtctcgctctgtcgcccaggctggagtgcagtggcgggatctcggctcactgcaagctccgcctcccgggttcacgccattctcctgcctcagcctcccaagtagctgggactacaggcgcccgccactacgcccggctaattttttgtattt

SEQ ID NO: 77383 - DNA, 1065 bp, Homo sapiens
gaagctagcattccttaatgaggcgagtccagcttcatgaatgatgtattttaattaatttatttatttatttatttatttttgagacagagtcttgctctggcacccaggctggagtgcagtggctcaatctcggctcactgcaaccttcacctcccaggttcaagcgattctcatgcctcagccccagagtagctgggattacaggcacgcacaaccatgccttgtctaatttttgtattagtagagacggggtttcaccatgttggccagtctggtctcgaactcctgacctcaggtagtccacctgcctcggcctcccaaggtgccgggattacaggtgtgagccactgagcctggccatgaatgatgtatattaaatactaatgctctctttttaggaagaagccaatcctgcttgtgcatggtgataagcgagaggctaaggctcacctccatgcccaggccaagccttacgagaacatctctctctgccaggtaagccacttactgccgttggagagcacgcgtagtctgagttagaaggaaacttagacatttagtccaccctctcacttagtgcagaaatcctctctccagcatcagtcatcaatagatatttgtctagcctcagcttaaacacttcctgagatagagcatcccattcatagtactcctcagggttggaaaggtttttctttttgtgggcctgaagtcttcttactaatttctactcattggtcttaattttccccttctggagccacacagaataagtaagtctttcatcttacacatgtcagtgattcatatatctaaagtgatctgtcctgtctcccttcgttttctctctttaattcaaacattctctttcttcagttttactcaatgtagtatggattctgagtctttccgcaacctgctagtgctcccctggttgcatgtagcttgtcagtatgcctgttgaaacctgggtttcaacactgaataggtcctctggatgtagttcagtggctgtgggtttctttttgtgagtatcctgtgagtgcaacttaaaacttgtag

SEQ ID NO: 77384 - DNA, 1358 bp, Homo sapiens
tgtcatgtggtaaggaggctggggtaggtagtggggagaggttgcagtagtgattgccacgattatagagtgcctattgcatgcaggcccccgttgctcagcattttacatatgtgatctcgttcctgacaactctggatctcagaatggtaccgttttaaagaggagaaagctgaggcatagagttagatgtattttccagagtcatacaaagttgtgaaggcaggatttgagcccatgtactgcgttcctaattgtgaaacttttacggttatttaaactctttcataatctgcatcttgtgacatattctgcttaaccaagatctggcattagtgggtattagataacatgttttctatatacataccctccattagtttgtaaaggtgtcattttataacatgaaaatggatttcatatgtttttattttcagcacttgctatgctaatataagaacatttctattttaatttaacatcctaagtctttatgttgccaccactttcagtgtttctttttttgtttttggagacggagtctcgctctgtcacccaggctggagtgcagtggcgctatctcagctcactgcaagctctgcctcctgggttcacgccattctcctgcctcagcctcctaagtagctgggactacaggcgctggccaccacgcctggcaaattttttcatatttttagtagaaacggggttccactgcgttagccaggatggtctccatctcctgacttcgtgatgtgcccgcctcagcctcccaaagtgctgggattacaggcgtgagccaccgcacctggccttcagtgtttcttttaaatatgctctgaaaactgtgtaccattaatttctgtataagccaaatatctaaaactttgcatagagactcacttgttttactagttttttgtcaactaaagaatttaggcttctcagtcctaattactgtaattaaaaatgtagtatatattctgtagtgtataatcattctgggtaacaaaatttgtgttttttttttttttttttttaatgagcgtccccagatgctattataaaagctgtcttgttattcaagggcttgcctggtagagatcagtaaaaatagttttaaaaaaaaaagttgacctgattgctttctaatgtaatttccagtagatatggatattagtgagttgtttttaaataaatgacttctttttcatcctaggcaaagttggatattgcgtttggaacacaccacacgtaagcactttttgtgaaataggggaacccctcaagcattgtcatttgtccattacacggttattcttaggagagactgagcatggtaggcccacctaggatct

SEQ ID NO: 77385 - DNA, 1016 bp, Homo sapiens
tgacagagtgagaccctgtctcgaaaacaaaagaaaatgcctaggaaagtaattacagttgaacttttcccaattaagtatctgtagtttacattttgttgaaatgacattatcttgtagaagattgagctcgtgtcttgaaattacttttagttgcttatttaaaaaaaaattttttttttgttgagacagtctcgctctgttgcccaggctggagtacaatggcgcaatctcagctcgttacaacctccgcctcccaggttcaagcaattctcttgcctcagcctcctgagttgctgggactacaggcgtgtgccaccacgtccagctaatttttgtatttttagtagagatggggtttcaccatgctggccaggctggtctcgaactcctgacctcaggtgatccacccgcctcggcctcccaaagtgccgggattacaggcgtgagccaccgcacctagcgtatttttaaaatgttttaagaattaaatacttcttatgttcttgacacagctcaagaggatatagagtttttattcttacagctttttctttggtgagagaagcaagacaaacatgtgaattagaaaaggagaatcaccttccagatcatagtgatggagggtaaactgccttccccacctcacagggtagagctagaaacagtgaacgaggcagtctttgagactgcatacactttggcacacaagccctgctctgtccagttttggttggatgccatgcaatcccgtggtctgtctcacagtgttttagaatgggaaagctctttggtttcctctagagctgggagcagagttaattcttatggctccaagaatcgatagaggggaaagagaaagccaaagcagctgaatgtcaaatatccagatccaggtggtggccagtagcaaaccacaggatgggcgaggcatgcctctttccactaagatctgtagtcaggcccccaccatgcatcatttagtcctctttcccaccaaggccatgtctcccccc

SEQ ID NO: 77386 - DNA, 1039 bp, Homo sapiens
tgctgggattacaggcatgagccaccgtgcctggcagcaaaatgtatttttgcatttcactcacaatagtcctgaagtggggttgatccttagagatacaagtggaaaactgaggctcggggacattgaatggcttacctagggtcaaagggcttctaaatgacaaagtctggagctcaggtcttcagacttcaaatggaaagcttttatctatatcctattccctctctctcactgcaattaaaataagagaaatgtgttcgactagaggcctggggaggtcacatggaaaaagagtggaccccactaagtctgatttgggttaatgaagaataggcaagacttaccccaagcccagataacacacttttgacaagtgtggcatctatggatacaaaaaaccactaatggtaatgaagcatcttttaaacttcttaaaatttcaactcataataagaaatacactttacatttcagtgtattgtgcactaacatacctttgtgccaaaacaaaatttcatgaaccagtaattaaatatatacagtataccaatttatgctattttagttgtttaaaaaatgccagccatgatgcagcaagaggttgttgaccatactttgaatctcaaacaccagaccagaaggttccaacggtccctagtagtaacaggtaatgctgaatagataataaggggccaggctggagggatgtgaagtgccaggactggcactagggttgaaagttcttttaccaccaaatactcaacctttctgaaaggttttcatcctatcacttaggcagactttcatcatggtaatgtatagaagggaagattataaatgttaagtttgggtaatatgagagtttaaaaaaattcctttagctatgtattacatttgcattggaaaggtattacatattttgaaagtactattaatgctttttgatcctttgctgtttttaaaggaaaatgatgctgctgctctatgaagaaggcctccgggttgtcatacacacctccaacctcatccatgctga

SEQ ID NO: 77387 - DNA, 1205 bp, Homo sapiens
gaattcttaactcttgtcatcaagtcttagaaagcaatatataggtgcagaggtaagaggagcaataaggaaggtttggcaagtgagagggagcatggagggatgtgggttggaagaggtgggcagagcccaggtcttactgaatcttaaattcatggcaagacattcaggaataattctgaatgtgatgagaaaccattggagtggtgttctcagatttatgtttcatgtttcctaagattacttaccatgtggagataccgagaattcacctctttcttaggatgaaggcataatcgatacagagatcattatgatcagttgtgtgcctgactgttaaaggttatttttttaattccagaatatggttgagccccttatacccacgaattgctgatggaacccacaaatctggagagtcgccaacacattttaaagctgatctcatcagttacttgatggcttataatgccccttctctcaaggagtggatagatgtcattcacaagcacgatctctctgaaacaaagtatgtgtcagcttatcaatttggggtgcttatgataggcttataccttgggagcctcatgaggtctggcatgcaggggcctggaaagaggtggggtgaaatctagccaagcttcaggatgtgatgaggggatgagcagattctatcacatctgtatcttgtggttctcaggcattaaagtgacagccagtgaatcctcatgtttaccttagcctcccactgggttactctcacaattattgagttctttgtctggtactttacatcttgtaggcattccatcattagttgatttgcttgaaaatgaatttgagagtcaattcaagaaaatggattggctcttagatcatttcttgattatattagttttcatgtgtattttgtcattttttttggtgcccaaagcacatcactatattttataacttgtgtttttatgtctttttagtgtttatcttattggttcaaccccaggacgctttcaaggaagtcaaaaagataattggggacattttagacttaagaaggtaacagaacttttactattttaacatttttaaaaaatttaatgtatattctctcttttaaaataattatatattttgatgcagcttcacaatatttctgcacaattctgggcaaatagatacttgataaattgataattataattctt

SEQ ID NO: 77388 - DNA, 1781 bp, Homo sapiens
caaataattttggaaaggagaacttctgtccatctactccattaaaaatatgtttttagtatttaaaaaaaatttcccaaagaagaagtatgtatgtgtgggtatgaaattgatcactagtattttcagcttttcttgttaattaggctttccaagagcagaaaactgttttcaaatattgcagcatttctgttaagattatttgagtcactttaacattcacttttattctttcccagcttctgaaagaccatgcctcatccatgcctaacgcagagtcctggcctgtcgtaggtcagttttcaagcgttggctccttgggagccgatgaatcaaagtggttatgttctgagtttaaagagagcatgctgacactggggaaggaaagcaagactccaggaaaaagctctgttcctctttacttggtgagttctcgtcctcattgaggtagtttacttttattctctacacaggagaagaattgaaaattggtcctctttgtaatggagagatgttttattctgtgattctttttttttttttggcgtggcgggggcggggtgcggaaagagcagtacattagcatcgtcatttgtaatcaagttgcctttgccttaatatccagtgctaagagcttgccgattcgttcaggagctccattgcagacacagactggcctgtgatttttctatcctttctttcaggttgttgaaccaaggtagaaaatatttgatgtagcacagccagcagaattatgggcattttaattatttagagaactgtgaattaataattaattttccattcaatgttaacttgaatttcaaaggaaaaaatactccaattgaagtataattttacatcaaatatggttcctgttgtttaattactagttcatttttttcataagatgagaacttttaaaaatttaaagcatattttctaatttaaaagtatttttaacagattttcatttccttaaaagctgattatcattccttttcttcaacatggtacattccgagttttattgttttcctcttatttttagatctatccttctgtggaaaatgtgcggaccagtttagaaggatatcctggtaattcttggggagactgtcttgattgtgttttatgtatatttcatgaatgtcctggtaaagttttactactattgcgtagaaatttggagatggttttcacttaactatataaggatcatgaaaataggcaatatgaagctctgcattccgcagatgatacccttcagtttgggtgtgttattaatccttacagaaaccctctgcacaatagttttcatttttaccagtaaggtaaccagcaggttggttgtccagacaagatagccaaataaaatcagcttccccttactcttcaatgcgttttcagagcttatccaacataccttcctctcatctctgcatatcctcccttcctgtgtttgaggtaccatgtggtccttttaaatgcctgctatagataacatttaaggtccggaatttttaaaattttgcctttggtataactttgttgatatgtctattctgtcaagggtgtcatctgcaaatgcctaagattttttgtaggcatctgtcaacgctgtccctttcccttatactcataccaggcactaaacctttatttagaattcagcagccccgctagttagtgtaatcaggagatgttaactgaaaacccacatagtggttgtctctggaaaaagcaaagtctaattggcatttgttgatggctgaaagcag

SEQ ID NO: 77389 - DNA, 1060 bp, Homo sapiens
ttaatgtgttcataattcttgctctgaatgttgaatgggtttctaaaaagtgattagcgagttgtcattagttttcagtatgtttgtgttacatgagccttatttaaaggcatcccatgactatacttcgtaaagtatatgatcatcacttacttttgcttataagtctggatgtttataagatttgcataaagttaatactgaaggaaggaaacctcgttaagagaacatatctagtgcaactatagacattttctttcaaataactattctataagatgaagtaatagaagtagtttttttcctgttaccttcttgctgtttattgtagattttcctcttaatgagggatcctcaaattatatttcataatttttattgttttatttttcttttaaaagctgggggctctcttccctatagcatccagacagctgaaaaacagaattggctgcattcctattttcagtaagtaattggtttagactgctgctattgcttctttaggaattagagtgttatttatgtcactggtttgtttttttttttaaaaggaactttatgtaatatagctatattctttcatctacatatgttagtgatagaaataatttaaaacaaggttttgaattttttttggaataggtttttaataccaaagaggaaaatttattgctgtgaggtttctatttaaatattggcatgccaagaaagacaaatagaagatcatgttgggtagtttagaatttacataagcagcattttagttcatttttccaaaatataaagtatcattattctgtctgtaccgtcacacatgcagctgcaagcttgttgagggcagattctttgctgccgtttcctgaggatacaggacagtatctggcgtgttgtcagagttcagtaaatgctgagtggacaagtgaagggaatgtccttcaccctcctccagccacagcagttgcacagcctgcatatgcaaggccagtctgtttcatgcttgtctcaacaggtgtttgctgtgctggttagccagaaatgaaagcagaattactttgaa

SEQ ID NO: 77390 - DNA, 1023 bp, Homo sapiens
ggaaaggctatatgctgaaaggttgcagtgcttcttgtgaaaagtgggaagtttataattctaaaatgggcatgcgttacttgaatggagtttcataaaatctcacaggtcacagagtcgtgtagccactgttgatttttagataataggctctttgttttcatgcagtttcctaatattaggattatgatcaattttatttcataattagtaacttttgtcttttctgtcactagcaaatggtcagctgagacttctggccgcagcaatgccatgccacatattaagacatatatgaggccttctccagacttcagtaaaattgcttggttccttgtcacaaggtaaatagtccttacattcctgatgggagaaatctttttaatgtgttcataattcttgctctgaatgttgaatgggtttctaaaaagtgattagtgagttgtcattagttttcagtatgtttgtgttacatgagccttatttaaaggcatcccatgactaatccctttgtaaagtatatgatcatcacctacttttgcttataagtctagatgtttatcagatttgcataaagttaacatttacttctgttatttaatacctcaataggggttatgcaaattgacatttggggtaagtacagaagaataatgaaatgttaaaattaatatttttttcttaattagtttctccttaggtaattgaaatctgaagcaatcaaatctcttatgtgtccttttctaaaacatctttaaggtgtaattcacgtaccataaaatctgcccattaagtctctactgtttaatggtttaggatagtcacagaattatgtaaccattaccataatctaaatttagaatattttcatcaccctataagaaaccacctacctgttggcatttttgtgtctatttttataggaagataaattgctatgccctttgaaaactagaactttagttcctgactcccaggctgaacccaacgattaggcatctctttatgattcagtaacataat

SEQ ID NO: 77391 - DNA, 1426 bp, Homo sapiens
agacttctcaactgcacagcaactatgaaggtttaaggtgccaactatggtgacctgtgggagtaagaagaaaggggcaggggagagaattgacctgcattaagtagccaccatgtggcagacacttctggtgctttacctacatagtagtgtctttcagtccccacaagagctgtgaggtggcgttatcccctccctccactcaatgaggaataaggcggcagagttgaggcagttctacccattactcagcaaatatgtattgcccgctgtggcaagaatagagtaattaagatgaggttctcacagaatttacattggcatgaaagagatttaccaaagaattcattgtatacatattagttaattgcacttgtaatgctttttgactattctacataggtgggtttttagccaaaacatcacttctggagcctggtggcttccataatgccctagattcctgcattgtcagcgttctttccctattcactgtggttgcttgtgtaattatctggcttcccctctagactctgtgaggccaagtccatgcctgtcttgttcagcataccctggtgactggccaggtgcctgacatgtggaggctgatgaagcctaggattgaagtggtaaccatgaaagcactgcctagactgcataatggaacatgggagggccctcaaaggtgattcctgagtttggggtatgtagatggggattgtcactgatatcagtatagaagtcagggaatggaactggcctaccacagtgggatgatggtgaatttgattgaagattgatttatcatggtggagacttcaggtggaattgtttgttggagatgaacttaaaagtttggtgtacatatagtatgttttggagttttggttagtactgattgttaacaccgtaatcctttgcgacttccagaggagaatatagcggatcaacgcctgggcattgaggaacatacaagaaatacatatcaggtgggcttttcatgcctaccaggtgttccattgccaaacaaatgaattggattcaagccatccctcctgggttgaagagcaactggtcacacattctccattacataatttttcttctacctaagaaaaatgttttatatatatattctattttgggtatcagatttaaccatttatccagcacataactactgagcacctactatgcaccacacacttttctaggtgctaagaatgcaataaacaataaaacatcttgacttttatgttctggtgctgggaattacacaaaaagcaaagaagtgtgtttatgtatgcaaatggtggtaagtgctatagagaaaaaatagaatgataatttaggtgcacaatcctttattctaaattcttggtaccagatgtagttcagtatttggattttagaaagataatatggt

SEQ ID NO: 77392 - DNA, 1035 bp, Homo sapiens
cgtaaaatcatcccatgtttgatgggcagccggttgttagggaaattattgggacatgatgacaaatgtggtatttaaattttaccacaggactaagcaggaggaagatgaggtttaagagaagccttggctaagaggatagtgcctaggtgtaattggcaaacccaatgagaacagttacgaaagttgtgtattgtgggtggtcagaagcaaggtgggtacctaacacatgctggatcactgttagagttgcctagcaactgacaggcaatgcggatagtcagggatgagcagaaatgttggtgctgccacttcgggagaaaacgagacaagtgcttgactgcaaaatcactggctttttgaggaaacataaaagacattctctctcctctgcttttcaatattactatgcagtactccttctctaatgtctgttgctttgattctgaaacaaatcatctctttttgttctcctttgtctgagtattttggtgaaaataaaattggattacacaagaaaatacttacagatgtcattgggtagacttgcttgcctggccctgtggctctaagatattgggattagctggtatgcttcatgtgctttgttacaaatgatggttatcagtactaacgcctacaagtgacttcctttatacgatagagatgactcaaggtcatattactaccctcacctgcctacatctggtacaagcagagtgaagacagagcatacccctttctgtactcatatgagaaagtcttgtgagcatcatcactgatggaaaaaagcttgagacccctgacttagtgcctctagaccctttgtacactggcattgctagtcactaagtgcacatctggcttgagatgaggaggtgctacctggaatttcccaccagggactggcctccaaagaaagcctctcacaagtaatatagcaaatacttgtatggtgcttactatatgctggccaagcgcttttttatactagctcatttaatcacccaaattgggagctaggtactgctacta

SEQ ID NO: 77393 - DNA, 1701 bp, Homo sapiens
ggtgtgagccactgtgcccagccgagacagcagccatttttataactcatgcgttgtcactgtgtccagcagaagctggacctcacaccctcccaagtcctccttcagcttttctaactcctggccctcaccaggtatgtattttttctgtgatgaaggccctgtcttctgcaagacatccacacctccagtgccagaggcacaaaaaccacatgggtttccatcctcacagtcttcagtccctgcctgtggctccagctagttattctccactttatgcctgtcctcctctggcttctgcctgctctgtagacttctagctccagcatcaggacaaagataacacccttataaagactttaaccagctcctacaattacatgataataaattcctttaagaaatacacacacacacacatatgtatacaatttcctagttatgtttctgtgattgaaccctgactgatacacccccagaagctactgtcactcaacatgactttagtaagggtttgggtagtgtttctggtagatggtagaccatgggacctccagagttctaccctaatgatctaaagtaaattaaataccccacccctctttagtgatgaagcatcactcggtatccagcagcaacaacacaaaccacagcacttgggagagaaagcagcccagtccagtagaaaaaagaacaatggaagagtgagggcagggggaacaaaatggtgaaaacgagttttcaacagaagccaggacaggcagtggacaatggattccatgtggagaacagaagctagaactctttggagttgtgggagcaagagacccctgtggtgtcgctgtgcctcatgaaagacatagtgcttttgctgtacatgacgggcgtgtgtgtgcacgcacacacacacactccccccaccctccctgcctcccaaccccacaagagtttggaaataccccatcttcctggctgccccaggtgcccgtgattcaaagtattaacccagaatgtaaaaagttattaaagatgatatctcagggaatgttgatttatcacctagacaacctgcaagtgactttcaggctctcagtgttcacagtagagtttctaaggttccaaatgcttagaaatctgttacaagccaaataaaaggagggattggaggaagccatctgaaaggctgtccttgtgatctctgttgaacattactttggaataagccctcaaatcttggaatgctaagaaaacacaactcatggggaaagaatgagaacagccttccagaagatacctcccgtctttgttgtcatgatactgatagtcaagagttggccagaaagcgatcatctaaaaactgagaaaaacacctcagacccactggttggttttgccgttagactttcctcttcgcccaggagatgacctgttttactaacaggtgaaagacctaaaagcaagatgtcatcttggacttttaaaaaaagtttttttcctagaatcataataccagtttatcataaacatcagcttcctcttcactttatgtctcaacgacgttatagacagtgatgttcatgattgtggtccttgtgcaaaggtttcctgtcctcaatatggttcatttaggaagccaggaaagcttgtaaataatgctctatttgcttaagtcagcctaatcgcttcaagagttttccttag

SEQ ID NO: 77394 - DNA, 1067 bp, Homo sapiens
agcttactgaacactcaccagtctgggtgcagtgggatacctgctttcaaggcatgtacttgattaggaattgactgtgtgcttccagcgaaattaataacatttaaaataaatattgtgaactacaatgtgaagatttatctcgaggtggtagatgacaagtcaccaaaggaatggcccaatcaagcacaagttgttttaggtaggggtgactggaggatgaagttgggaagcaggagagcttggcagagtatttgaaagatgcttaggatgtaggctgtatagagagaggtgggaatggcatcaacgttggaaaggaattggtagtagcacaaactgggaagcagagattggttcacatcatcggctagagtttggctgggcggggccagtggggtggcacaaaggacatgtgcttctggcccagtaagccccctggaaaagcaccgtgtcgaactggtctttcgagatgtccagcacagccagcttgtctcctagctctggagccacttgagatttctgtgtccaaacaccagaaagagtggctgtgtccaaacaccagaaggagtggcttgcacataggggctggggtgtacaagccatctgtttctctaaatgctagaatcacgcttgacccagagagatattctcaccataagaggcacatggactgagatctcccatgtcacctccttatactcactgtgggtacacacacacagaatacagaatcgcccacacaatgagatggctaatgctttttccttccttcctcccttcctccctccctccctccctcccttccttccttcctgtcactgtgggcacacactcagaatcgcccacacgatgagatggctaatgctttgcccacatgatcagatggctaatgctttttccttccctccctccctccctccctccctcccttccgtccctccctccctccctcccttccttccctccctcccttccttccttccctccctccctcccttccttccttccctccctccctccctccctccctgcctgcctttgtccctccctccctccccgccttcctt

SEQ ID NO: 77395 - DNA, 1043 bp, Homo sapiens
ccatttctctgatggccagtgatgatgagcattcctggcaagaatttctctgcctgttcctactggttgtcaccttctctctcccctggatgaactgacccttccctccctgttttccccatctcaggctactgctgggtttctacccacatgtcagggtctgtgttcctctgcccttaaaccctcagcagcaatctttggcccacgagatgatgtccggactcctttgtgtgacatcaaggtccactgtgagctggaacagcatgtcccccaggctccagccacccacaagtatttgttagcatattaatgcacgtaggctgtagcagcaatggcccctttttactagcagtgtgatcctgggatctactgctctttgtctcagagactctgaagtaacttggtaagagaatatggggaaacacattggacagatcccttagggacctcagatctctaggagccaaaatgagagaaagagaatgaactttgaagtgagacagagaggagctaggatcctgcttacaagctgtgttagatttggcctccttattctacttccgtaggcccctttttctcgttgtacaatggaaacaatgtaactcataggatctcatgtgagatcaagagttataacccataaagtgtttacaacagtgcctggtacttagcaagtctcagtaaaggttgcagttgacattagcagtagcagcaacagcatataagccacacagttcaacagaaggttgaaagcaggggctgatactccatgggttttcagtcaaatcagaatcttgatgtcacttctgtgatgacgttgcactcttttctttccttctgaactgcattcccccagccccacacaaacagccctttgcttatcaaaaacccatccttcaaaatcctgttaggtttacacttctccacaaagcttttcctaagcccctagctggaagcacttccagttgttgatcctatactgccttgcaggaaagatgccaccaccttcctataatttacttccttgccaattagttggtctt

SEQ ID NO: 77396 - DNA, 1083 bp, Homo sapiens
cttctgggaagttcagctgctatcactgttttatccaggaaagcctgatgccttgtgtagggttttaccacttgaggttgctactcggatagctgcaaataaaaacataaattacatctctaactgaaactgaagcatgcctcctgttccctatgattgagctaagctgctaaacataaatcatcagagcgacaatcagctctttcactcccaaagctgaagaaaggaaaagccagcaatttctcatgtgtgatatatgtccaccctctcacctggtgttttataaacgtattgtcttaactgtcttctaagtatctgtgcctgggagggtgccttcctctgttttgtaaaatgccaagtgataccactgtgatatataaataatgataattagaagacagcctcaaattatttgacattcagattgaaggggaaagtagtacttttttttgtaataacctagaatttggatcagaaatggcattcaaaataaaagcatattggtttctgtcagacagggatagttcaaaccttctcatatctgaggtcgaatatcacaaaatggagtcatgggtcgagcacacagcctcagatctgggcccaggctgtaaagaaccataacctgtggccacgatatatttgaaaatatcaggactaataggagctaaagaagagagaagtcattttttacctgaaactccataaaagtataataatcattaacttggaatcacttcccagccactagcctctttgttttttaaaatgtccaaataccagggtttctagaatttggctcatcttgaccctgcctgccttaaattttcaaggaattcttcctttgtcatagttcctggtggtgaatgtgagaccatttgtttgcttggtggaaggaatgtaggaccaagaatcagaaagacggtttgatttccagccctgccattatttttttttttttttttttttgagacagagtctcgctttgtcacccaggctggagtgcagtggtgccatcctggctcactgcaacctccgccttctgggttcaagtgattctcctgcctcagcctcctaagtagctgg

SEQ ID NO: 77397 - DNA, 1007 bp, Homo sapiens
gggacctgccaggctctttgccacctctgggcctttgcggatgctgttccctccacctgcaacataattctttccactcccacctgaccaaactctgctcatctttcagagtttaataaaggtgttgcttttttaagagaggcttccactgatcacccgctcctgccaagtctaaaataggcctgctattctcttatggcactcctttgcttttctttgcagcacttagcacaaatagtaatttttattttacttttatagatgtattttatgtccctccaccagactgtatactccatgaggacaaggatattgatgtttatgttaactcttgtacactcagtgcctggcaccatgcctgacccagaagagggactcgagaaataaagtgtcgaatgaacgaatgtgcagacatcagtcatttactcagcttaataaatgccagagaaaagtctagaacccagattatctgaagcccagtcaacacggacctccccatgttctttgacactgcccatgaccagcctccgcttgctaagttgcacctcagtctttgttctttttatgggttcctaagacatcagcactgttgggtatgtgcctattgaggatttgaagggtggatatgtgtgtggatgggtggacagaaggaatgagagacagacggacaagcagaatgccaggatgatccacgaaggggcaggagttggtcaatgtatggaagcacgagggggcacatcggtcatgtggtaagcacctgcactgcggcaggccttgtgttggaaggaagtggcagtgtgaacatcagcctagatatagaacctccacttccaccctgattaagatctaaaattaataccctattctagagttcttggaataaaccttccattttgataggtcttaaagaattttcatttttatacttctgtcacattatattggaacactttcattatacatgaaagcagcttttatttcttcttactccaggcagcctgttacta

SEQ ID NO: 77398 - DNA, 1034 bp, Homo sapiens
gcatgaattattacaaggcaagttgttctctcatgggacaatttaggaggattgcataaagcaggttttcctctcaaccagtgagtattaatgctgatttccaggagtgatgagttaaaagaatcacaaccaccttcttttctcctcctatggttatttttctagctttgcctccaggtagtgatgggcttttcagccagctatagacattctactcatttaaacagcagagtttagtttttgtattggaaaggctaaaaactcaaaaagcagagctacagggaatttgccaacagagtggttaccaggtccttgcttggtcatttatgacctaattttgagggagaggagtaaatgcaacagtgatatttaagttactggctgagtggtaaatgcttgtatcaaaaatcctgcattgctgaatagtatgtctaatagcactcatagcaagaattgggtgtcattggccttgggaatgaagcagagctgatgttacccaacagaacagtatacaggaaacgatgggtaaataacagaagtccaagcacagatggagtttccagtggaagagagcaagggcttgctgaggccaatgagtgcaatggggagtcagatctgtcagccctgccagaccctcagcctcttaggaaacaagcatgcaacacagacccaggtgtatggctctctaacaagcttgtttagttaacaaagaagtgtttggtttcatgctttcagaccatcccaaagccagagacagacaaacagcgttctgatgatttgctgccatctttggtattttttcctacctatcctgctgggtgctgctgttcgtatgatggctctgaacaaaccgtgaggctgcgagaagacagcagcagataccattgtttgtcagaccttcctgtgacctaccatctgcctctgttcaagagaaagggaaaggttgccccagaggcgagttcgcagttgggagacactgctttaacttggtggtccatgccagacccgccaagaagcagtttacaatgtgcatt

SEQ ID NO: 77399 - DNA, 1133 bp, Homo sapiens
ttacaagcatgagccaccacgcgctgccttattacacctattttacagatgaggaaactgaggttcaagggagttaaataacttaaagtccacggtaagcaatggaaccaagactctgctgtctcaaaagtgcacaccttcctgcattgcactacacacaagttcagcttggttttcctggattctttagtggaagttatatagttatccctaatataaattaatacagtattacgtgatttccagtgtgaatatggtactaacaccacattatgcctaggtcagatcctcttataaaatctttgacaaattttccaagtttagtagcccacttatttcaagcaaatccaggacaaaagaataccataaactgtacaatttcttactgtgtttctatcaactagtaagtttggtggccattgcttatataataggattcacacatccaaaaaatgagagatcaaaggtggtctgtggccatatgcccctgggaatgtcagcaatgacatgaccaaggcccacctggaggctggtgatcaactcagcctggtctgtgtccactggtccttgagcattaacattggccagcaagcactgagcgctttgtgccaggaactcttctatgggttttgtgtttatttaaattttcataaccttatcaaagacataccaccgtcatctccatttacagatagagaaataacagttatttttgaaaagtcgcatagctggcaagtggtggagctggaatttgaacccaggcattttagctccagggtcatcctatactgctgtgaggatccaggcagcagatgttcccaaggtccagccaaggggcaggctttgagatatggcttggctgtgtccccacccaaatctcatcttgaattgtagctcccataatcctcacatgttgtgggagggacctggtggaagataactgaatcatgggggtgggtttttcccatgctcttcttgtaatagtgaataagtctcatgagaactaatggttttataaatgggagtttccctgcacgtgctctctttcctgccaccatgttaagatgtgcctttgtttctccaccatccgccatgattatgaggcctccccagccacatggaactgtgagtcc

SEQ ID NO: 77400 - DNA, 1050 bp, Homo sapiens
agataccagagatggggagggcaagaggcagcccacactagcgggtggtgtgcagagcatgcaagtcttggtgcaactcctgtcccgtatttcacagagttccaatcaagtctgttttaaagcagaattcaatcgatgtgtataaattatattttattcacagtaggcctagaaggagctccacagtctgaccaactttatggttcatgtatctaaggcacatgttgcagtgtctcctgttccctttgtaggaaggttttcaaagagccccttgctattttttgttgctgttgttgttaaagagatggagtcttgctctgtcacccaggctggagtgctgtgtggcacgatcataactcactgtggcctcaagcagtcctcctgcctcagcctccgcagtagctgggattatgggcacaagccaccacacctggcgtccattgcttttatcaagaactggaaggcatctggaccagtcacctttttcattatacaaaaagagaagcttagaaaggaacggcaaaggggaaattgcatgcatggggcatttattacgggtaactcaaatcgtaatttatgatcataggtatatacatcttcacacaatggggcaggtgatactatcttaattttattatatagagggaaaaataaggttcagggttacacagctggttaatgaacaagatctgtgccccatctgaggtgctaagtctatcctagctaagccaatgctatccctttctggacctgaggacatagatgatgctactgtgtgtgccctggatggctgtttgctcataggttctttagaaattaacagttaaactgaatgctgattttgttctcatataattgacattactaaaatttaaaagcctcaaatgtttgctactcaatattttatgaatatttttatgaaagaatacattaggtttcttttatagttacaagaaaccaggttaattagatttgtacaatgaaagagactttaacaaaagtctggcaactgtgctggagccagggaatccctaatgtaacagactgtct

SEQ ID NO: 77401 - DNA, 1064 bp, Homo sapiens
cggaaggtgagatctgagcgcggcagcggcgccagcgcccgctacaaggcggggtctcggggagggggccccggcggtttgctggagagccttgctactgttctgcatgaggtgggggatgccttctgcgcggaccccgcgtccaggcaaaactctggaacgcactaggcagccaagcccggggggaagagatggaacgctccaaggtcaaggtctcctggccgcggagcccttccagcccccagtgtttggcctcctctccggaagcggggctggctcgcggtgcgcgcttggtccgggcggagcctactagtaggcgcagaggacgcccccgcgcaggatccagagaccaagggcgctctggcatggtcaaggcgagggaggctgcccgggggagaagcccctaacttcctttgctccctgttccaacctccctttctggtctcctctctccagcccgtccgcccaacggatgcgcagcgttggggcccggccggaggtcggagccctcggacgccgcagccctcggacgccgctcagcacagcccctctctccgtgcgcccgccctggaccccctccatccctaagccccggcagccgattcggagactcgggaggccacaggctcagcgcgacaccacgaccacaactaggaggcaccatcgtcgatctacctggggaggcacctacaaagccagcagactgacacccgtgtcctagccgtcggcggcctgcgaagcgatagtcaaaggaaccaggacccaggaccccggcgctctgcttacccgcagacctccggaccgcgccccccccccgccgccccgccccgccccgccccgccccgcgaccgtctctttgcgggaaactcgagttggctcgagcttgccctgaagacgcgccacgccccctcccctatctgagccggacagggagccggggtggaaactgcgcccgcatcccagcgccaagcagacgtgaactctgcgcccgttccccgggaccttcagcgttaaggagaactccgaggagagcagggggagtggaggggaacggcggcgacaaa

SEQ ID NO: 77402 - DNA, 1065 bp, Homo sapiens
acctgtatcatgaacggcaagaaggccagatctcatagaggtcttttttattttaattttaatttttatttttttgagacggagtcttggtctgtcgtccaggctggagtgcagtggcgcgatctccgcctcccgggttcaagcgattctcctgccttagccttccaagtagctgcgactataggcgcccgccactacgcccggctaatttttgtatttttgtagagacggcgtttcactctgttggccaggctggtcctgaactcctgaccttatgatccgcccgcctcggcctcccaaagtgttgggattacaggcgtgagccaccgcgcccggcctcatagaggtcttatacggatttctgggtagtattctaagcatgtaccaagtacttttccagcattttctcatttattacaacagttccctcgaggtaattactactgtcctcattttgataaggaagaaatggaaacacagtaagtggctgtgctggaacacaagccccatcgttttttttctagaacagtagagaaacacccaggttttggcattcagcaaacctgaatgtgattcctggctccatctctgacaagctttgtgacaacaggcaagtcatttaagctctctgggccttggtcttcttatctgcaaatgagggggtaatgatggtaccagtgtcatcgtgtttgtaagaattaagtgggataatacttggagaatgtttaggacactgcctggcatatagtaggggttcagtaattgatgtacttgttatttaagactgagaaacatgtaaaatgcccaagaggtgaagaagtgttggtgtattaatttagaagtgcctgtgtggagctgatttgagggagctgagtgggcccttctaatcagtaagttcactcatctttatatttgaaatgccaccatttctgagacattgctcagtgttaagcattgtcctataactgtagggtctcttaaaatcaggaatcccactgagtttattaatacactaagttcttaacaccttaaggtgatggagcttttcagattgagaagaaagac

SEQ ID NO: 77403 - DNA, 1033 bp, Homo sapiens
aactttatatttaaatttcagtgacacctcacactcagtgccggttaaaattactgaagttagagagaattaaagactatcttctcatggaggaagaattcattagaaatcaggaacaaatgaaaccattagaagaaaagcaagaggtaagttgaaaagttactatcattttcttttttacaaattgaattctataaaattgtcaacaaataaatgaaattcaagtagctgaacctgtccaggctttcatgagtattattagctgccttttacaagcatcggctgctttgtaaatctagcgaactatcaggatcatctactttgaggtctagtctgcttttttcccttggcattttcatatgtaggaggaaagatcaaaagtggatgatctgagggggaccccgatgtcagtaggaaccttggaagagatcattgatgacaatcatgccatcgtgtctacatctgtgggctcagaacactacgtcagcattctttcatttgtagacaaggatctgctggaacctggctgctcggtcctgctcaaccacaaggtgaggtgatagtctttttcagaaagcccacggaagtgctttctcttctcacttaggttcatcttcctgtcccgtggaagtagatcaccaaagcactcctcaggcagaaggatgccatgactggcattgctttgctgtaaacagatccagcaaacctcacgttcctgtgttaaaccttgatgtttcctgttaggtgcatgccgtgataggggtgctgatggatgacacggatcccctggtcacagtgatgaaggtagaaaaggccccccaggagacctatgcagatattggggggttggacaaccaaattcaggaaattaaggtatgattgattggtaaccatctctgggtttcagttttggtttctgttgtcccatttaggatactttgcaggtgttttgtatgtttgcttatttattaatcaaaccagtagctgagtcagagcttgccagttgtggtatttttgtatttgttaatactga

SEQ ID NO: 77404 - DNA, 1050 bp, Homo sapiens
tggaccatatgcagggcatatggtcattgaggatggccgtcggctctctgcatgatctttcatagggaagtcattccgagccatcacagatctctgctagggacctctgaggcagctgagaaatagctgtaatgtccctagatgggaacagccatcaggaagtctttcctagtcctatctgtagtttaattgaaaagggtcaacttgagctttattaagtctctcttgctcaagaagagctccaggctgacttctactagaaagtaaaaggggaattgggtgtggttagggagatggaacgggtgcggggaactcaagcaggacaggtgtcatcttcagtatgtctttgctgctaatagaaatcaagcacattgtctctaagaagagtaattgagatttttacttatttttgttgaaagcaagatattgtcatgttgccaattagtaaatatgctaataatttcagtaaagcctttcattcatactgtttttcataggaatctgtggagcttcctctcacccatcctgaatattatgaagagatgggtataaagcctcctaagggggtcattctctatggtccacctggcacaggtatgctctgtttttgacactttccaggcacccagctggtctcttgagcagcagcattggctagttataattactgaactaataagagaggacaccacaattccttagtttaaaacagggctgctcaaccttgtctgcatgttggaatcaccttgggagctttaaaaatactgatggaaaaaaaaaaaaaaagcctgagcaacttggtgaaaccctgtctctataaaaaattagctgggcgtggccgggcgcagtggctcacgcctgtaatcccagtactttgggaggcagaggcgggtggatcatgaggtcaggagttcgagaccagcctggccaatgtggtgaaaccccgtctctactaaaaatacaaaaattagccgggtgtggtgacgtgcgcctgtagtcccggctactcgggaggctgaggcaggagaatggcatgaacccgggaggcgg

SEQ ID NO: 77405 - DNA, 2074 bp, Homo sapiens
cagttgtgagcacaagtctctgccctggaggagctcacaggttgtagggatcagataccaaacatggaaacagaataaatgatacaatttcagacacagaaactgctatgaaaaaatatgatctgtaacttggctgatgggagcgtcttagtccatttgtgctgctaaacaaaataccttaggactggtatttgtataaagaatagaaatgtatttcccacagttctggaggctgagaagcccaagatcaaggcactggcattgatgtctagtgagggctgctctctgcttccgagatggcacctattctgcagaggagacaaatgctcaggggacaaacaaaagagcaaaaagggcctacactagttccctgcagcattttttataaggaatacatgctgtataaggcctttttctctttttagaaggaactcatgctgtataaggctctgcctcatgcctttagccctttccaaaaggcctcatctcttagccacacagtagggattaagtttcaacacataaatttggggaaatacattcagaccatggcaaggggtgctgaatttattttttccgagcataattgagggagtgccatgtgagttgaaacaggaatgtttgttaaggtgttttgtcacaatgaggtctttgctgtaattccccttgagcaggcgatcagttgagtcttcattccttccctttttttttttccaaagatatgactccaattctggtggtgagagagaaattcagcgaacaatgttggaactgctgaaccagttggatggatttgattctaggggagatgtgaaagttatcatggccacaaaccgaatagaaactttggatccagcacttatcagaccaggttaaatttgctttggtttcatcatggagattaatgtgtttatatatttgtgtttaagtgtgctttgggaggcctataaaatgatacataaaaaagcaaatactgcagtgaaacttaggataatttacaaaaaaataggtcctcttgagatgagggttaaaacagagcatgatatggtctgtgcaccttggccctttgaattccagtcttatgtcttgtcttttcttttccataacattccctttttagcctcaagaacttgctgctttttctggaagaaataattcatgtgatggtaggatttgtcctttttacattcaggtagcatcagaagaaacagtgatttgtttgctgtcttttgtaatgtttttaacacaataggtctgcccagtttcactcaggaattgctcctttcatttatttctgaaggtaccaaagcagagagagtttcttttaaatgaagagaattcaaatgtagaaatctacaaactacaaaaatatatgtttactttttaaaatttagacatccttcccacagaattctgtccgactgaaacttcgtatgtaaggagatgggctgaggcctctgagccatggccgagcctgggtttggatgttggtgtgacttcaaatctctttgtacctgcaggccgcattgacaggaagattgagttccccctgcctgatgaaaagacgaagaagcgcatctttcagattcacacaagcaggatgacgctggctgatgatgtaaccctggacgacctgatcatggctaaagatgacctctctggtgctgacatcaaggtgagagcctagccgtgtcagcttatttctgggaatgtggccgtcaatcaggaaagagtctatatgtgctcttgggatggtggttggcctggacaggtgggtgtctgtattttaatcatcatattggtttacgattacatccaaatggtatatgtgcttgatattgaagtcattcttaatgcatcattttatgcagtgaatgacgctaaatcacctggagccacaaggctgagtcgctggtactaagccttaggcccaggtgactttctcaaggtgtgtcaaatgtagctgctcagtcccaggtcaggggaagggtatgtcctgggagaactctccccagagccgcagagtggggaccaagcacccgctgcattcatctcccaatctgtgttctggaag

SEQ ID NO: 77406 - DNA, 1046 bp, Homo sapiens
ttcacatcctttcagaaaataggatgcttaaaacattttttttaaaaatcaaatctttcccaaataagcaatttgtgtttagtctaggtgtctcatgctttatttcagaacagatttttttttttttttttttgaggtagagtttcgctcgttgctcaggctagagtgcagtggcgcgatctcggctcactgtaacctctgcctcccgggttcaagcaattctcctgcctcagcctcccgagtagctaggattacaggtgcctgccaccgtccctggctaactttttgtatttttagtagagatggggtttcaccgtgttggccaggctggtcttgaactcctgaccttaggcgatccacctgcctcggcctcccagagtgctgggattacaggtgtgagccaccgcgcctggcctcagaataggttttttggaattccttgttagaataaaaatgagtatgtcactttctgaacacactcttctttcttacaggcaatctgtacagaagctggtctgatggccttaagagaacgtagaatgaaagtaacaaatgaagacttcaaaaaatctaaagaaaatgttctttataagaaacaggaaggcacccctgaggggctgtatctctaatgaaccatggctgtcatcaggaaaatggttgggagatttctcaatccctgaaagggatgaggttgggggagttgcccagaggaatccctgttcccactgatttttattagcaaaacatcctgtgtcttttggagtacgatgtgtaagtgcccattgggtggcctgttggtcactgtgcagcagtctgcttcccaataaagcgtgctctttcacaaacacttcctgtttctgcagtctccacacacacctaccgctcaacagcagcctgtgggtggacccagctacagggaagcctttggacaggaactcaggctgcggtcccaaggagtgtggacctcactatgcgttcgccacatcacacccccagagctggcgttcaacggtaattacagtgggaaatggtcactaccacagagc

SEQ ID NO: 77407 - DNA, 1117 bp, Homo sapiens
ctgaaactggccaagctgaagctctgcacagagttctgggagccctccactctggtcaaagagtggcagaaactgatatttttgcatcccaataatacagccctttggcagaaataccttttattttgccagagccagtttagtaccttttcgatatcaaaaattcacagtctttatggaaaatgcttgagcactttgtctgctgttaaggacggcagcatcttatctcaccctgcgttgcctggcacggaagaggccatgtttggtaaggagataaccagatccagttacgtgggaggagttagactttcttttggctttacttgaaaatgaagatctatttttgatttattctagaaaaagtctaaattgtttgatagaactgatttttttaaaaaagtattacgactctttttgataacaaatttgcccccagctcccagggcaggtgggggcaatagggccagtagagttaagatatcactggacaaggttctgctgattagccaagtaaacataggcaagtctcttaactgctttggcagtcggtggccttatctgtcgagatgcatgtacctgtctcacccaattgtagggtcccaggcagtaatgtccgtgagatgccctgactgggaaccactgcataaatagaagttttgggtattattatgctgttaacatttttggtgtgtcctgaaggaacctggaacattaattttgacagtaatgagatgttggaggctgcatgttatgcagagccagagagtatcacttttgaccttgaatcctgaagggtttgcccttcactggctctcttgtgtccttgggcaggtcctctttgagccccagtttctccatcagcaacaatactataaacctgctttacaggactgtgttgcacagtaaacgagataatccatggcgagtctagctcagtgtccggcacagagcaggcatttatttgatcacaacccctgttattgagtattaattactgttggcatctaaagatagaaatacattgctctcaaaatataagcatttatcacactgacacagagtcttgaatttgtcactgtatgtgatctacacaaatagcttagtgttatttagtagc

SEQ ID NO: 77408 - DNA, 1044 bp, Homo sapiens
aagtgcctctcccttcttcttcttcctttgtcccacagtcaaggaaataatgctgcagctgatactggacatcgctttgtttggcttgaggacattcaggctgtgacgggagaaaccttcagaacagataagaaaccagatcctgcgaactgggagtacaagtctctctaccgaggggatatagcaaggtagtcaccttgttttcccccagttttcactgtaggaaagtgacttttttctcctcggaactctcttggcactgtctgcctgcctgtttctctctttcatcagttctgttgggttttatttattgcattgttcaggcacatgtctcatctcctattctaaaatgaaggcttaacacttgaagtcaagtcagattaatcttatttatccctggtgctttgcatagtgcctggcacagtaggcgttcaataagtattagttgaataaatgaatccaaaagtaccttgtaataattaattgtgacagactatctggtaaccatttggtctaacctatatgtcattttttaaagttggaaagctttcatttatccactccccacatctgtcatttaaaaaatgacatttagtggtaaggactttttcaaaatgtttctggcatacaccatcagataatcataaaaatagatgatatttgctttagtaatgagtttgaacttttcccctctaatttggcaatcaaaaatatttgagtacttactaaaccctttagaccaaacttgtccaacccaaatttgtaaactttcttaaaacattatgactttttttgtgatttttttttttaactcatcagctatcattagtattagtgtattttatgtgtggcccaagacagttcttcatccagtggggcccagggaaaccaaaagattggatactgtattagcccattttcatactattatgaagaaatacctgagactgggtaaattataaagaaaaagaattttaatggactcacagttccacgtggttgaggagacctcgcaatcatggtggaaggtggagaaggagcaaa

SEQ ID NO: 77409 - DNA, 2054 bp, Homo sapiens
gttggatccataacgtccctgagccaacaaactgaagcagctccagcccatgtttctgaagggttaccgctgacaaggtagtttttgtttgacagatgtgttttcgtttttgtcagtttactgtctatagcttagctgaaatgaagctccttagaaaactctaataaaagaggtatgtaaaactcttacttaaagtaataaggtgatctttgactattttcccttacctcttgtattcttttttttttctttgctttgcagtggcaagtacatgacacagttagtgcctgtaattaggccaagagggaaatggcatcattgtgattctcgagtaactttactagcctcattagtaacctttagaacatcataattcaggtatttttttagttacattttcaacccttttgtaaaaatagagagggagcttgtataagattaaaaatggcatcaaaacgtcagggaaagcaagatggcacacatctctcctcagctgtgaaagaattttgttttagatcattgaactgagaaataagctgtcttacaaatacagactagatttcattaatagggtgaataggttgtgaaacccggtactctaaatgtgtaagaagcctttggaaattgagaagagttgatgtatgagaggaagttggtagatattagatatttcagtaatgaggaagaagagctcattgtcatctccaaaaacaaggaccacaattaaatgttttggtttttttattaacaacatgttgacataatatgtggcactgaaaataaacctttttataatgattttttttgaaaattattattattatttttaaaataaagatgaggtcttgctacgttgcccaggcttgtctcaaactcccaagcaccttcagcagtcctcttgccttggcctcccaaagtgctaggattataggcatgagtaaccacacccagccaacctttaataatgtcttaaaaatactatatttgttaagtggtaggttactttcatttaaagatgtataaataagaaagtataggtttagaaactattaaaattggaatttcttcacctgttattattttagatccaattcctaagtcttgcaggtgaggtgtaatccagtaagttactgtgtaatatatgggcaaatagtaaatctgtgtgaacatttatatagttccatcttaaatatttgttgacttatttacatagtattatttttcctacatctttttagaaagtaattttaaagttgattttcccaaacaggagtcatctgaaatcagagtcttcagatgaaagtgacactaacaaaaagctcaaacaaacaagtagaaaaaagaagaaagagaaaaagaaaaaaaggaagcatcagcatcataagaaaacaaagaggaagcatgggccgtcgagtagcagcaggtctgagacagacaccgattctgaaaaggacaaaccttccagaggcgttggaggcagtaaaaaggaatctgaggaaccgaagtaggttgctgttctcaagcacctatgatattttaagtcttgagtttttctcccttaattgttgccgcaaattagatatttgaataaccatttagtcactcagtcggaagagagctctaccattatatcagcttaaaaaagagaaggagaaaaattagggacacgattttatttgagaaatgttatttagacacagtaatgattgtgtgaatctcttttagacaaaaagtctttgggattttcaaaagatggcagatgtgccacagtgggtctgtgagtcagtgccgttatcacatagataacggttccctctctgagggccgtgggtctccacactctgggtaggagaaacatcttctttctctgccttgatatatctttcattcagtcactcctatcaactcctgtgtgtatacatgatcacacacactttaagattaacgtagcacttaaataattgttacatttgtccttttccttttctttttcatatttgtttaagaccactatgtcgaaggcagtggaaaacagctcatgattacagtgtttc

SEQ ID NO: 77410 - DNA, 1066 bp, Homo sapiens
tatccactcaggagaaatgaaaatgtgtccatatgaaaacttgtacatgaatattcagagtagtagtattcatattagctaaaaagaagaaataacccaagtgttcatcaactaatggacaggtaaaatgtggtaaatccataaaatgagatatttgacaataaaaacgaatgaggtagtgatacacactacagcatggatgaaccttgaaaacattgtggtaagttacaaaagaccacgtatattatatgagcttatttatattaaatgtccaaaataggcaaatctagagagatagaaagcaggttagtgtttggctaggggtgaggtgggcggggcagggaaacaggaggtgggtgataggagtggactgctaataggtctgaggttttgttttgggatgatgaaaatgttctaaagttatgaagatgaccacacaactctgtaaatatactaaaaatctgttaaattgtacatgactaatggctgagttatggtatgtaaattatatctcaataaaactgttcaaaaatgcagtcaccctcctcttttgtaccttcaaccatttaacgggttcttcctctttaggatatgaataagctctggcctcccatccaaacaaaacaggacaaaatacaaaccccccgtgggctcccttgctgctgccatcccatgttttttttcttcccttcacagctaagactcctaaaagttagaaaataagtaatttagaaatcgttcactgtagaaaagtaagaaattaggggtaagcagaaagaagaaaatctttagacatttaatgtaatcacctagagataatcatcacagtattcacatttatataattttagcattaaaagttaacatcttaggtttttatttccaaagaagagtactattataaggaaaagtttgttaagttagtgtactaaggtagaacatggaatattttttaaaagatcttaatcttctgtaataatattaagcatggtgggcttttatgcatgatttgatttgcttttgttttgttttgttttgtttgagatggagtctaactctgtcatcc

SEQ ID NO: 77411 - DNA, 1032 bp, Homo sapiens
cagcaccccaaactggaagtggccgctgcagacccaaggacgaggggcacgcgggagccggcagccctagtggagcggttggagatgttgaggtgggagggtcacccaggtggggtgaggctggggtaggtagcggagtgaacggcttccgaagctctgggccgcccccaggttggactaagcaggcgctctgtcttcgcccccgcccagggtgggcgtctcctgaggactccccgccacacctgacccgagaccgcgcgcccagcctagaacgcttccccgacccagcgtagggccgccgcgactggcgcgcagggggcggcgggaggcctggcgaacccgggggcgggaccaggcgggcaaggcccggctgccgcagcgccgctctgcgcgaggcggctccgccgcggcggagggatacggcgcaccatatatatatcgcggggcgcagactcgcgctccggcagtggtgctgggagtgtcgtggacgccgtgccgttactcgtagtcaggcggcggcgcaggcggcggcggcggcatagcgcacagcgcgccttagcagcagcagcagcagcagcggcatcggaggtacccccgccgtcgcagcccccgcgctggtgcagccaccctcgctccctctgctcttcctcccttcgctcgcaccatggtaggtcgggagtggcaaatgccggcgtagcagctgcccgagatttcttcccagatttctagttgttttgtttgttttttgtttgtttttggttcttggaggtttttcttttctgagtgttacgcagcagctgcgcttaaaggaggttgcattttggatttgcatctcggcgacctctgccagggagcttcatttattggttccccttggagctggacttggtcgtaggccgtccacgggcaggggctccggccgcaactgcagcgggggtttctgcatccaatccccctgccccccgcccagccccgcacccactgcatccactagcgccgcacccgggctgcctgcagcgcagcgtttcggcc

SEQ ID NO: 77412 - DNA, 1006 bp, Homo sapiens
gtgagctgagattgcaccactgcactccaatctcggtgacagagcgagactccattgtttaaaaaaaaaaaaaaagattggatttaggactaatttaagcatgttccagcttagccgccttgaaacctttgggaatattgtggtgtgtggcactgtttattgggagcagtgtttgctttatgggctgctgtatgaaggccagtccaacaggactattgtggtcattatttcagtagataaagaccagacttctgatacgttgcacaacttgaatggctggctttggcaagcccccggcaagtgtgtattgtgactgggttggataaagacattgattctaacgggtcaacttttgttttcagaattcaaggaagccttctccctatttgataaagatggcgatggcaccatcacaacaaaggaacttggaactgtcatgaggtcactgggtcagaacccaacagaagctgaattgcaggatatgatcaatgaagtggatgctgatggtaagagctttaaaaccatgaatgagggccattgttgtgtaattcaagttcagacatgttacaggattgtctttcaggtccccagagcaaagcaaatgtgcaaagatcctttctgtggttgccccagggccattgacaattaaaatagaagatgatgggccttgcgtccatcctgcttagtgtctagaatgttttctgcatgggatcactattgttttcttcctgcttggtgcgacctagagctcaaatctatttttttttttttttttggagacggagtctcgccctgtcgcccaggctggagtggcactggcgcgatctcggctcactgcaacctctgcctcttgggttccagcgattctcctgcgtcagccttctgagtagctggaattacaggcgtgtgtcgccacgcccagttagtgttttgtatctttagtagagatggggtttcaccatgttggccaggctggtctcaaactcctgacctcgtgatccgccct

SEQ ID NO: 77413 - DNA, 1079 bp, Homo sapiens
ccgagctcaaagcttttatcaactggcccatgagtctgcactgagtcttgaggggggaggtgaaattaaatagccatagaaagtgctttttaacaaacttactgtgtttaaagaggaggaggaacccccagatgaagtaggtgacgagcactcttagaagttaccataaaagtgagtacagtgtgagctgtagatgtgtttgctgcagaggagcatgtgaggtttggaggcggatgtgtggtgactccaggggatagatttgcagaacctaacggaaagggaagctgtaaggtgcagggccagagggaaccagcagtaaccctgatagcggtctgtcatctgttcctctcgactctacagcagcggacaacagaactttgattgctgatttccatcagtaagcaggctttgaagcacacttccccacccctaaaaaaaaaccacgtattttggtaaatcctatatatattctaatgtactgtatgacagtatagaacatgatttttaaaagatgagttgggaggagaaaaggataaaagaaaaaataaaagaagcattaagaataaacaattcggatctagattttactttctagatgattgactcgagggtggtgtagtaaaatcgcttgtctggtcacaaacatttggcagcagagcttttgattaggttctttgacaaagccttcagcacgttagagtggttttcactaatagtgttttggaaagaaaaggttgtccatagttctctagtttgctaagatgatcagctacccaggaacgtggagtaacttcctcttgtttgtgggagccccgggaatctgtgcctggggaggggagaagtctgttaggctcttggattgtgtggaagaaggagaagttgtgccaggctacagaatcctgtgtttgcactgagaaaacaggatggtacctgaccttctctgcatggctgtgagatagcttaaaataatttcttttgtttttgatgaatatgaacaatatcttaaaatttttgaggctaaaaaagtcttgaagggatccctgaggtattttctttgaaaggtactggtgaaaatgagt

SEQ ID NO: 77414 - DNA, 2641 bp, Homo sapiens
ttcctctctcataatcttttctcctctgaaacactttatacacttaacctgcagctcagttctaggccttttttgtgttactgctgtcactaaccaaggcagagtgagacctgagtgatttccctaactcagggatggcagtcgggggcgctttcttccctcggagtggaaagattcagcctgcggagtggtgtatgctatttttctcttgaactgtacagcccttcatgacccttccatgggcttgaatccagatgtgcagtttcctttgtataattaaatactatcctgggcactgatgatgagtttgaaattatgtgaaattgccctgtgaagtgtttgaacgttttagacctgcagatgattgaacctagtaagatagtctgcccctttgtcctagtacatgtttaccgttccgtacagtggttctgaaatgattactgcagagcagcgttaatggagtgcttactttacatgagctttttgttttttaattcgaggtaatggcaccattgacttccccgaatttttgactatgatggctagaaaaatgaaagatacagatagtgaagaagaaatccgtgaggcattccgagtctttgacaaggtaatccagcatctacatagcagatggtacttaagtatggcttcttccgctttcacttctaaaagctataataatgttatagacagaagacttaaatctaactgcctgagcctctgatctcactttcaaaaatcctccttatggtaaccgtatcaggggagggtaggcataataaataggaattttggaccatgtttcttgactgttactttgaattgttgtgagcttttgcaaatcctgttttctgcattagctgtttgcatgtatttagtaggttagaggtgggaactagagatcagagaattgtttatggcagcagagttagcagtaacttgagagggcatagctaagtcaaagacctacttccccacactacatcattagcaataacaattgctgaatgttcacaggatggcaatggttatatcagtgcagcagaactacgtcacgtcatgacaaacttaggagaaaaactaacagatgaagaagtagatgaaatgatcagagaagcagatattgatggagacggacaagtcaactatgaaggtaaaactaaattctctgagctcagtgtttcatagtcttacctttagatctgtaagcaagccaactgcttcactagacagcctttgactttattttatgtacagtaaagatgttgtgttcattaaagctgttttcaaagataaccaaaagttactattatatttgtcttttcagaattcgtacagatgatgactgcaaaatgaagacctactttcaactcctttttcccccctctagaagaatcaaattgaatcttttacttacctcttgcaaaaaaaagaaaaaagaaaaaagttcatttattcattctgtttctatatagcaaaactgaatgtcaaaagtaccttctgtccacacacacaaaatctgcatgtattggttggtggtcctgtcccctaaagatcaagctacacatcagttttacaatataaatacttgtactaccttaatgataaggactccttaaagttccatttgctaatgattaatacactgtttgggctggccagtttttcatgcatgcagcttgacgattgagcacagtcaggcctttgtattaaaaatgaaaaatgaaaaaacaaattcaaaacctattcaaatgggttctagttcaatttgtttagtataaattgtcatagctggtttactgaaaacaaacacatttaaaattggtttacctcaggatgacgtgcagaaaaatgggtgaaggataaaccgttgagacgtggccccactggtaggatggtcctcttgtacttcgtgtgctccgacccatggtgacgatgacacaccctggtggcatgcccgtgtatgttggtttagcgttgtctgcattgttctagagtgaaacaggtgtcaggctgtcactgttcacacaaatttttaataagaaacatttaccaagggagcatctttggactctctgtttttaaaaccttctgaaccatgacttggagccggcagagtaggctgtggctgtggacttcagcacaaccatcaacattgctgttcaaagaaattacagtttacgtccattccaagttgtaaatgctagtctttttttttttttttccaataaaaagaccattaacttaaagtggtgttaaatgctttgtaaagctgagatctaaatggggacaaggcaggtggaggggaggccagtgtacatgtaaatgcccacagcccagcattgggtttccctcccaaggccccagcaccaacctctgagcccaagaccttgcctgaaaacaagcagataccgattgcttcatcctatttatggacatgtaggtctagttgcattttcactggggggaggggggaaggtgaattatggtaacttttaatgatctattcaggcagtagagctcttaaggaaaaaaaaaaacccactttctctcaagcatgtatttaggggttgttctcaattgtgctgctgattacctgtcttatgtaactacttgagaccatctgcaagagacatgattt

SEQ ID NO: 77415 - DNA, 1174 bp, Homo sapiens
tagaagcagtagtcacttttgtaagccagtctcttcatgcctaaaagacactaccagtcacctttgattcgcgacttttaatttatgattatacttagcctcctcctcctttttttttttttcccaagttgacttgactttgcttttttccccccaagtagaactaatgctagcttccagcttgaaagtaaaactccagtgtggagtgaattttgtgtctaattataaacctgtaaccaaaactcagacatctggtactggtctttgcattgagattggtccctgtaaaaccccctttaaaagcatattgcatttagtacagagctcttttttgaaatgaaggctggagatgtgcatttttcacggtgttaactggttgtatcttattagcaaggagattggggttttgagtgtttgcgtgggtggtttcaatttgccagggaacagtggcaggctgctagcaaggcagtgagaagctcttggcagccaaatgggtgcattcagggctgatttatagagacccttggcttctccttctcctactccctgtctttctggcattttgtagcttgttagattttctgccagaggggtgggtcagagcagtggaggggagacatcgcccatgtgcttctgctactggtccttgggctgggtggttggtagaggagatgttgacactatgagctaagggttggcttttgtaattacctgaatctgaaaggaatgcctaaggttaccttggggtttctcttctggtgagatagggttcctggtttgagtaagttaatgtcctggatatttcttgtggcagggggtggtcaaagagcctgattgctgacccagtctcaggcctgtggtcgatgacctctcggtagtttcaaagggggctggagggggatatttgacttgttttttcgaaatgtagccttctaaccctcaagtctttagaagctgggtggactcttagtggtcctgcagcgtatcctaaaagactacctttgaaacaggattcttgtatggccaggatcctgtctgggaaccagaaaccctacaccctccccctccagggaatgctgagttccagttttgagcagaggtgaggcagaatccactgtagccttccgccctggtatttggggggatgaccagcccaggcgttgggtgttagtct

SEQ ID NO: 77416 - DNA, 1201 bp, Homo sapiens
acacattgaaaatgagctattgtacatatttttatattctctttataaatgcatgtctgattgtacttgtaacaatattgtaatgaacggctgtgcagtaggcccagcgctgctgtgtctcgtcagaggaatagcttaccacgaacccctcagcatactgggaatctcttcctgaacaacgaatgtaaatttggtcaagtctactcttccgttcattcaattattttaagcatttgaattatttattgtatatcctaaatatatttctcctttggcagtgactagatttccactaatgtgtcttaatctatccctccagctggcagttactgtttttttaatcccctgaagttgtcctgtaggagacagaaattctttgctgtctgtatcccttggagtaagaaggtagtggcatgggtggagtgtgtgttctttctccaaatctattatgatgtttattaaacacttctgtagcaaagatggtggtagttcttttgttactgaagttgcccttcaccatggctatttgaaaaggagatgtacttggacgtttctgtaaatcttgagataaactgtttggagatttaaccacctctctgatgggggaccaactctatggaaattgtaaatacgttttatttataaacctggcactgtattcaataaacatttctgcagcctttcatctctaactgcgaactgtgtaggtttctagcttgcatagctttcaattccttttgctctcaacaagatagacctgccctcagatgtaatttcactgggtctctagtactgtgagagtgaggggccagaaataaccgtagacacatcccacaaccgtcttaccctagttttaagtagtttgagtgttaatagctgacattttaacctattctcttagcctattaacttgtccatgcttgctttttatgcggaaaatttacaccataaggattagtttccttttaaccccaatccaagcctctttaggacttgtataaagaaatacatttttttcaataagatgggaattttagatgacaaccaagatgataccttggttcatgtcaagagcgggacagctgaggaaagtggggtgggatgcaagtacaatttaggaccttggcattgaagccttccccttagtcaacactggcccagaccctggttcttagatgtagcaggagaggctgcctgcttc

SEQ ID NO: 77417 - DNA, 1062 bp, Homo sapiens
tggtatcatctatcattcaagcttgacctgggttgttggttacacaggtgttttccttatgattattacaattacagttattcatacactttccatttgtgtatgtcctcttctgtatgtctgccatgataatgatgatgaaaaagaaaaaaatggatgatggatttaaagagtcttgtaaactgaagtgctgtccacatattagggctcaggaagaacctcctcttctcacctgtcctttttctctaggttcagaatccagaatgtccacactaaaaggaaccattgtagtccagcctcccatgtcccattttacagcggggcaaactgaggcctaagaaggcaaagacatctcctcttccctctctccccctaccctcccaagggttccagccccaagatgtatgccctcctggaccccaatgctcccttcttgccttgagcacctgcagtgtgtgtgtgaatccagccaccttggaattaagagcccacagggcatttcctctccttgggaaccagttccaacgccttccatctcaggctgaaaaaaaaaacatttgcaatttcctcccacccacgactcctttcagatgcgctcagcctcaggcgtggacgagggctttattattttttaaagaacgcacacacaccctcccgagctcccatcagccctctgagcatccttctgcaaacctctccaaaggcataaaaaccaggctggggaaaagggctgggcctgctgcaggtgaatctaagatctggctcagacattacaagcgtgcaagaggctcccttgtctcctcgttccctcagcagatgcagcctgatttccctttgaataaattgcctccagcttggtgaaccaggaactttacgagcagtcctgctcccgagcccagtaatttgccagaaattagcagtgactaagatgcaccagcctctctttgttctgggcagtggggatcagcttgtcctgagttttcattttcagcactggtcagagagctgtggacactcagccacccagaggccccaggcctggggttaggggtgggggtgctg

SEQ ID NO: 77418 - DNA, 1048 bp, Homo sapiens
acccactccagctctgcacctgctgggggtgatcctcactgtgccactgtccctccctggactcagaatcagatgaggacagtcacctctgcccagcctgccttctgggctgagatgtgagtctgcaggcagctgtcagaggtggtgtgtgccaggtaggggacacgagggctaccgcccctcaggaccaccacacagggcctcagggccaggccagcaggcaggactcctcctggacactcaagccctgagtggggctgactatggagaggtggcaggaaggtggtgggggatcttctgcaggtctgcctggagccagcagctcccgctgaccatccgggccacccacagcccccaccaccctcctcgtctccctcatcttctgctgtttggcccttgaccccctgaggacaatagggtttcctggtgaccactgggctgtgggtcacacagatctggctggaatcccagttctgcctggccgtgtcacctctgatggggaagcactctgtctcctcatctctatggtcggggagtaacttcccttacgggcttttggggatattaacagaggtcaacctggacagggcatggggcccccggggtgcaccataaagtctttccttctttcttctatcctcaggcgaggggtgagtggctgctgggacgtgctgaggggtccctgaagcagggcaggaagggcagagctagctgcagctgaggcagagtccgagtcccgctctgcatggaggaggaggtgaggggcctggtcagcatgggcatggctgggggcctctgtgaccgccaccactcttgtctttgcctccttgaccccacagggtcatcctcgggccctgggtccagccaaggcctgaggagggtcatgcatccctgtcccacttggtcacagcacaggaggctcccatccgccactgcctgaggcggtgcctgtggcccaagggctcgggttgtgggcctgctgggctggagcctgcatcgggacctggccacctactctcctaggagccttaggtgagtcactagtcct

SEQ ID NO: 77419 - DNA, 1166 bp, Homo sapiens
actgactggaaactcgaggacaagtaggatgcagagctcctgaagcctccatggctgactgtctctctctctctctgacctctccaggccctgatccttcaccagctaggccgctacagtctggcggagaagatcctccgggacgcggtgcaggtgaactcgacagcccacgaggtctggaacgggctgggcgaggtcctccaagctcagggcaacgatgcggcggctacggagtgcttcctgacagccttggagctggaggccagcagccccgccgtgcccttcaccatcatcccccgcgtgctctgagcaggcgcctgccagcctcacctgccgctcaggcctcagaggccctgccgggcaccagggcttgtgccatcgccccaaggggatgaatctgccacactgaggccagggacgagtgttcagtgggccacagtgaaccaaccaaaccaaccccgaatcatcgctctcgccatgtgcgtttctcttgttttttttgccagcccaatggtagtttctgaacctattgacattgttcaaaatggatcatgtgccatattttgttagttgacatctgagttttcagtaaaatgattatggaattaatcagcaaatgtagaagaatatattcaaagttaaaattcagtggcagcacagattatttttatcagagctgtaaagaaaacaactgtccttttctccccaccacccctcctgccccactttggcccagaaaccaaatgtgaacttcctgtctcccacctcagcactagtccatgccaggacaccagctgacaatttcttggttttactgtcaataattgtaccatgtgatcaattactgtcctcacttagaacaaagcctgagtccgagaatatttatattttaccaatatatgcctgttacaagagaaggaaatatgagttatttaagtttaacttttttatgtgaattcagagtttatttatcgagggaaatatgtacaaagaagcttcaaatggaatatttaccgacattccttatacatgacagacacttggctacatgggaagatgatgttaataataaaatgatttttaaatggactcatagcctgtgtcattcgtaaaagctcaaagacctgagaaaggcttagttcctggggtggggagctgtctgtacc

SEQ ID NO: 77420 - DNA, 1024 bp, Homo sapiens
gaccctagtttggggagatttgccctaaggggaggatgtccaaatagttgtcaaggccgttccactgatcctcccccagggccactaaaaggagctcatgggggacactggactcccctccccaccccacccaccccaccaagttgttcctttttgtctgtttatacatagactgtgtgggtgttctctgtaagatttcatttaaccaaaggttttcagggatacaaaaaagattggaaatccactgatctaaagaacaaagaggtgctttctggaaagatgttcatgtctgtgcgatttggaacagcaaagagattggatgtgacctacatgtttctcccccgagggagaggttgagaaagtgagagtgtccattggatgagcgagtacacgcatcgcttatagaggtgcgcagcttggaaacgcaatgatgatgaaataggtgggacccacgggtacaccccaaccaaggaaaacgaagatgacagctgggcacagcctggggcaagcagagacagtgaggtcagggccttggtcggggaaggggctgtgagcaatgtaaaaactgtcgtcatcattctcatagtataattccaccaatggtttctttagtttaaaaaaaaaagacgacaggccaggccctgtggctcacgcctgtaatcccagcactttgggaggccgaggtgggcagatcacgaggtcaggagatcgagaccatcctggctaacatggtgaaaccctgtctctactaaaaatacaaaaaattagccgggcgtggtggcgggcgcctgtagtcccagctactggggaggctgaggcaggagaatggcatgaacccgggaggcggagcttgcagtgagccaagatcgcgccactgcactccagcctggatgacagagcgagactccatctcaaaaacaaaaaacaaacagaaaaggatgatagtcccatcccatgctgacgccgcgctgggtcagtgcagactgcggacttccaattagttcattcatggttcttaagtttt

SEQ ID NO: 77421 - DNA, 1216 bp, Homo sapiens
tagaatttgctgcttcattttcttgattagaacactgaggctgagagagaagcctctgcctaagtggcagttgatggaggtcacacagcaggggtgggagcgtggccctctgccccacgtgacttctcccagccctgctctcctgcagggggagcataccttcagccctctcgctgagataactggggacaggcctttgctgccagtgttcagtgataaaagatcagccctgagtacagtgaggccctcgcaaagggatgagccccgccccaccccacctgaggacaggtagaagcagagggcagatggggctctgtcagggtctttgggaaagagtggggtcagagtttctaggaccccctgtctcaggccgtggggctcccaggaagcctccccgtgcagcactgcagtggccgcatgggaatggctttctgaccatggagaccctccaacacttccaggtctgacgcttccctcgccagagccctggggtcatagccctgcccatgtcccccccgttccctggcttctgggggagctcagcctctgcctgggcctgctattctcccctgtggaggcagtggtcccaggaccccaggggaagcctgtgcctgcagcagggccaagttccctcagagtatccctgatgcctgcatctccctggcctggcgcacatggcctggggcacagtgccaccttccccaaagtgcaggggcactggcttccccagagggcaggaggggtctttagggggtgattagcactaaactttccaccacgaggatcagtcgggccatgggggagtgccagcttccaggctgctctgtgctgttggtttctgcctgacttcttgttggggaagataggtaaaaataaataagtcaaccagggaaatgtagaaataagtgaacaggagtctcttgcccattaccagtggaaaagtaccagcaagaggggctgtgttagcacccacagaagaccctggctggcatgcagcaggccccccagcagcaggacccaagcttcccccctcctatgagctgacagctaccgccacgttccagccagcctctgagctaaaactcactgcctcaaagcacgtgatttaaacggcagatgggggaggggaggctggagactctggaatgttaccaaggactgcccaggcttcagggtaggggggatgcctggcatccccacatattgctggggaccc

SEQ ID NO: 77422 - DNA, 1101 bp, Homo sapiens
acaggttcaacacggttcttagcacctgcccagcatataggatgtacccggcagctgttagtcttctgtgccttcccttctcccaaaacagagtggctgtgagaatcgtgtgtgttgtgagaatcgtgtgtgttgtgagaattgtgtgtgtagcacagaggctcccaccacgagtccatgtagggtgggctttagggcctcgtaacagatctgcctcttccccgttctctagagaaggaaagggcctacttttccacctagtgtcccaatctgagagccaaggggtgcccagatgggttgcagggaggctgatctcctcagctcctgagaagccagagctgccccgccagtgccctctggctgtaagcagccacctctgtggccccctgggcacagaaccgccactgcattcgcaaagactcctgcgagcactgcagaagcaatatgtgctgttgcttttactcttccaattccctggtctccctccaagtcattgtttagcccctgcccctggacccattctgtgaacccctgcaagggcttctggcttctgaggagacttggagatgctccttgttaactgacccatacatggcaggtggccgggtggatcctccaagctccgcgtttgcccggcctgggtaagcggtcacatcactgtgccctgcccgtcacagctgactggaggttttgaggaaatggctctattcttgatactgaattattccatattgaagtggtaactgataagagctcagttgtgtgaagaaagaaggtgccaggctgggtctctgccgtcacccaagcatcatttccgcgcccctatgcagtttccaggcggcagttgctcccctacagtgttccctgcctgtctgctgtcacctctgctccagccctgggcctgagtttggggccaagccctgggggccctggggagaaagtttgtaaaaaactccaggagtgaaggtccccatttctggcaagccgcccgtttctgttttccttgctaaccagtgtttgtcggcgctaatgcactagaatcgccctgcagtgtgaacagaggccggcagggcagaggagcgctggccggggagaccccgc

SEQ ID NO: 77423 - DNA, 1029 bp, Homo sapiens
gagatgactcactcactgtcaaacagacgcaaaggatctcccagcccaggcgcgacctggattacagagaatgacagcgacactcagagctgatatttgcggagtgtgaggcaccctgctaactcatttaacccgcacagcaacaccaccgggcactgttattactcccatttcactgtcgagaaaaatggaagcacagagagatgaagggacttatctcggggtacgcagttagtaagcgacacagctgggactggaacccaggcagctggcgccagcaccgtgctcccgatctttccaccgcctgtcactgaagctctgggttcctaagggaccacaccaacatacgatttcacgactttcttgttctgcttctgctcctaacttacaggtgacctggggcaggtgaccaacagcagggtccccatcagtaaacaagaaagtcccctctcactgtgtactaggagagcacacgcagcagacacgacatatgaggcttcaaagttctttgtagagaaaggtaatccttaagccaagtatcaataattgttgaaagggcttcacacagctatcgaagaagctaaaactatcaagcagctatcgaagagtgtgtgtcaccagacagaagacagagcaaagatcgaagatgaagtgtccagtaggaggcatccagtaggaggcactactttgtcctcggcactgtgagttggaactgcagttatagcgaggaaaggcaagagagaaatgagggcctgtgcacttttcagggtcctctcaacaagcacatggacgcattggaaggctgggcactaaatacttcataagccttgctctagaggaaaaaaaagttattctcctcaatttggaaaacattttttaattatgaaagaaagcaaaatacaattaacagatgaaaaggccttctcactggactatcatgaagttttgtttcctgccagtcattctttctatgtatggaaagaaaactgatacttcggatgaaagagatccacgtctaaagatggccat

SEQ ID NO: 77424 - DNA, 1928 bp, Homo sapiens
aactgctggtttccagcagaagaatgctgatgcactgggaattaggccccatggaaagagtgtctgcttacaagttacatctgcactcgaactaagccctggtcctgactcctggggaagctcggacttgtcacttaacctttaggcaccttgttgtgtttaggtgaattgggctcctaccccagtgggatgttgtgagaaagaatgaaatgatttacataataatcttagcagagttcctggcacctagtaggtgctcatgaaataggaaactgaagacagtcattttcagttttaaaaagaaatcaaaccttaccataattacagctacttaattttttccaacttccctttgtgagtcttctgtggccccaaacagatttataaataattttacatattatccaaatgttagtctgtttgattaaaaatactacatggcttttaatttttttctcactattagaagaggaatttgtaaagagcttgtcagatctctgtgcttttgctgagagcatctagaagacgtacaatccccgccatgtcccagcctttttattaaaaagaggctgcatgtttccatctcggggactatgaattattcagggaagtatttcttgttcatccccaaggggaacacatgagacaaaagatcaaataggaaaatcgcaccgggagagttttctgtttcacctttggagcttttcaagacacctgagatgcctgacacatgccaggcactttcctttctgaaaggagcaagcagttgacccagcacgagggagctggtgagtgagactagggccatggtgagccccgcctgctgggtccatcggcaatgactgagccttactaggctcagagacatgagctgctttggagatcttgccagtagagaggggtcatcataataaactattaaaacctctctccgtggatcctgagatattgaaaaaccatccagattggaggcaggatgagaagagcgagactacagatttgaggagtttagagtctcgcagtcagaaactttgcccagtgactgatcagtgtggctcccgaaggtagcttgagcacgccttcttggtgattttctaaatgatgcacctggcctgtgttctccccagcctgtccccaggagcccagcccacagccagggggagccccatgcagccaagggcaggcccccctcccactggtgctgcaggaccctctggtgcctgtggaggggcagcccatggaccccacaggctcttcagccctgagacatcacactccctctctgtcctcttccctacaagctacacagggaagctgtgtttctgtgcccttcgatggaggaagggaggaagggggtcttcacgtataccctagaggcccaggaggaggccctggagccaggctggcctgggttagaatcacagctctggccccattcgctgtggggccttggacaggttattcaccctcttggtgcctcattttcctcagctatataaatgaggataaccgcgccaatacaacatgcagacagattaaacccaagaactgacatctcttgctaagtcacaaaaggttctgtctctaccctcacggaaggtggattggtttgcaagcccctgagttaagaggaaggtgtcagcagggagatgagaggctgtcttaccaggtcaagccccagggaggaggcagggccccgacctgtgtggcggagagtggcggaaacagagctgagcgttgacagttgcctggcacacagggagagcggcgagggggaggccagggaggccagggtcagaaggtcaagactagaaggagtttaaagaacagagccctagggagcatcaaagagccaactacggaggctccaagggaaggagccaactgggagacaggtcgtggatcatgggagagggtagaaagtgtgc

SEQ ID NO: 77425 - DNA, 1042 bp, Homo sapiens
cttcacatagccttttaagaggtaaatttagaagaaaacagctttcaccgcactgtcgggttttaccttatgtggtttgagctcccccactctagtattttgccattacagataatgcttcaataagtatccctatacacagtctaccctttacattctcaggttctgcacccacggatttaaccaaccttgcattaaaaatatctgaaaaaaatctgtctgtactgaacaagtacaaactttgtcttcttgtcattattccctaaacaatacagtataagaactatttaaatagcatttacattgtattaggtattttaagtaatctagagatgatttaaaacacacaggaggatgtgcataggataatttaaaatacacaggaggatgtgcaaatcctgcaccatttcatatcagggactagaacatccatggattttggtattcaagggaggtcccagaaccaattccccatggatactgagggctgactgtgtatttttttttatctgtaagataaactctaaacagtggaagtgatggatgaaggggtgtgtactctttaattttgataagttttgtccattgccttccacagaattgtaccagtttacattccagtcaacaatgtgctaacgtccactttctcacgcccttgccaacacaatgaattctcagaatccttgatctttccagtctgacaagtagaaaatggtatttcagttttctgtccgtagcttttgaccatttatcttcttagatactgagcttttcctttttatttctaagcacttattgtgtgtcaaagaaatctgccttgtctctgaaataggtgctgtaaacatcttccaagggttttttttttttttttttttagtttttgtttgtcttttgccgttttttaaaataaatttatcaattttttcttacggcatctgtgcctcccatgatatttggaaagcaactattcatgtttatggtttcttttcctaaaagttccaggtatgttccagtgccatttgtctatatactattctgtaaa

SEQ ID NO: 77426 - DNA, 1086 bp, Homo sapiens
tccttcagactgcagccacttaactgaggccaccagacagttagaaggagagctggaatataatatatcctatttattcggcaacacttgcgtgtgacaaatacagggatatgaagcataactaagccacttaatttatcagttatgctttttcctttgtctttttcttctctttttttgtttgagacagaatctcgctctgtcacccaggctggagtgccatctcagctcactgcaacctccacctcctgggttcaaccgattctcctgcctcagcctcccgagtagctgggattacaggcacccgccaccaggcccggctaattttttttgtatttttagtagagacagggtttcaccatgttggccagcctggtctcagactcctgacctcaagtgatccacccgcctcagcctcccaaagtgctgggattacaggcgtgagccaccacgcccagcctgtgccttttcttaacagaattattggtgctgggatccctttggatgatgaactttggtggaagagggctcacatgtgattgccacagctgaggtctatgtgaaattcaccataggtgtcatgtgcattggaaaaaggatttttggaaaagcttcacctgcaaaggcaatatgagctagccgtcccagtgtcctacttggggcaggcagggtttctcaacagccctcagtgtacaataggagcacgggtcagaaaacctcaggaagggttcagagcttggactcatggtgccctgagatcagtggccttggttcctcttggttcctggtcctcttggcccgtgaggaaatgccttcccatcacagtttctaggtcctcggctgccttcccccctccttacccccatgcatggtgatggagagaggagcctagaaggaaaccctggctcagaatgttcttcaggtggcactttgcctctgtatcaggtgtccaagataacattttcgattgaggatctaggtgggagggcaaggaaagccattggcttgtggaaatgcagatggcctccgctccaggacgtcacacgcccttgcaccattcgggccgtttgacgacagacctgtgct

SEQ ID NO: 77427 - DNA, 1103 bp, Homo sapiens
gcggttttagtctctgttcctgcttaatagaataaagtagctttaaaagaaatctaggtatatatgggagcatcactctgtgatgactgtaccatttttgaggggtggtgatttttaaaattcagctctaatatagaacctttttttgctattttaattaaactaaatttaatataattctccttaattagttctgtagtatctttctttaaacaagattgagtggaatgataggagactgacaagccaacagtaagtggcactcaggtagaagttggggagtgtgtccagcattagaatatcatcccaacctgggaggctttccccaggacgccggcagtcaggcacttggaggctcagagagccttccccaggcagaaggcacttccaccccaagacacagcctcatgaatatgcatcagggagggttcaggtggagatggaagcatctgcccaatgtagtcctccagaaggtactgtctctagcgcagagccaccggcagcggctcgctctgacagctggcaccttcctgcatgcgtgtgaacggcttccctccatgctttctgtgtgaccacctggccctgccagcacccaccagcagcatgctgcgctagccccgcatgcccaccggtgatgacatgtccccggccctccctgccttactggggtccttccctggaaagagcttccccctttcaggacaagacgtgtgctgtcaggtttaaacggtgcttgatattatgttaaagtcagtgggaaactgatcccgtcttggggctatgagtcttaatccttttttcacttggtgaaaaatggaagtgtctactagaatggtgaccaaggtgatttatttatcagaggaacccacagcaggagccctcatggttggtgggactgggtgggcagcggccccgcccctgctgtcacactgggggacacaaggcgcgagggcagctcccagggaagcagcagatggagaggagagctgtgacagcgcggtgcaaggagccaccacctggagtcgcctcctcagaaagcaggactaccctacagcaaagatgggaattgtcctaactcccgggcaccagggagatgaggggac

SEQ ID NO: 77428 - DNA, 1027 bp, Homo sapiens
tgccattttgcacttcacagtgtatctgaagatgcctccatacccatctgtggagaattgccttattcttgtttacagccatatagtattccatgacacatggattttacattctggattcttatccatccagcatgaccgcagtcatttttcctccctttgcctttgaacagttttcagttcatgtgctaaaagagcctggctgactttgaacatccgctgcaacactgctcatccagaaaagcgactgggctatagaggcaaagagaaaaggaacttatccgagatcagaatggttcccagtgaaacagaagtgaccctgagatcaaatgtggcctgggagaacccagccctggcgggtggcagcttatcagcgtcatgcccgacacttaactgcttttctaagtcccctttaaagggcacaggcgtccgacacaagcagagccctgcagtgttagcatccgtgagggtgcacagccacagccacagccacagtgaacttccactttcgagatcctgccaaccctggggcacaggcccaggatcacccgctgtgcaggcagattcctttgtgaggccgcaagtcctcttggatctgttttgttttcccccagaactaaatttattttttttctgttttttaatttctattatggaaaaatttctaaaatgccagaacagagatactaatattcccgttacccaccagtgagttttagcaatcagcattctcattcgatctctctctcctgtcccacacttgcttttcctagagtattttaaggccagtccctaatatcctattttgcctgttaaaatttcaggatatatgtgtaactgataagagcttaaaaatatataactacaatactattattatatatcctgggtccttatacagtgcagcctcagtattcatgattttggaagtggttggttaactggaatacggtttcctacctctgaaattgtccatatgcagagctgtggaataacatgaggagtcacccacgtccataagctttga

SEQ ID NO: 77429 - DNA, 1072 bp, Homo sapiens
tgctcaacccataccaatgattcagttgtaatctgggtgactcgacagactcacaaaacatataaatttgctcttctttgagcctcaaaaatcattctagagcatcatttggaacctgctcctgttccttctcccccacccacaggggaccgtgtacaactgaatttctatctgggtatgcctggtcttttatgggctggctgcatgacagggaccacgaggttattttcttgtccttgtgccacatcccagctctgccagaacctttccaaagaaagcctgagagcagctctgagtcttgcactgccagggcttgtcctgggaaaaacctatccaggtgggctaaaagggatagggcctttgggagccagatgtgatgttcaagcctggcccaccccaacagctgccttgcagactgcatttctgccctaggctcccttgtaccaaatttaaagtcagcttgagaaatcagatccaaaagtcctgcagctcctgggtaaaaagatttttgggcactggaagcggcacaaatcgtaaattggtgcagtttaatctggcttgcagctgctgcttaaaatgtggactgagccatggagaaactcaccccctggagtggcctgaccactctccaaacagttcagcagtcattggtgggcttagactgcacaccaggcagagagcctggctggaatagcacagcagagttctgcatcatcccagctcctgccgagggacctgtttaggccccgtcattgtaggaaagaggtcaggctgtcaggactagccactgcaaggtgaggctcggacatggggaagagaaggaagtgaaactcactatagcaccagcagcaatttcagctgattcaaaacagctgctgtggctacccagcgccgtctccccacttttctccctcctaagtatcctgtgagaacagccacactaaattcagaccccctttccttccagctggcctggaccttaatttccctggaggtcccaagactttaaagccacatcacattgagaacaggtagtgtcagaaaataaatgaggtccttgttattcattctt

SEQ ID NO: 77430 - DNA, 1476 bp, Homo sapiens
aaaaatgtcgatcagcccaggagttttgatttgttcggttcacagtgggacctaggcgtctgttgtttagagatgtcctgggtgatttttccgtgcagcctgggttttagaagcgcaggtgtggagcattggttcatgaagacaactcttcatggatggcgtgttcatggactcacttgctaagacttcactttctaaggttgctaatgccagtcggtttccccctgtaaggtggatggaaaatgaagcttcaagttttcatttttgtgtcttctaatgacataaaagaggccaaaattagccagggtctgtgggtgtggtttatgccctgtttgtgatagtgaacactgaaaggaatcgcagcccaggccaagccaggaagcaggatgcctccttcataagaaagatgctgaagaacgtaaaaaatgcacagaaagtattcattggccttcaggagtcagtattggttgcctctctttccttccctcctcccaccttgcaggtgactgacatttgtagctgtgttttgcagtgattctggacgtgggagcagcctcttagatagaaccattgctgacagacgacagcttaatacaattactttgccagacttcagcgatcccgagacaggtgagaataaaaagccagaggggacgaaatggtgtaatggagaatgtgggggcctgggaccaagtgacatgggatgagactgatcgggttggggttggaaaaatttcttgcacaaatagtttaaacactcaaccgaggtgcattgctccagtgtctttctcaagtgtttcttcacagtggggacggtcatatgatttgcccagcccagtgctttctttgaaatctatttccccctttgctcttggaacttaaaatttgaaactaaaatgaggtggtttctgtccccatcaggtttcccctctgcttccctgtgtctccctctctctttgggtttcagaccttgctgaaagcaaggttcactttctaatcagttgcacatataaacacacatacacccagcacaagaccccgtagggtggcaggtgggttccactgtccccatgtggaagcccgaggcacttcctgcctatgagcaaatctgcacacctcgtcgtgtgtgtgttccacatttgcctaagtacaggggagtgagtccacctaactacaggggagtagaccccacagtggtgacacaggtgaagtgtcccttacccgaaatgcccgggaccagaagtgtgttgggtttgggaatatttgcataaacataatgagatatcctgggattggacccaagtctaaacacaaagtccatttctgtttcatatacacctatacacacagcctaaatttaggcaattttatacaatattttaaagaattttgttcatgagacaaagttttgactgcattttgactgcagcccatcacatgaaatcaggtgtggaattttccacttgtgttgtatta

SEQ ID NO: 77431 - DNA, 1047 bp, Homo sapiens
cttcccggcttccttgcttctgagcatgctgggttgtaatgggccccctgctctatctgccagtttcccagtcttcccacccccttccagatccaccccaggctctgcacaggcctccagggcagtaagatgaggaagacgtgggcagtagcagggagtgagtggccaaattgagaatagaccctagcttcatattctcagcaacccgttccctcttctcgatttttgcttaaagggggaaaaaaattacactgagctagtcactaaactgagcattggaaaacttgcaaatagtgttccacctgcagttggagatgcgtctcttgctgtgagcaaaatggtgggtggcattctcttacatttggcgaggtgtttgtcatttcagaagcctggattctatttctctcggtctgcagttttgcttgcatttaggatagaaatctgtctcatgctttgtcttctgtcactgggtgaagtgtaaggctccctcagtccttgtgcatattgacccagccactcaagacagtgtgaattctgaccagaatctcaccagaaggtcccagcaggctccctgaactgaatctcacagcatttcagccagggatggtaataaccacgtttattgaaacttctccatgccagcactgtactaggccactgatgtgttatcttcaatccctacattagccttgcaagatagctaccgttacttccattttacagaaaataaaattgaagctaaaagtggctaaataacttgcccaagtttttccaattgaatatgtagcagaacagtgattcagccccaggcctaacatcaatgctctctccacactggcatgctgcctctcttgagctgacaaccagtttcttttcattttttattgttaaccaattctttccccctcttgtcactgctactagacccatctccatcatgtacccatgaggtgacatctccaggtgattcaaagtcctgtttcagttacttgccaacaaacagcatttaaacacacacatactcacattcacatttctttgctctaa

SEQ ID NO: 77432 - DNA, 1047 bp, Homo sapiens
cccacagaggcaccctgagcggctgccatcccatttaggcagtcttggtaaggcttccaaagcatttccgcttcttgggatgtttttgagcagaagctgagccctattctcacatctagcctcgctctttatgctcatctgcttgtagatcagagactacattcctccctttacctggccctcgtcccatcattccaggcttctgcaagcccaggcatggggaggctgcagccgtggccccactgggagcaccgcaccgccctggacttcctatgttccatttggaggggtcgctgggggcgcttggtgtgaacccatcctgagcttgggcagtgatgggttaggaccactttcattccacctctcacacatgaaaaagagactttcctcctctaaggtacctttgaatgaggacatcacatcatgcagggtgaaggaattctcctggatgtccagctgaaatctctaaaatgccttgctttatagaaaaagtagtcagtgagtaaatgctgatttaaggcccatcaaactcagagcacaattcttggaactggaggtgaggctacagagaggcagagagagatgtcagggctcttgtcctcaggaagaaaatcacatccagaaaacaaccaaagggcaccagagcttcagtttccatatctgttgaagagtgttagacaccacctgccttgacagcttcttccaaggacattgacagcgtgtgaagtgccaaacacaaggcctggcacgtgggatgccttcggtcagcaggagctcctccctctctttttcttctttttattattaacaacaaatgccagctaatatggcacatactgagtagagaagataaggggttaaaacttgaagacttacttatttaagtggggttttggctgggtttgggaagaattaaagaaagatgtgcatgagtagaagttgaagttggggacgtggcatgtgtagccatagagttgtgccagaaaagtagcatttggcctatgaattacattggcagaagtaaagggtccaatcggatgagacagt

SEQ ID NO: 77433 - DNA, 1021 bp, Homo sapiens
agatcgagaccatcctagctaacacagtgaaaccccgtctctactaaaaatacaaaaaattagctgggcgtggtggcaggcgcctgtaatcccagctactcgggaggctgaggcaggagaatggcgtgaagccaggaggcagagcttgcagtgagccgagatcatgccactgcactccagcctgggcaatagagtgagactccatctcaaaaaaaaaaaaaacaaaaaacaagatagaaggacattctgatggatgtaccaacatagatgaaaattgaggacattatgctaagtgcaataagccagtcacaaaaggacaaataatgtgtgactctactcatatgaggtacgtggagtagtcaaactcatagagacagaaagtagaatggtggttgccagggctgggagggggaatgggaagctattgttcagtgggtgcggtttcagttttgcaacacgaatagagtactggaaatggaggctggtgatggttgcacaacagtgtgaatgtacacaatgccactaaactgtacgcttaaaaatagctcattagcaaattttatgttacgtatattttactacattttaaagaaacgaaactttctgagctccctttgttaacatgtgtggctgcaggagggtttccagcattcgtagatgacaagggacccttctgctcttgagattctccggctctgcatcacggagccaatgttcttctgggatggacttgctgagccacggaagcagcctcccagcaccccacgcgcatggatgtcctctttctgtgaggctttggctctgtgctgttgccttcactaaacatagatgcttgtcaagagggacaaaatcccccaaatgcaatgaaaaattgtctggaaactgaagatttggtttatgaggcaaaagtagaagaactggaagaggggaaatggcaggaaaatgtatttgaagccacgtttgtttatgagaggatcctcctttctccggggttggagacagccatgtcctgagattagga

SEQ ID NO: 77434 - DNA, 1286 bp, Homo sapiens
tgtgtaaatgcactaagatttccttacttagtctactgtgaatagatacgtgggttgttttcaggttttagctattatgaacagtgcttgtaaatcttctttacagggctcctggtgcacacgttcaaggatttctctatgagtgaaatagttaggtcgtaggatttgtgtatcttcaactttaccaaataattccaaactgtttttcaaaggggttgtattagtttacactcccatcagcagcgctcaagagccctgtggttccatacaccaatacttggtgctgcccgacttcatatttttggcagaatggttgctggttaatgatgtcaccttgtgagtttaagttgcgcatccctcattactaatgagtttggacatctttttatttgtctattggtcattcaccttttctcttttgtgaagtgtatgtgaaattccttcttttttattggatggtcttttccttaataatatttctttatgtattttggttacaagtctttttcttagttatatgtgttgcagaaatcttctcccaagctgtgattttgttttgctttctcttcatgatgtcttttgataaacagaagttcttaattttaaagtaatagaaagtagaagtcgtttcctttatggacagtactttctatgtctagttgaagaaacctttcccttctccaagatcatgaaggtagtctcctaaatcatcttctaaaagctctcttgtgctatctttcacactgaaacctaagggcccacctagaatggactgttttatgtgtgtatggtatgagccagccaatgtgattttccccataggatattcaattgtcccagcatcaaacgctgaaaagattctttgccctgttgctccacagttccacctttgtcatcaaccaaatgtccgcagttgtttctaagtttcctgttttgttccattggccatcgtgccagtcccatgtgattgccactgtcttgtcactgtcatagcttcattatatgtaaggtgggtccctctctgtatcctgctctttaggttgccatggcttgtcttgggcctttgaactttcacataaattttcaaatcagctcgtccagttccacagaaaacttctggagattttggaattagtttaatttaatagcttagtttggggagaattgtatatttatgacagtaggttttctaatccatagccattatagctccctaattatttaggcctttacaagtatttttggatgtttttataattttttaataaatattttgcccatttttt

SEQ ID NO: 77435 - DNA, 1041 bp, Homo sapiens
ccttcacttttaagttgtgtgaccttgagcaagtcactaaatctctctgagtctcatttcctcatctacaaaatgtgaataataaaatatccatctcagacagttgtggtcagaattgatttagctggtgcatttgaggcattgtacctggtaatcacgtaataattggtagaaactcatattactatgactattactaccaatactactgaagtatgttcaaatatggtattttagaatcctttagaattgttcttaaatatggaataaaatcaaatgaatgtttattaaatatatctaaaatcatacaatgaacatatgtgtttgcctattcgtagtttagaaaaaagaacattaatattacctgtgaatttcctgtgtagatttatttatacatatatacttacacgtatcttaaacatgtgtatgtatttcctaggtatatggatttttcgtgtaatattgccaatgatttttctctgtatcctgtccttttgcctgtcacctgacaggttaatgaccattctaaattctatgttaatcattctctcatgtttctataccatgtatattgtgctttttctttctctctctcttttttttttgttttgagacagggcctcactctgtcacccaggctggagtgcagtggtacagtcacagctcactgcattctcaaactcccagctcaatggatccttcagcctcccgagtagctgggagcacaggcgtgtgccaccatacccagctcatttttgtattttttgtagtgatggggtttcaccacgttggccaggctgggctcaaactcctgagctcaagcgatccatgcgcctcggcctcccaaagtgctgggattacaggcctgagctaccgcacccggcgtgtactcctaaataataaaaattgtgttttgcctgttttaaacttttggtagaaaatggaatcagactgaatatgtccttatgctgcttgcgttcattgcttaacatcccgttcctgaggctcctccttgttgcacgcagcagtgactctttggtt

SEQ ID NO: 77436 - DNA, 1036 bp, Homo sapiens
gttttgtaacttattaagcactttaatttcagtaatacttgaaaaaatgagaacagttcagctaaggcagtttaattccactaaaaatctctgacactttgtatgtgtctccacttagagcaaaatcatcttgggcataatcaaaagtagatcagttttgtggaaagaatgagaaagtgtttactcagggagaagggaaagacttggagcagtattggcagctacgtagagaaacagggtctcctgtatcactctatcagtcagaatgtcttttgaaggtggcttctgctttcatgtttgtggttaatatcctggggctgccataaagatttggcttaaaatgtgaatgaggcacaatgtgaaacaactcaatatttgaagagaagcagacattgaaaagatggcttctttcgcgcgtgtgtgtgtgtgtgtgtgtgtgcgtgtgcatgtgtgtatgtaaaaccttttttggttttgttttaaaccagatcccagaggctctggggtatgtccgccaagctcttcagcttcaaggtgacgatgccaactccctgcacctccttgccctcctgctgtcagcacagaagcattaccatgacgctctgaacatcatcgacatggccctgagtgaatacccagaaaatttcatgtaagtgatcctgggctttggttttcccttactcagaagttattaaatttacttcttcccctgccttctttccaatctgtctaagtccctcatggacaccctggcagtcaataatataaaatcccctttactgttattttttcctgatattaaaaacaaacttagggctgggcgccgtggctcacatctataatcccagcactttgggaggccgaggtgggtggatcacctgaggtcaggagtttgagaccagcctggacaatatggtgaagccctgtttctactgaaaatataaaatgtagctgggtgtggtggcgggcgcctgtaatcccagctcctcgggaggctgagggaggagaattgcttgaacctgggaggcagaggttg

SEQ ID NO: 77437 - DNA, 1108 bp, Homo sapiens
gcctgcacttcttccttttgcccagctttcttgttcagtatctgtctttctcactggactgtaggttccaggaacccatgcccatcattgtcattgctttaccctggcacttggaatgccacctgacatgtgttcagcactcaggaatactcgctaaatgaaggaaccagctttgaattccttcaaggcagctatcccttaaagacatcgttttgatccctgtatcagtttgtccctggttgctctggtcatccctgcaaatcaacatcatgcctatgctttgcctttcgacccacccatcaataccaggttgagtgctattcacatagtaggttgtcacctggggaaggatgagtaaatggagccttgtgggtgtggcagcagcctttgtgggcatgtagtgtcagaacaccagagctccgagggagtgtttccctgcttccccaggggagggggtttgaccaggaggagaggatggacaggaatcactctcttgtcagacactcaatagctgggtgacctttcccaagccatttcacctcccgggacttcagcttcctccctgtaactgaaggattggggtgaatggtctctcttccaactgtgagagctgtgattctatggttccaaagcagaaagcctccacagccagcagttataacctaaatccatcaagaaaagaagttcattgaggaaaagtaattggtttgggaaagagaagtcatagccttctactaaggagggaggttactgagggtttgggaaaaagcaggagagctgagaagaggccccacagaggactggagttggagcgagaccggaagccatctgtgggatggttgtgcaagaatgcttcagtccagagctctatttcgaaatctagcttcgggttctaattctccctggttactgccaaacctgcatggaatccagggtgtcacatacccattttgtgtgtattttatcaacccttgtgcttggatgattttgaagaaagtcttgaacagctgttgcactgaaaggttcaggatgtgtctggtcctacatgaatttggacacatctgctttgcatgcggcattgcaatttgtttctcagatcaacttattt

SEQ ID NO: 77438 - DNA, 1688 bp, Homo sapiens
gaaaagtcctgaggctatgtcttgaggccaagtgaagagtcccctggaatggaagtctatgtgctttgctcctaagattaatataaggacagagattagctttgcctcaccctggacctgcatatgagctattacatttgcataaacaatgacctaaattagtgaatttagcatattttctggatggcaaacacctgggaggtttgttagctcccttccctgcagcagacagtccaattaaaaggccttattattgtagaaagccatctttggcctgtttgccacagttgaatccataatgatttggttttcttttttatctcgaatttgttttctgctggtagaagatcctcctttaatcacagaatgttgacagaacagcatgaagttttgtttactatctgggtcccacctaattagtctgctccatggtgccttttaaagaaagtagaagtttgtttttctcttcccagcagttaaacacagaattatgtctagtatgtagtcaaattttgagttgcttatgctgaaatacaaatgacttccacatagaagcagagaagaccacgtttgcaatcagctaggaggccagtatggtcccttcctgtctgacgtcaaaggccagttcttaaaactgagcctagtgtctcaccacactcttacacgacagttatctgcaataaatcagtgaacggcatggaattttgtagaagcttcaaaagactgaatgagtgcctttctcttcccttttttcaccaaaaacccaaacctcattttataagcaaagctgggtctttgattttcatatggtttctctgaaatctagaaatttggataaagtagcattaaggaaggccaagccaaacttaaccaaagcagccatcgccttgccaagtgcacacatggcttcactgcgtcccagcacgacacagagacccatctgctggggagatcagacctcagggcctatggattcttcacctcgaggccctccgcaaagccgacaagcttcagctgccattttagatgctagacaaaacacagaaatgcactcctattctgtacctttatacagtggtaagagggaaatggtttacatgtgtaggtggacaaagaagaagagtttaaatgaagcattacatagttaaataaatacgggcccttagtataagaatgcaaatgtggagaagacttgcttgatagggaaagtaaaaatggcctcctctcccatgtactaatagccgtaaatactttttcagggcccacagcctgtcacccacagatcaccaagcagctttctacctggctctgcagcttgccatctccagacaggtcagtttctctaatgtttcctatacttgctgcactctgtatcttgatacaactccttcagctcttcagtttgaagtggtaggtgatcttcctttattccattgaggctgacctggagccaggaacccttctcagaggtttcagcaaagagcctggtgttttggttggtttgagcatcagctgtgaagacacaggagttccaggctctgctattggacattaaatccacacagctggagggcccaagctagggtcagatggcaacctggggagcagcacatggcatataccctgaacccaggagtcatcaaagagcctctgtcccttgccaacaggaaccaggtagcagaacccag

SEQ ID NO: 77439 - DNA, 1012 bp, Homo sapiens
caggaagcttagctgctgaagttgctccacgggaagcaagtattttagcatctacttgagatcaacacagggagctttttcttgttttgtttggcatttgccttatttccttcagagggtgaagtggtcagttgaattcattagccaagttgtagaaataaggtttttaaaatgtatatgtttcagttgtgcctcattagaaatttggcagttgaatatgcatcattagccaagttggaaatccttcagatgttgccctaatgcactccagaaataccaagatttctagcacttctggtttgttcctttcacggtgctgtggttaacagagaaaaatcatttgatgaggccagcatggggcctttagccagaactatctttatgtacaccctcaactcaacagatcattgccagcttttcagttggttggtattgcatagaggcaaccatgacttgatttattcgtgaagaatatgaattgaactgagaaaattataattctaagaagttctttttgagggttctgtaaatttattatttgtgaaagaagataaaataaatctaaaaatttcttcataattgtgtattatttttcctgaataattatgagagaaaccatgatttttcaatctcacttttataaacaccaaagaaaaatattctttgatgtacaaattcatggaaagccaatatttgtaaaattataaaagctgctatatactgagtggaccttagaaataagccatttagtagctgggcgtggtggcttatgcctgtaatcccagggttttgggatgccaaagtgggaggatcacttgagcctagtagttccagactagcctggatagcatgttgaaaccccgggtctacaaaaaattctataaattagctgggcgtggggagcacgcctgtggtcccagcaccttgggaggctaagatgggaggatcgcttgggccctgggaggttgaggctgcaatgagcagtgatcatgccactgcactccagcctggg

SEQ ID NO: 77440 - DNA, 1108 bp, Homo sapiens
gaatgtgagaccctcacctgttcctacactcataagctcaacccaggcagctgaaccaattcatttgccctgtactaaagtatagtgaagaagaacataatattgtttgcaaagcttctgaagatgctgaattgatatgacttgcttcttctgcaggctctcacatcctactgagaaaagccatcctgaaaacagttgagagcacctttcattgcatggcccacagtatgcataaagcctggtgctccaggaggcaggggtggcatggtggtgtttgtttatcactcattgtggcacagggtacacgatcttgctttgctttcccctttctgtcctagcttgagtttaagtgtggtatgatgtgtgcatatagggtgatcagccatcccaatctcttgaggactgagcgttttcccagaacatgggacttgcagtgctaaaatcaggaacatcctggacaaaccaggacaagttggtcaccctgtgtgagtaactaacgagagattcctgagcaatagatttaaccagggtttgcactttttaaaaaacttaatgcacgaatcccatggcccctgtaatcaggactgaagggaaattcaaggagaattggctaaacaaggcagcaaggttctggctttctctcatttgctggctgttcttggacaagaagcgtaatagtcgataacttcacaaattgtagttactattgttacaagatatgtgtcttatggactagggtcagcattgatcagccttctctatattcttggttcagctctagagaatgttggaaatggaatctaagagagccctgggttagatgccacaacatccttgggttctagccaggtgatctgggaagcccatccgatgctttccagtagcagcccagcatgcctatctctgggcactgctcccactgcacgatgatgatggtcattctgggtctctccctctggggcgggggtgggagctcatcaaggaaaggcactagcatgattcatctccatgctccccagaagttagcatagggcctggcatcacattatagatattgcataatgtggatgggtggatggtggatggatgggtaggtggatggttggat

SEQ ID NO: 77441 - DNA, 1009 bp, Homo sapiens
acaagcttcgttagactctttccttagaactggggctgcctactgatttatcatggtgtccgtatgccttttttcatgaaatcatgatcagtggtttcagtgagtctgaaactcttccgtctcatttctgtttcctagcaggcttgccggtagctacttcaggttgccagccccagtctgggtattgacaaaaagtaccaactgacatctgcaaacagatctcctgtctctgtgctaagcttttgttgatgttcctcagcacggagtgtggaaagcatttccatttcaaatgatttggagttttaaattctccagtcctagtttgtaaaacccacacatggatgcttaagaaagtggtcattacatctgtttcacttttcttaaatcagcacatcttactggctctctaaaaacagccacagtggtggtctgccttgagctgccagtataacttcatgttatataacagctgctccattggcctgaattcttttttgttcatcttttgcttaagtttaaattcgaagagatttttaaaatattagttcatatgggaataaagagtaataaaatcccgctaacctaactgatgatattgcagaaggctaacctaaattagaatttgtgtgaaatatagaatgtttttcattttatttcaagtacacattaactaggactattctagtgaattgcagtcctaacaaaaatctttaagggaaagattttaagtaagtgaaaatgatttgtattacttcttaaatgtaaatggataatttaaaactactttgatgagaagtactttctctactatttgttttaaatattctccccacaattctgtttatactaatgttttgcattttttgtttaaaaagaaaacacaattcaggaagggatggggttgcagatatagcacaagaaagttaactcttaattatgactgccagaattcagacatatttgttctctagtggatccaaagaggtgatttttgaagacatccaggttg

SEQ ID NO: 77442 - DNA, 1006 bp, Homo sapiens
gcacctcactgcgctttgagggatgattcatccacctagccttgcacctgcccctgtcccaccacttggtctgggctgtcctgtgtgaagggatgctggatcttaggtacaggaatgtggaagagtcagggccagacacttccaggaagcttcccttgactggtcaggaaatgccccttctccatttgcacattttaatttgtagatatgtacatgtgcagtgcagcagctcacaagacacctaggggtcttgggcgcagtgatttttggatgtgcttagagttctgatggatgggattctagctaagaaaaaatcttgtatacttaagttttcagtgatatttgcagaaaatttaacaaacttttcctgaactgttactattcttttatcatgttgttgttaaatataacacaaatgcaaaacaaaaatcccagaaacacatggttaatttaatgaattttaattagtataaggcaaaatatcctgtagtcattaccctgctgaggagctagaaccttgccagccccctggggagccctccgtgtgcccctcccaatcacaaactcccttctctcccttacgaggaaatactatcctggcttttgtaatacttcattttttctttatggttttgttgtaatttattttacaaattactccaaattctttcctctgccctaaaatatcaaaggtcctgggaaagttgtgcatattaattacttttcaatatggattacttgctaattttccatatacacatggtacattggcaatacccagcacatagcttttgacatagtagactttgagtgaggggcaaatttaatgccacatattaacccatgtaaattcttcagactctacccctcattactcctgcaactttgggagagttgcttgaccctatggggcttccttttccattcttgggtcagttgggtcctttctgaggttctctctagctgtgtcactgctgttctaagttagccatggtctccagccaca

SEQ ID NO: 77443 - DNA, 1137 bp, Homo sapiens
tactagggaggtaattgctaaatccctttctgatgccagaaaagcttctcattcctggagccccctcagagatggctgatttatgaaaagctggaaaaagagactggaaaggcataagctcttgctaccaaaaggaaacgttttcgcaagtgacattttgactcgcacttaaatgattaggatgccatttagagtctaattattgttctaccaaatattcatggtattaaatgaatgttatctgggattagagaggtggcagtcatgtgattacagcgaatggacctatctttcctggtagaaataataccactgccaaatccatcttcttttcttgtgagggaggtgatttggagatgtcacctgctgttttgtgtgggtgactcagggatctgcagcctggactggccccacttcccttcctaggcccacactgccatccctctgctggactccacaagtggaaaaggggccagaatctagctcatgccactcaaagactcctattcacactgcctttgccatccactggcatgcccaccctcattcccaggggttctcattctccccttcatctgcccttcagaaccctgaagatctactcttgctttgtttcataaaagccaacccattgatagccttcattgtgggccactcttttgagcatttcacatgtatttctgcatttaacccccattacaaccccatggctgggagtgaggagcttggattaagcctaggcagcctggccccagaaccagtgcctttaccatgtgactgctctttttgtcctcacgccctgcgagctgggcttgagtgattaaagcactctcttatatgccccccatgcacagaacacctgccatcttctgaaaagtccgttttcatcaatgcatctttttcactggaaccattattaaaatgtgaatgcagctgggtatggtggcccaagcctgtaatcccagcactttgggaggccgaggcgggcggattgcctgaggtcaggagtccaagaccagcctgaccaacatggtgaaaccccatctctactaaaaatacaaaaaattagctgggcctggtggcgggcacctgtaatcccagctactccggaggctgaggcaggcgaatcgcttgatc

SEQ ID NO: 77444 - DNA, 2940 bp, Homo sapiens
caaccagcattaacacttacacgtcagggcacagcatgtcttcctgcttcttggctcctctccttggctgacctgggcccacgggcaccacagagggtgggggcgcctctgctgccactgccagcacatgttcctctctctcctgtccttggcacccttgtgcagtgggtgtgttgtgcagcgttgtgcagacccagccttttaataactgtgctcacaggggtaagtgggagcagagcctctctttctcaaggaagctggcctttctcttatgcttattcaagatggaaggctgctctcccatctcaagaccggccgcctctgtgtgcaccacatcatcgtgcctttctttccttatggacttttcagccagatgctggccaaagagcattgtacaaaggagacacagaccaaaggtttatcacatcctcattctgacaggtttaaatagaagcacaatgtttaccatatctccagtgctgtgagtttttgtgtttttaaagactaattgtgagccctgctgaaaggtttgtgtaggaaggaacacttctttttttcctcttcattttaaacagcagcactagttggcatgacaacctgcgctattaaaagtaaagcagcaagcaccgcttcctctgtttttcagaatgaacccaagctgctaaggaggtttgtctcttgaatttgactattaatggctccatttcgacaggatattatggggtccttttagaaggttgtgtgtgtcccccctccataggcaaggcagctttaaagacaggaatggtatttttatctttcctgttgaactcatattcatgtgtttgtggtaaatctcaacaacaccatagttctgtgggtagaactgtctgactagtgattgtaccaaaaggacatttacacctccctaacctaaatgcttatttaatcagggagcacagtgaaaagcattgcacatctaacaacgtctgcttgccaggcccaccatttgtttaaagttcagcattgcgtgcagtcctgcttgtactgtagaaacccagccttgagctacgtgccaaggtttctagaaggtatcagtgggcatgacacaaatggatccgtagacttctgagaaatcaaggcagggtgtttggctaatgctaggtggttcataacaacttgctgaatgcaccagtgcttcaaagccagtgtgcaccctcatcctgccccctttcctttggttttagaggtccctagatgtgcaaggagtgtatcttccccaggcaggcccaaaggttaaaggtcattgagtggaaaatgggcagcagagtaagggatgggcctggcttggggcagagcacctggacagttcccagctctggtccagctttgtgagtcggctcaataggaaccatctttaccattttttcatgacaccctgccccaaagaatgtcagcctctgacatggcccctgggatctccattctcaccattatggaaatgttcttttgaattaagcattgctttcttaacgtggtcctcaatgaaaatgccaacacgtttgggaggaatggaaggggtttaaactcttagggtagcatagttcagagaaacaaggaatctaggtatatacctcatggttttgttttagttctttgtttaaaatttttttttaatatgccatgttaacctttttaaagtgtaaaattccgttgcatttaattacattcacgatgttgtgcaaccatcatcactatctatttccacatttttccatcatcccaaacagaaattctgtacccatcaagcaataacttttcattctctccttcccgataccctagtaaactctaatctaatttttgtctttatgaatttgcttattttgggtacctcatataaaaggaatcaggcaatacttgctcttttatgtctggcttgcttcacttagcctaatgttttcaagattcagccatgttataacaatatatctgatggcattaatcagaacttcattccttttcatgactgaataatattccattgtatgtatatgttacattttgtttatcccttcatctgtcaatggacacctgggttgtgtccaccttttggctattgtgaataatgctgcagtgaatactgtccttggactttccttccttctcctgtccccagccaacatcaacacttgcacataaagacacagcatgttttccgagttccttttttcagttcttttgggtttgcacctaggagtggaattgcttggtcatatgataattctatgtttaactttttgaggaactgccagactgtttttcacagtgactgtaccatttttacattcctaccagcaatacacaggtttctaatttctccacttcttcaccagcacttgttatttttaaattattattaatatagacattctggtaggtgtgatgtgatatctcattgtgggattgattttcttttccctgataactaatgatgttgagcatctttttatgtgcttattggccatttgtatatcttctttggtgaaactactattcaagtcttttgccaattttaaagtctaaataataaactctggtcagctatatttttagagataccacacctgcttttttttttttttgtagagacgagactgtagaaatcagcttgggctggtctcagactcttggcctcaagtgatcctcccgtcttggcttcctaaagtgctaggattacaggcatgagctaccatgcccagcttcactttcttgaaatgtcttttgatgtgcaaaagttttaaatcttgattaagtccagtgtatctattttttattttgttgcttatgcctttggtgtcataactaagaatccattgccaaatccaaggtcatgaaggtttaattctttgttttcctctaaggattttacaattttgctcttatatttgagctgtttgt

SEQ ID NO: 77445 - DNA, 1131 bp, Homo sapiens
catgttttttcaggccaaccgggacgctgtgctgagcaggatacctgaacacaagagtgaccgcctcatcagtctgcagagtgcatctgtggtctatgacttactcaccattgctcttggaagaagaggccagtatgagatgctgtcagaggtacagctgctgagtctggttgacatccaggtggtgggtggcagttgcacggtgaccccagggaagcgctgtgagacctggtcctgggcccccctctattagtggcagccatgtgatcttgggccagtcacttaactttggttttctcccctgtagaatgggccttgggctaaatgattaggtggtggaattgatctagtcttttaccatgagagttccataacccaccaggctgtgagtttgtgtgtgagggaaggcaaacatttctcaagcagtttctctttccaccaactgaaaatctcccatctgtgatattaatttcctcatagaacaggtttcctttaaagtatcaatgtgtacagtgaaatcgccagtggcctgacaatttcaggcacagtgtgttatgttagctggtatagaccgtttcatataaaggagacagtcttctttcagagtcttttgcttgttcagaagggaccctcgtggatttcagatcttgtgcaaggtactgtcatcttctcactccctcagtttctaagaaacgcttaggatggaggcttgcctctttcacagtttcaggagaagctggttcatcctgggctatggttatgcattattaggttcctgcccaaaatatcaaattctaccatggtaaggctaaataaataacaagaagatcactttatcttttctttagcaaaatagagaaaaaaaaatccctattttttaaaaggaacttttccatgttatttatctttctctttctaaatttatacccattgcaacagcctctgggcacgaggacagggaatgaaatacagtaacagattggctgaaatcagataagtgcccgactcaccctctagcctgccagtgcatcgccacattaggcaggaaccttggggaaacagatgagcctgtgtggcttgaatctttttttagtccatggtttggtgactctacagggcagtggttactca

SEQ ID NO: 77446 - DNA, 1063 bp, Homo sapiens
tggcactaggtggcattcaagtgaacgagtctccacaggcttccccaccgggtcatccatggagccagctcatcttggcctcctggtcagcattccctcatcccaagttgggtccttggcaggtagttccctttgggcaaacttggttggttatggtgtaaaagttctgaaagcatgatgactgtacattttagattacctggacaattctgattgaaaacattatgttccactgtcagatgatgtgttccagtctgcaatttggaaaacatggccacctctctaaaatgcttgcactaagtggagatgtctttggaatgatatctccaactctcctgcttcttaattgaagtgatagaaactaataatactcaaacattgagatccctttgagacagtcagatttggctctatggtatgtaattgccagaaaaatctcttcaggggatgttgaaatccagtgatgtcatcagtggatatgaaggatgaggtttctaaccaaaatgattatgttcttcctgtaaatcatttcagaaaatgtaggtagaaatctaaatgaaattgcctttggaagccttttttccatatcctttgacttctcgattgtttagtttttagacagaaaatgaatgtgctcaatttcaaaaccaaaatgaaaattgctgtgttttttggatgtcagaaaattgtgttctttgttggtactgactttaattcagaagcatgaatttgtccgtcgcttctccacctacaaggtatcatttagaattgtgctgttttctaactacaaatcaaattagtttcccctaggagaatgggattataagaacttgatttgcagaactaccactgaggcaatattctgggatatttattatttgtgggtctgtttgaggttctatattgtacctttttaatcaaaagatactgatactttctctaaaaatgaaaagaatgcatttagtataacttgaaagtctctcataaatagtatgtttgttttgttctcttccaggcattggtctcagtatggaacatatatagcaaataaataaaatgagac

SEQ ID NO: 77447 - DNA, 2444 bp, Homo sapiens
cttttcataaaattttagcctcagaagaatgatagaaaccatcctgcaggtggcttccttacctccagcggtatcagcattgtaacgagaataccaggcgctgcattcctcctgtcttgctctttatcatcctaagatgcagtacaaaaattgccagcacttcaaagaaaacaaatgtttgtaattatgtggaaatccttttttttttttgccttttattgggggtgtggggaaatcccttcaattacatgattgtaatattatccctgggaagacataaacttagttgtttttagtcatcttcaagatatctaggagttttttttaaaccaagttcatttttatttattgcactctcttcgtccatttcatgaaaaaatattgagtttgacccaattggtgataacattcacaattctgctcaaaggattctagagctttagaacaggagaaaaaatgctgcaattgctcacaacacagaaaataggctatagagaatacagattggggttctgctgactttttattattctctaatcctgagcaacattgagcttaaaaagctctttcttttaatccaagatttaggagttcagccaaattccataaaatagattaataagagctcttgcatgctaccccataataaaacttatgtgtctaaataagatagttcactaaattcttacagtattagagaaattattcaaactctaaaattgcttctaatctcttatttcatctaaacgacagtataagatatgccagttagcaggtaagaggtaagaagagtactgtttagtgaaatgcctgcaatttatacctctctaataggtttaggagaaagcttgtattatttagataatgtcaatttattgaaatctaaaattctgcctctgtaatatgtacatatgttatttgggcttttaacttggtttttacagctttactttacccttctgcctaccactaaaatgcatagctaaaatgtatgaattccatagattaccatagaaataggcaaattaattcaagtgtccaaattatacagtatttttcatgggtattatataaaattctggaagcttttagtgttcagttctgcttgtatttgtatattttgaaactgccatatatcaaagtcagttttctttcaactgcagcattttttgtcctcaagaaaatacggaagaagccctgttgttattgctgattagtgaatcaatggtaagtggaatgtgtttttacatcgttctttcccctggccctgtagacccttttttgatatagccattctgccagtatcatgactctttttcttaagagaaaatactttctagagggtatacctggatgggaaaaaacagtagaggtttaaaaagagggttgtttcttaattcctggaccagctagcaatgtcccttggttagcctggagcttggagcttctctatcttctatcttgaagcacgtatcttagttcattcattcatccacccagtattggctgaacattattgcagttgtatctaggtaaaccacagctaaaatgaccactggaggaaccttaaaaggagaaagaggcccccaaagggtgacctttataagcctctcaatttgccctggagtgggcgagaattttgggataagtcatttgttggatctataaagctctggtcttcacagcaggagcttgatgaaactctcatcctcctgcccttgttgtctcttccagctcctggctttgccagacactgtaaagtcccaggccgtgagagctcacttgtcactgctattgtgagggagtttttgccagaccctctgattcctttgaaacattttcttagtatttggccagaatatagaattttaggtctatttcaccactcatcatttattgggtttctgccctgtgtatctatcactaggcgctgtggccctggcttaaaaccttcaggatcatgtgtgtagtaatagtgaattcctcagcagaaaagtgatgtatactgagcacctgagcagaatgggtgggctcctggaatcaaaagatcttgagggctcgcgtccccttccctcgttttatacatgaggaacctgaggcctagagcaggcggaatgcgtgcatcacgcagtggtctcctgttcctgctaggagattgtactgccccctccccatagttgtcaccgcttaccgccaacccccggggcagcccaggggagagaagggaatcataactaaagcaagagaaggcatttccctttttgccctccccacacatactgtttaatgggaggtataaaatggactcaggtgagtatagacatggggtctgagcataataacgtacatgcgcggagagaaggagggttcagaagaggccagaactcatgagagggcagctttcttgcctttgattaaaactttgaatggtccactgatgttta

SEQ ID NO: 77448 - DNA, 1005 bp, Homo sapiens
ctttttattattgctgggttctatttgctgatattttgttaaagatttttacatctatatttataaaggatactattctgcagttttcttatgatgtctttgtctggttttggtattagagtaatattggcctcataaaatgagttggagactattccctcctcttctttttgaaagagtttgtggagaattggtattaatcctttaaatctttggtagacttcaccagtgaagccacctggacctaggctttctttgtaggaagttttttttgtttttttttaaatgctaattcaatctctttacttattttaggtctatttgtattttctatttcttcttgaatcagtttgaatagtttgcatctttctagaaatgtgtctgcttcatgtaaattacctaagttgcttccgtacagttgttcatagcattcctttataatttttttgtatttctacagggttggttgtcatgttctctcatttctcattttagtaatttaagtcgtttttctcttttttagagtcagtctaactaaaagttttgtcaattttgttgatctttttgaggaaccaactttgggttttgacttttttctgttgtgattctgttctctgtttcatcgatttccacatgaatcctatgccttcatttatcaccatcagtttttagctttgtaattttgtgggttcagagctctacttcttagaatattagtaaagaggaacagctgtgggagttattcttgtttggaggttcccttcttaccaaggctggactctgacccattcacattggcagaaagcacattctcaccattcagttatgctggtttggaggtgggaaagggaatccgtagataatgtgcaaacctcattttggctaacagtctccttctccacagtctcttatgagaagtataataagtgtcaagcaaaatttagatggcagagatccctctagctccagaaaaccacaaggaccattcagaagagttggttgtaa

SEQ ID NO: 77449 - DNA, 1293 bp, Homo sapiens
ttcagggatagcgttatctaagctgagtacaagcattttgccaggcttgaggttaagcacacatcattagtgatgctaatatctgcagctcacctgttatttataagagctcttgggaaagggcttagccaaaagtttcagttgtttcaggtataaaacatgtttagtattccagagtgtgacaggtggggtggcatttgaagtacatgaaccttttaagtgttcaaacatcttagtgaatcatattttcttttctttcttgtcataaactggtatgattaccatcgtaaaggaaaaatttttaattatgagccttgcagtagtgcttagcacaatgtgatgatataaatatttattgactgactgaatgaatgactaatacaagatagattcatggctatgcttttcctcgtttatgttcccagacaatagccaggcagctggcagagatcttgttgcggggtatgtgtgagcagagctactggaaccctctggaggatccaccgtgccagtcacctctggacgatcctctccgcaaaggagcaaacacaaaaacctacactctcactcggagagcccgtgtctactcaggagagaagtatgaaagttgatgtcctcacttgtaggttatgggttgggaggaaaacttgggaaaattcaaggatgatgagaagtacaagagtagattttttccttaaaagaaaatcaaatgaacaagtgtcattttccagtttagtagagattcctcattacttttcgtaacttcagcaaatatctgtgcactagcagggacattttaagtaggagaatgctctcatctcagtgcttgggtgccatttgcagccatcactattggcttttggaattttctttccatttattataagacctcagcatcagacagcaatcagaaataaagctatctgtaagccatctaacatctaacatcgatctcacccatctaacatttcttttcttcagcaattccttgatccttttgtttaaaatcttgttctaaatggaactagatataagaaggagaatctaatatttgcaagtgattggaaggtgatgtgtctttagaacttctttatcttttttaagttttaaatttgagacttgatcaccttggaggataatgggccagagaatcactatagacttagcatgagccttccccaggccaggggaagccagacagaggagggagagacaaggagaagggctgggaggctggaatggttgttgactcattctcaatgcctcccattcaagtcttgaattcccatattt

SEQ ID NO: 77450 - DNA, 1040 bp, Homo sapiens
tctttttttaatcctttcactttcctatctagggacgttcattaggtagacctctataacttgccctacacagccatagccagtgggtgcttgagtggaggactggtgcttattaaaactaagcaaatgccacatgtcacagttgatgtaacaacctcatgtaagattgcaatttatcttttattgcccatacttttgtcctttctttatcatgaatcctttaaatgctgtaggagattattcagttgggcatggctaagagattcatgtcataggaaatgacttcattgtggtgtctgcagagttttaagaggtggacgtacaactcatggggccagatggccaagctgggctttcctagaattatgggggtgagacaggatggacaacttcacacacacacacacacaccctgccatcaccaccaccaagagctcagttggccttcaaaatttacttaaatatcaatgtgatttataggtgccttaagaagttcaaacaaaatatttccatttttaggattcttcaaggcaaaagaacctacaagaatatggataaaagttgttgccagctgtcttttctctcaaatttacctcttctcagtattcataaaacttcccaactggtcaatatgaacagcttcttccaagatttggaagcacaatgaaagtaactgactgaattggcaagtgttttcgtaattgttttaaaagcgcatttaaaaagtcagtttttcaaaattgcttaagtatggagcatttgttcatattgttgactctcactggtatcttgatttacattggacgttagaaagtttctccatctaatgacattcataagcagtgtttccatcagccttaaaaactatgattttttaagattagctgataattgcaaatttataatattcttatgagatggaaaagttgctttgtaaactctatctggtgtgagatcatagcagagaaggatttgaaagtatattttcaacagttccactcttaggtatatactccaaataattaaaaacaggtgttctg

SEQ ID NO: 77451 - DNA, 1037 bp, Homo sapiens
atgaccagttcctatttgtaggcttccctgggttacaatatttaggtttgatcctgcttattccaggcctgatttctacctggtaaatcagccccttcaaccagggtctccacttatgttgcctcagtcacagcttatttcatacaattcaaagtaccatcccttctgtacccagtaggagtttaatccgtgattctggaacaaagttagactaccatatccattcccatcctttgtttagctgtagctatttccttcccgccgtgttacttaagagaactgagcttcagtccaaagcaaatgtactttgttgcctgtgaacatggatcccataaaaacaaatgaaggagaaagcagagtagattgcatgtcccagggcctgttacctaatctttattcacgtctctgttaggtttcctttagtgctgcttggcatcctgagcacagcttctctttttatgccaccatcaagcttctgatctgatatcatctgatatgtgtgggtgagaggactatgggagtatttatgtacctatgccaataaatcattatcttaaagttctggggccattcttgtgcatgagagccctgggatgtcatgtaggtataagatgcgaattaatagccctcatgagtgcttgtaacttacagaacccacattcagtttgatttaatatctttgcatgattcaaaatgtcgtccaagaagagagccaaatacctagagcatctgccacggcctgcagaggctggctgacacgtttgcactggctgacccacactgtggctttttggaaagatgagatatgttctaatgagcaggttataaatatcgccgagttatgtcataggtggtggccgtgcttaatgtaaagggaccagctggggagcgttcccagctcagcaggctggatgcagctttcagagaggacaagtggggcttgaaaatattgaccaggatgttacaaaataattatttgtctcttaatgaaacatgtcaccaaatgtgtccctgtggggtgtgagtggcagcgagat

SEQ ID NO: 77452 - DNA, 1010 bp, Homo sapiens
ctgagtgaatgctggcaggaacatttgttttgagaatagtttaccataatgaattctgacatcattgcactctctcaggcaagggtgttgaaatggaataaatgacctaatgtcagggatttgtggaaaccctcaaaacagggagattgggagattccttggctctcttatcttcattttgagtggagttttaagcaacagttccttcttagatgtttaattgatctcaacattttaagaattaactaacagtttgaagatatgaaagcaatcgtgtgggttttgtttgcctctctcaaattgggttatctcatagcatttggaatagaattcttgcaagttaacttcctcttttttttgttctgattatccgtgtacttgaacatttttccttttctgctctcatggcaacagtggaagcgattagttgaataaaattatgattatgtgatttaaacatgtttggaagacaggatttcctgggaatcatgcttttacatttgggcactttaagatgtgcctgtttcacctcttcttgctgtccgattgatctgtggtggggcgggcacccttctgggtgccgcattcattgcaatgggttgtagcttcaggccttctcagctctgtggttactgtggcttctttgtttacaagcagatgcttcccagattgaggaagaatttgcttctgaatcttaaactctctccaggaataaactggaaacagtttgagaaaaacttgtatttgcttcaaaggcttaattgggaatacgcacccagtggctggtgttgcctcatcctgcctggcctccttcggggcggagacttcctccgttcctccaccagagggcctcggtcctgcatgggagaaaccgtcttgcaccttaacgggggaattgaatttctctacccgtcattgatctctttcggcagcccagggcattacccgcattcactggacttcttcacctgggccaacggattttctttccagttttggaccagtaatga

SEQ ID NO: 77453 - DNA, 1081 bp, Homo sapiens
gtttccccaagaaaaatatcagaggcttttatttaccaatttaatggcaaagagcctcccttccctgttgagtttctatgttatggttttgaactggaggcctgtaggcttgcgacgcctgtcgtcccacagtctgtcttcacccacctctgctacctgcttggcttctgcagccatttggactgctgacccctgcacatgtaatggtctttttttttccctttctttcaaatgatccccttggatttttttctcactgttctagctttgaaatgtggtcgccagagttgtgttggaaatgcagttctcctgtcaattgaatggaagtgaacgttgcactcttatcctcacactcgaacttccagctcaagtgcttgtggtgcgtttggagggactttcctccccttgacatcctttctgcctttttttcctctccatagcccagtcgaggggatggacagggtggccagaagttcttttcctatgtgactttgccactcagaattgatgaatgaagtcattttgttagcaggacatttttaccttccagattgtcttttttctgcacttttctggactattaaaaacgaatattgttggcctgtgcccatcagtgttctgtgcagctaattgagccccgtcttatgaagcaggctgacggggaccccgccctcatgcttgtcttccagctctggccaggtctggagcagacacttccccagtggaagtggcgagctttcctctccagctttgtgttatgggctcataaagctttagtggttcacttttgagttcaaattttttagtgtgatctggcccttcttgatgaactcagaacagtctccacacgctcactgtgctaagtgtgatggagcagtcaggattcacacctgccagacacgcggtcatctgtccgtgccccaccccaaagccgtggctggagactgttcccctgcccccgtcaggggcaccagcactcttaggagatgtcacatcatttcccaggagggtgaccacaaggccccagagaaagttttttactgttcttacctgacatgggttgtcttttgtcattgtgagc

SEQ ID NO: 77454 - DNA, 1035 bp, Homo sapiens
atgtgcttagcaaagctttttcttttctgtagatagagccaaggtaaacctgagcttcgcgtcggagtgagtgagtgtgaactctgactgggaaagccaaataaatgaggtgctgtgcgatgaaagaactgacttcagagggttgacttctggtcagagcgtcttctgtgttgtcgccatcttatcaatgttagtctttttccccgacaccatctttcttctgagtcctgtttctgctgtgaagctcagacgcctcagcataaattctctgctacccctttgtcacccactcccagtgggatcccatcccgttctttgcagccagatgtgtctaggttcagagacttcagctggcctgtgccgctgggagccttcccaggctgctctcctgtccctgggatgcctttgttttgcgtcataggaggtagtcacattttccagtttgactgcaggcttctgcacgacagggatcatcttcaccttcccttagcactggcatcagatagggcctgagttcaaatcccagctcttctgctgtgggctgtgtgatcatgggcatgttccctgttatttctaagcctgtgtttcctcatgtataaagctacaattgagaagaagagtttggtgtagtacatcgtagaaaccggttcagattctgcactgttttctattaaaccaaaggttcacaatcacaccagtggctgcttttggcttttagccagtaaatgtttgtatgtggaatgaagggccggatggtgggacgtagcagctggttggggaaaggcggaggattcacgtgtttttgagcatggagtcagaagctttccaggtgccatctcattgcatatggcaagtaggtgttagtcctattttgcagatgaggaagagacaaggtgaagcccgttggccagtccttccccatctcagtgcatgcctggcatctggtacttgttccccttgccatgttcccagatggctcacattccatgctcacttccagtccttcttctcatgagcctcctcaacctttgccct

SEQ ID NO: 77455 - DNA, 1119 bp, Homo sapiens
aagaatacaaaagttatctgggcatggtggtgggcacctgtaatcccagctacttggggggctgaggcatgagaattgcttgaaccagcgaggcagaggttgcagtgagctgatattgcaccagtgcactccagcctgggcaacagagcgagactccatcgggagaaaaaataattctgttttctctatggattataatatatatctttaaactatcacagtcaacttcaagttagtattgacttaatttcagtactagcaactttgctccaatatagcttcatttcccccgtcttctttgtgttataaaaacaatgtaatatattaattttccctttacacaatgttattttttaaagatattaaaagaagaaaagataaaacaatatttatacagtcttttatatttacccacatatttacatctctggtgcttttattagtttattcctatatattcctatgaccctctgatatcatttgcttgtcatctgaaggcttccctaaaattttgtattgggcaggtctactaacaatgaattctctcactttttgcttaggtgggaatgtttttattttttcctcatttttgaaggatagttttactggatatagaattcttgattgacaaggtgttgttgtttttgttttttcttcagaagtttgaatacctacctcagagatattgtaggtttggtttcagaccatacaataatgtcaataaaacaagtcacatgaattttttggtttcccagcacatataaaagttatatttacactatactgtattctgttaagtatgcaataacattatgtccagaaaagagtacataccttagttaaaaaatactttattgctaaaaaatgctcagtcgtctgagcgttcagcaagtcatatctttttgctggtagagggttttgctttgatgttaatacctgctgactgatggggtggtggttgctgaagtttggggtggctgtggcaatttcttaaaataagacaacaatgaagtgtaccacattgatggactcttcctttcataaaagatttctctgtagcatgcaatgctgtttcatagcattttacccacagtagaactttttcaaaattggaatcaa

SEQ ID NO: 77456 - DNA, 1007 bp, Homo sapiens
gacctgcccaccaataaagaaatctgtaatatgattgtatgttctcatagcaaattcctgcattaaattacagggtttagaaaagtcacggattatttcttttctttttttttttttttgagatggagtccctctctgttgcccaggctggggtgcaggggtgcgatctcagctcactgcaagctccgcctcccgggttcacgccattctcctgcctcagcctcctgagtagctggaactacaggcgcccgccaccatgcccggctaattttttgtatttttagtagagacagggtttcaccatgttagccaggatggtctcgatcacctgacctcgtgatctgcctgcctcggcctcccaaagtgctgggattacaggcgtgagtcaccacgcctggctggattatttcttaattgacatttgttttttccaccttcctctgtattttgggtttgaatttttactttttatttgtgaatgccttctggtgatggttctccaggtctggtgtggacacgctgtatctttttttctgctagctcttcctccttctgcctccccctggcataatttgcgtcttctgtctctctgttctggctgactgatggttgtggtagctggttctcctctgaatctccctggcaaattagcaacagaagcagtgatccctgcatcctggaaataagcagttaaaataccaggaagaatctaaagctatattttttctgaagaatacccagaaaaactcattagccaggcttagtaaaacctgaattacagatctttttaaaagatgcaattatactgctttcaagtacattttgagctagtaaattaaacacacatacacacacacaaaaacaaacaaaaaactgttgcctactcaattccatgaatgtttattgagagcctgctgggtaagctctggggatataagatgaacagaagcattctctgagctatgggaaagacaaggatgtcaatggacaaagattccttgcttggc

SEQ ID NO: 77457 - DNA, 1002 bp, Homo sapiens
gtgatggttgtccaaagaaaagtccctgagtcaccaggacaaagggtaggtgatactaggtggtgaagacattagatgtgtatcttagagataacaaagggtatagagaccaagagaagtggatgcatttgagatgtctgttagaactactagagttaggactgctggtggattggatttgggggacagagggtaagggaaatggaggaaccagagatgactccccagtttcagccttgaaccattggttagatgcgtggagacaaggagaggatcagatctggaaaaggagaaatcaagaatttgcctttggcatgttaggtttaagatgcctgtgagatgtctaagtggaagtgtcaacatgaccagaagacgggtttgacttgagttataaatggggaatttcagcatattgattatatttaaggccacaggattgaatgagatcagtgaaggggcagagagtaaagagagaagacagcccaggacttggcctgaagacctgcaagagttggaagttgagtaaaggaggaggatcctgtgaaggaactgccagaggtggaagggaaatcgtgagggtgtgtccttgtgaaagccaaaacgggaacctgtgctaggaaagaggaagtggtcacctgtgctgaatgctgcttagatgttaataaagaagaccaaattgtgacccctggatcagataccatggaagacatctgtgaccctgaacaaacttggtggagtggtaagagcagaagctggacaggggaagttgaggagcagatgatacaggatgaattgcagctctgtatacaggccacttcctagaaatgttcttccccttccattttcttttctaaggtggagttcatgctggaaggaccgatggcagaatgatggtggaagattaaacagcaggctaaggaatagggaattcattctctaggtgtggagaagccattggatctggaaggtggggttttgggaagggtcaagaacagggtagtt

SEQ ID NO: 77458 - DNA, 1049 bp, Homo sapiens
ccgcttccgtgtccccagccttcctgtcagtatcctggcattcagcagggcctctccgcctctagtgcttcttacagcaccacctgctcatcagcacccccgactcctcagctttcggtaccaggagggccctgtgtgcccctgggttgcttgttgcttcctgtctagtagaaccattctctctgcttttctaatgcttgcacttctacacctgtgcctctgcactgatatttgcctgaggaagttggttttttaggtcgagcagtacatttagagatagggtttgaaggaagtaggcttggatgtgcatctgattagttttccaattttctccccttctaggtaatactttctaatattcaaaacagaagccctaagcctggccctgctccccacgatcaagaactaggttttttcctagaaacaggacttcagagagcccatgtcctctatttcaaaaatgggtaagccatcttcatttttttaaatccacttcctaaagaaggaaagtagaaagccttacaatgctgtctccagtttagttattataataaaggaattttaaatatgaactaccattggaactttttttttcttttaaagaatgaacattggctgtttttgtctcttctctacctggctctcttgctttcccatgagatgtgaaggtgggagaagggagggagggaacccaagtcaaaagtacacagcctcaagaccagtggggtgggcctgatgggagccatgccttcccatgccctccctccatgaatggctctgcatcggcctccccatttgttaaggaaaaagttaatgaattggaaatcctggcacacaggagcatcgccctttcagtggctgatcattcagggaattggatttgccaaatctcagccagtttttatgaaagtgagtgtggctttgaaaaggcttttaagaaaggttgaaggacatgaacgggagggacagctctcgagtgcatttgatgtttgttttcctttttgtgttgctcttgtgagaaatgtgctgattctgttccaaatctcttc

SEQ ID NO: 77459 - DNA, 2675 bp, Homo sapiens
aaagaacataatcatagttcctacttcatgaagcttttgtgaggattacataaggtcttgtgaataaaggcacttagcccagattcgtgaacatattggattcttggtaaatgtcacttatttttattaataacaatagctcctagcagttgctgttgctggcagtgtttcctggagttctcaccaaggacactgctattgaccccttcagacccagagatgtaccctacaagagtgtttgaaatgattagaaatcctatgagactttgaaaatgattggaggtcttgttttccagcaattttctgggctccttgtttttgtaaagattagaatagagagagactgccaaagtctccctagcttttgttactttataaatgaacagacaggaagtaactttttttcataaatcatattgtcatgtgttggtgcatatgatatgcatcagaattgcctttttaggaggcagggagattagagtgagaatcacagcaggagaggtggagagagtgatgggaataacatttgacctggcctcaaccagaatggattataagccatggtttaagatatctgggaattcaggaagatacatgtctgtcttgccagaattatgttctatcagaaggttgctatgagaagagaatttgttgttgttattcagaatttacgatatgatctttaaaggaatgatcatccaggctcctttaaaaacctccattatttccactgtctgcctccttgatggaccgtgcttggcagtcgagaagtctgcttatcccatctgagttgttccagctgactacacagccctggccacttagggccctatcttgctgcttactctccactgttgtccagccctgtcactttggagccgtcttctcccggctgggagaaaggaggctcatgtgttacatgtgtctgtagtgatgtaggaattggtagatctgaatacacttctgttatgttcactcacaacaccccattcagtgctgggttcttcagcaggaacatcaaggaggcttgtatagtcgtaggatttaaaagaaatccttttctttgattttggggaaatggtgatcataagatgttggattttgagaagaaacttgaggtctagaaagggagagcccaggcacacagaaagttaggccaaaactagttttagaactccactcacacgacacctagcttagtgctggctcactttattctcccaggctgctgcaaacaaagaaaaagcatgacatttctccacactcttacttagagaaagtgctcaataaggctgggtgtgatggctcatgcctgtaatcccagcactttgagaggccgagacaggaggatcacctgaggccagaagtttaagatcagcctggtcaacagagtgagaccttgtctctacaaatgaagaaagaaaggaagagagaaagagagagagagagaaagagaaagagaaaggagggagggaggaagggagggaaggagagagagagaaacaaaagaaaaaaaagaaagaaaggaagaaagaaagaagcgaacgaaacgaaatgaaacgaaactagctaggcatggtggcaagtgcctgtagtcccagctacttgggaggcttaggtgggaggattgcttgagcccagaagttcgaggttgcagtgagctatgattgtaccactgcacttaaaaaaaaaagtcaataaatatgttttatttgaccaagtaagctttagcttttggtagcatttgggaagcagcttctttagcctaaggttaaatctcagcgtaggtacacgattttcaaatttctggctctgattttcaaatttctggctctggcgttttcttttttggaaaaccagtttggacctccccagatttcagcaagctgagatattagcaatgagagagattgaatgaacccaacatctgttttgactgtagtaagtactcaagaaactaactgttgattaagcagaaggctagcgaggagaataaccttccttaggtgaccaatgggcttggtggaaagtttgcaggtttttatgtggcaagatagttgtgtgttatgcaagagatacttgattggcctttttctttttttaaatgttgaacttaattgacttaattttgaactcagtaagaattatgttgaattgaaaacagaaaaggggatggaatctgatcaaagccttgagcaatccaaggcaaatagggctttattttgggatcagccctgccaggtaggaaatcacacacgctgttcctgtttgctccgctgggcagaggtggcctctccatggtgccctgtcacttccccgccattctgtagtgaagaaacttctgctcgctggggcctgtgggccttttatttattagtcctggcgtttaactttattcactagcaagagtaaaatttggggagggtttttggagacagttaggagtgtcgtgaccagtgacttttcataattgtgcttctgagggagtgccgttctctgagtttctctagtagtggggatgttcagtgatgttctgggatgttctgagttgttgggttcctgaagggcagtgacacttcagaacgaggactgacctggcttcccctcgagggagctgacagaagctgtgggaggctgcagagcactgcgggtgagtgactgccagtgttgggacc

SEQ ID NO: 77460 - DNA, 1100 bp, Homo sapiens
ggaggttgcagtgagccaagatcgcgccactgtactccagcctgggcaacagagtgagactctgtcccaaacaaacaaaacaaagtagactatgccaaattaaaccttgaagcaatcactgatatggaaaataaaaattttagtgactaagccaataagtaaaataaaatgtaaaaatactcaaatagatgacagaaaaaaaggagaaaaaggaaaaatagaacagatgggacaaataaaaaacaaacagcaaagtggtagatttaaacctatctgtttaaaaaattacattaaatataaatgatttaaataccctatttaaaagttagagattgtcagattggaaaaaataagcaaaactcaactctgttgtctacaagaaatacactttaaataccaagacacaatagattaaaagtatagattaaaagtaaagggatgattaaaagtaaagattaaaagtaaagggatgaaaaaatttaaatgctaacactaatcaattcaaggctgtagtatctatattaatatcagacgaagcaggttttagagcaatgatgtcaatccatcaaaagaatataacaattccaaaggtttatgatcttaataacagagttctaaaatacatgaaacaaaaactgatagcacttcaaggagaaataggcaaatgcacagttatgcttggggattgcaatatccatgtttcaataaatgataaaacaagtggacagatgattggtaaggatatagatgccttgggacaacacaatataccaacttgacctaatcgacatttatatgacattccacccaacaacaacagagtcacattcttttcaaatgtaacatttaccaagattgaccatatacagggtcagaaacaagttttaacaaaattaggagacttcgggtgtgttctctggactgtgtcagaggtcctgaagactaccatcaggcattgatatactggaaagactcccatagcttagaaaagctgttatactcatggttacagtttattacagcaaatggatacagattacaatcagtaaaagcaaaaaggcacatagggcagaattcaggagagaccaggctcaagcttc

SEQ ID NO: 77461 - DNA, 1992 bp, Homo sapiens
gtcttatcacctttgaaggctataccatggggctgggttgtcagaaacttaccattataataaaggctttctggtactttcagttataaacacccctgtgggtcatgttatggcaaagcatcagggtgtacctgtcccaggcctggcttccagagatgtggttgagataaatgaggaagcagtgcttagagttatagtacatagttcatgtcattatattttatagtcttttcttgcattacatagctttataagaaattaatttcctgtccatttcaatgcagttcaaaaaaatcaaaatatttgttttagctgttagtctcttagacttgtacagctcaaggcagtatctcagtagttcaactcttcatgacacagacaaagaataggaggcccagcgatctggggaattgcctagggtgatgcagttcttggtaggaaagaaaatcagcaccctaaagttctagactttgatttcttgccttttcaatttgaaattcatttttgttgtcattgctgttattgaacactgaataggctgctgtcaacagctcagtgagacaggagattgtgagcaacactttgtagtcagatagaccaggggtcggaacctggctttatcatttactagctgtggagcccttaattcagtcttatctataaggtggtgttaacaccttcctctcagggtggctgtgggaattagaaatagtgcctgtcatatcccaggcatagtgctgggtgctgagtagggctttgataaatcaacctttattattattgaaactgaagtcttacatacccagataaggctcctagctgagggatctcaaatctagacagacctgaaagaatttggggtgctaacccctcagtgatcactgaattttcaggcaatgagatgtgtagctttctccacgtcctcagccaaacttccagagaatctacaggccttggggagagaaaatagctccctgtcagaggtattgagcctgaatctttctttttttaaattaaattttttgtagagatggggtctcactatgttaggcaggctggtctcgaactcttgggctcaagcaatgctcccaccttggcctcccaaagtgctaagattacaggcatgagccactgcacctgacccttaatcttgatgtgaaaggaagcaaggagtggagagtccggtttgttatactatattctgttagttacatctacatagaacagttcagaggctgggcatgtttgagcttttaaaagtatagagggtcctcagcctgctactcagctagctgcccagcacccctccccgtgtgatgtcccattggtctgctggcttctgtctagcacctttgctttccacactccaccctgtgcactcagcagtccttgttgcccctctaggacattacccagagcagatgcattggccccagctaatgggctcccttataaggggcttccacttctgactcctgcatggaccttgggcaagtcacttaacttttctgagactcttattcttttcccacgagatagagaggagaatagtacctattgaacaggaccaaacaggcacatggaaggggtttgaaagcaagtgtaattataattttatcatcattaatttatttaaaatgtgttacctaggctggggccagtggctcatgtctataatcccaacactttgggaggccaaggcaggagcatctcttgaggtcaggagtttgagaccagcttggacaacacagtgagacactgtctctacaaaaaataaaaataaaaaataaaaaataaaaaaataaataaaaagaaattagcaaggtgtggtggcatgcacctgtagtcccagctactcaggaggctgaggcgggaggattgctttgagcccaggaattcaaggctgcagtgagctgtgattatgccactgtactgcagcctggtagacagagtaaaaccctatctcttaaaaataaagtaaaaggtgttact

SEQ ID NO: 77462 - DNA, 1105 bp, Homo sapiens
tgggacagaagagcaggaaggaagctggggccggcctggctgggccttcctcgaaccaggcagaggcaggcagctgccctgcagggcccaccgcagtctctcaagacagacagaggaacggtttgttgagtgcctactgtgtgccaggttctggaattgtaaaaatataatacattattaataatgactacagcattaaaataattccttctagacactgttctaagcacttgtcccttacctccctttatcctcacaacaactccagagctagagacaggaatagagcccccatttgagaaggggagtgaggggtgcctgcttcctggactgcggctagcaggtcatttggggaggggctcccaggtgcagattccgccgagtccggactgaaggaggacacgtcgatcctggtgtgctgggaggtgccttagtttgcgtttagcggcctgtgaacgagtcttgggacctctaaaagctgactcagggccacatcagctaggactcgctgctagctgccgcccaaggtcgtcccgcagcccctcggcagccgccgccaggggtcgcgggagccgcgttctagcgcagtcgcgcgccacagttgcgcatgcgcggagctgctccgggcgtcctcggccgggtcggccttgggaccgtgccccccctgccccgccccgcccatctcccctcccctcgcgtttcgccccgccccgctcactgctgtccccgaccccgccccgccccactctcttgccccgtctcgccccgcccctccttgcgctctcgccccgccgcgccccgccccgccccgccccgccgtcctggagccagtgccctgcatctcgcgcaggtgccgccgcaggactgcaggactggttcctgccgcggccaccgggacagtggtgccccaaggccggctgaccatttgaagcccctgtacttgggttgattccgcgattcaactcgagttcagggatggagaagaaaggcaaacttgccaactctcttgattaacctcgcattagtgagccttcttagggactcaccaagccgagctctctgggaggcgttcacactcacaggccctggctgttcgcaggcagca

SEQ ID NO: 77463 - DNA, 1038 bp, Homo sapiens
agcaagtaacaagacagctccacctataagcacaatgccccccagggctctgggctagtgaaggggtggagggatgccgatgacacagagctttcccctggggtttacaatgcctgaaatacatgagcatttggacatttgtgccggatttacattctcagttaaggtgatgttaaaatgtggtgaagagtgtaaatagtggcctgagtgtcaggacaagccagtgtgaggtttaaatgtatcatgttgagataatcaggagctaattatctcgaaaaaagagtcatcctctcccttattgcttgaatctcgagttcaagtcctcctgctaaccctggcaggtctaggtatggcatgcacctctgcagactgtggaggatatgtcctagtcttggcaggctggctgcatgtcctgctgtgtcccacccatcctctgctccaggctgcctgcctccttgcccacctgccctcacccctgccaggccaaccccccacctctgtttatcttctccatccatctgggagtcatctcttccctgtgctgagtccgcccttggtgacacccgttgttgcatacagacctctccagccccgtttgtccacaccaatctctccatcctctgattccacctctatttatagctagtaccatctaatttggcattcagattttaattatttcacatctgccatttgcctctctcaaactagactgtataattaattaattcattaaatcagcaaatatgtgagtgcttattctgggttgggtgttgaggctgtgtcatatctaagctgcctgctttatctccctgcatgtgcgccagggacaacagtgcctgctgcacaggggtgcctgtgacggggccattctttaacattttgccctggcatccaggggcacactattgaagataaactctagctgaataacacacaaggtgcctaagcaaaagggcaaacttctcagtatattctgagatccactccatttcagaataggttttggtttgggcctgatataaaaacaaatactct

SEQ ID NO: 77464 - DNA, 1071 bp, Homo sapiens
tctgttctacagcaatactttgaataggagcccatctcatattatagagcaaacccgatacatgtcatagtcaagggaagcaatacttcctatatttgcaattgattgacaaaatcagcctggtggataagtcctatttttttctgccaggaaactgccagcccctgacaagttttaagcaggaggaatgacttaattaagtttttaagcaagaaagatctttctggcacagagtggagaatagattagaaagaattaaagattctagcgaaggagactggttaagggggttagttggatttgggccctttctctgttctgtatttcagtgggctgaattctgcaggctttttcccaggtgcccaagtcagtggtttctgcctgggtttggtcaagcagaggcactggtaggaaattggaagagacagataagccagggtatttctctctgcctcaggcagcacctttgccagcaatggtgtctcttcagttgtcctagctcctgtcagatgaaacctttctctgtagttttagtgcccattagggagcttcctctgggttttggctctctatggccccagcttctgggctcttaactctgcctcctccccatgttctttccagtcctagggatgttagtggcttcctgctatttcagaattctggggtacaaaaccatcctgtttggcctcttatctctttcatctcctatgcagacaattccatacattcaattccctttatttgaaagaactagaatgttttcattatcctaactgtatcctgacagatatcagaggtattgcaaaagcctagattccaagtacaaagggctgaaccaaggcaggggcaggcaagtgagaatccagagtcatttgaaagagaagcagtaggccagagagataggctgtgtgtgttgggagttggtatgggaaggtggttgagggaggaatccagatgacagtgaaatttttagcttagctcactgggcaggtaatgatgttgtcaaaccaagtgaagactgcaggagtgtaatcgcccattgcattcttcctgcccactgcacagaca

SEQ ID NO: 77465 - DNA, 3166 bp, Homo sapiens
gcctttccatgggcatgcatggtcaaccatctaattttccccatgtatgtagttgcctttgaatgctctagtcttgaatgtctggccctcaaaagggagaaagagaaaaatgaggctgggggaaagggcactggccctttaaatcctctggatgtcacttctgttggtgtatgtggggtggcttgcaataatgaagggaggtgcagcaacaatggctactgcctcttttctgcacccctgtgatcagaagcagcagtcagtgatcagaacacagatacccaatatttggaggacagggtgctctttgcccaccctagctcctgcaagctttatatttgcttctctaggaatgtgttcacagcttctactatgctaaaagctgaaattaactgcaatttaccatcaagctttcccctggaaattgtaagccttcaagagaccctggagttccaaaatagttatattgaacagattgtgccagtacaatagttgtctatgtgggaagatagattcctggtgcttcatagtccaccatcttcccggaattctgtttatagctttttaaataacagatttattgatatataactcatataccatacaattcaaccctttaaagtgtacaattcagtgggttttagtatattcagagttgtgcaaccatcaccacaatcaatttcagaaaatttttattactccaaaaaagaaacctttacccattagcagtcacttcccatttcctgaacccccaccccaactctatagccctagtcaaccactaatctataccctgtctctatagatttgcctagtctagaaattttgtataaatgaaatcatgcacttgactttttgtatctggcttcttttcatttagcataaagttttaaaggtccttatatgttgctgcatgtgtcatttctttttgtgactgaatattacattgtatggatataccattttgcatattttgttaatccattcatcagttggtggacagcaggttatttctattatttgactattattaataatgctgctatgaacatttgtgtacaggttttttggtgaacataatcccatccaaaacattttgggttttcatttatcttggatgtatacttaggggtgggattattggattacatggtaactctgagtgtaagtttttgaggaactgcaagctgttttccaaagcagctcacctgcatgaaggttctaatttcttcacatcctcatcaacacttgttgttatctgtctttttgattatagccatcctagagtgtatgaaatggtatctcattgtggtttttatttgcatttccctaatgataagtggtattaagcaatttttcatgtgcttattggccatttgtatatcttctttggagaaatatctattcagattctttgcccatttttaattgggttatttgtctttccattattgagttgtagtagttctttatatatcctaaatataatttcttttacagatatatggtttgtaaatattttctacaattttgtgggttgtctttcactttctaagtgatgtcctttgaaatgcaaacatttttcattttgattaagtccagttcatttttttttcttttattatttttgttgttttggttttgtatctaagaaaccattgcctagtcaagtttatgaagatttactcttgtgatttcttctatgagttttatagtttttactcttaaatttaggtgtctgatccattttgagttaatttttgtatatttttgtgaggtcagcatccaacttcattctttttgtatgtggatcttcagttgtttcagcccaattttttgaaaatactgttctttctccattgaattgtcttggcatccttgttgaaaattagttgagcatatatgtaagtgtttatttctggactctctgtctgtaccactggtctgtatgtctgtgcttatgccagtaccacactgtctttattactgtagctttgtagtaagttttgagtttggggagtgtgttttctaactttgttcttcttttacaagatttttttggcttacatttcatataaattttagggtcaggttgtaaattagtgtaagaaataattcttggtagggattgtgttgaatctgtagattgatttgggaagtattgctttcttaacaatatcaggtcttccaatccatgaacatgggatatcttctttaatttctttcaaaaatgttttgtagatttttttggcattcaagtcttacattccttttgttaaatttattctaagagttcttttttatgttattataagtgaaactattttttaaatttcagattgctcattactaaggtatagaaatacagctcatttttgtttattaatcttgtatcctttaaccctgctgagctcatttattagctattatattgtttttgtggattctttagggctttaaaatatgtaagatcatggcatttgcaaataaagataattttacattttcctttccaatctggatgactttgttgctttgtattgcctaattgtgctggatagtatctccagtacaatgttgattagaaatgaccagagtggacatccttattttagggggaaagctttcagtttttcaccactaagatgttagcagtggcgttttcatagatagcctttatcaacttgaagaagctcttttctatttctagtttgttgagtgtttttatcattatagggtttagacactgtctaatttttttattgcattgttcgtgtaatttttgtgctttattttttaaatattgcattttacgttgaatgattttcatatattaaaccaaccttgcattcctgaattaaatcccatttggtcatggtatatgattttttaatgcattgctaggttccatatgctaatattttgtaggggattttaatacctatattcataatagatattggtggtattcttgtgatgcctttggttttagtgtcaatgttacgctggtgtcataggatgagttgtgaagtgttccctccttttctgctttttggaggagtttgtgaagaattggtggtagttctttaagtatttggtacagttcaccaaggaagccatctgaccctgggcttttctttgtagacattgtttgattgctaattcaatc

SEQ ID NO: 77466 - DNA, 2047 bp, Homo sapiens
atagaagcctttcatcatataggtccagggctctttatttttttctttgaggtggcccctgcagggaagaagagaagggaaaatcagggagcagccaggtgactgctctgtgagagggtcactgtggactagaggtgaccttgggaccagaccgtgtgaggccgatcaacactgaaggaatggggctttttgggggaagagcagcctccaggggtggaggagcaggcctcacctgtgtggagggctcttggaggaagaaagactcggtctgttttggcctcagggacaggaccagagccgggcactggaaactgcatgaagttcagtgttagtcccatttacagaagccaatttctaacctcacagctgccagagagctcagctgcatggagaggcaggggttccctgtgcctgagcatttattgagcgctgatggagagtctggcatggtgcgtggtgatttacctgcgtgattgtgcttatcctgagaacaatcccggaccctagtattatcgttccctgcggaggggttaagaggctgcttttcagagttgagatgggattcaaagcaaggcctgtggactccagcatccatactctttccactttactgagctgcctgtcagtgggagcataatcactcattgtgagtgaggatatggttgatgcgattctggtgtgagataacctgcttagccttgattgtgttctgtgatttgtgagtgatttaagtctgacttttcttatctgcaaaacagagctaataatactctcacaagagtactgagaagactaaataagacaaaatgggaagatgctttgaatttataaatccaaggtcagtggaaggggatttgaatagtcagatctcatggacagctgaggctgggagcagcaggtggctgtgatggccttgcccctcctgtccctgaaggccctgcctgccacgctccttagctgagctagccagcaatacttctagctgtccctagtattgatctcttgtttcatcccccacaattttattttattgttcttttaaaaaatttattatttatttacttttttgaaacagggtcacgctccgttgccaggctggtgtgatctcggctcactgcaacctctgtctcccaggctcaagcgatcttcccacctcagctgggactacaggcatgcaccatcctgcctagctaatttttggtattttttctagagatgaggttttgccatgttgcccaggctggtcccgaactcctgaactcaagagatcctcctgccttggcctcccaaagtgctgggattacaggcatgagccactgcacccggctttattgttcttaatatagacaaaatacatgtgttttatataaaattcagaaatgatgactaatcaaaagaacataaagatatccattacccatctactcaaggcagttgctgttaacactacagtgcatttccttccagatcttctctacacctcctgtatgtgtgaatttttttatataaaagtgggattataccacatatactgctttgtgacctgctttttctacttcactatagatcgtaaacactttccatgacagtatataactttctgcaacatttaagcagctgtataacatttcatagtatggatgaagtataatctatttaactaaagcctctatttttggacatgtaggttgttttcagcttttcactgttatacacgaggctgtgatgagtaccctgtcagcctggtctctgtgcctgttcttaatgatttccctaggagaggtttcctgaaattgagtttctgggttgaagggaggtatttccagattgccctgcagaacggtggtacctgtatgctttccttcctgtagtgtgaggaaccagcctcctcccattccagccaacactgaatgcaatcccttcgatttaaaaatgagcatttattctttagctgtgtattgagtgtaggctgtttggaaaataaagaaatatatatatatttctttatttataatatatatattataaatatatacataaattatat

SEQ ID NO: 77467 - DNA, 1024 bp, Homo sapiens
aattttgtatttttagtagagagggggtttctccatgttggtcaggctggtctcgaactcctgacatcaggtgatccgcccacctcagcctcccaaagtgctgggattacaggcatgagccaccgcgcccagcttcagcaaagtttcttgataagtagtatgcaacttcagcaggggcctttcttggtaattaaaatcctgcacagcatgtagggattcatatcatatggtcagttggccacatggctgatgatgtttttattcattaatgccacctctgggttcattaaggctaatcagttgacacacagcaatcactagcaatcagtcctctcttagttaactgtgtacctattcagggacaagaagaacgtgtaaatatctcactgccatgaagcagtttgcactctagtgtgagataatgcaatctcatgggaagaaaaagtctggaagcacaggacacacagatgatcggaccgttccaagctgctgcttcctcaatctgtaatgggcataatcacacccacttcatggggctcttaggaggattaagtcaaataatgtatgtaaagcattgattgtggtacctggcacattctaaatgctgcataaatgatattttaaaatctcgaccaggtgcggtagctcacgcctgtaatcccagcactttggaggccaaggcgggcagatcacctgaggtcaggagttcgagaccagcctggccaacatggtgaaaccctgtctctactaaaagtacaaaaattagccgggtgtggtggcaggtgcctgtaatcccagctactcaggaagctgaggcaggagaattgctggaaacccgggaggcagaggttgcagtgagctgagatcgcgccattgcactccagcctgtgcgacaagagcgagactccatctcaaaaaaattaaaaaaataaaaaataaaatctcaaccccaaacatggcagcaaatagtaaaagctagggatgggtaatacggagaggtcacttcaggccagcagggccagga

SEQ ID NO: 77468 - DNA, 1021 bp, Homo sapiens
ttcatcacctcccaaagaaaccccattatcaccagcagccacctcccattcctagccaagactaatctgttttctaactctagacttgactatcctggacatttcatacacgtggaagcatacaatatgtggccttttgtgactggatttttcacttggcatcatgtttttagggttcgtctatgttgtagcataacagtacttcattctttactacaactgagcaatattccattttatggctagcccacattttggtggacatttgggttgtttccactgtttggctattgtggataacactgctcagaacattcacgtccaagctcttgtgcggggagctgtggggttttacggcagcagctggccagactctgagggagcatcatgcctgatattgtaggaaaatgcttttctttctctccttttgcttctagtcagaattcctacaagaatccaatctgatcatggccaagttgaattatgtggaaggtgattataaagaagctctgaacatttacgcccgggtgggcctggacgatctgccactgacagctgtcccgccctacaggctgcgggtgatcgcagaagcctacgctaccaaaggtgaggcccgtgccttctaacacagtgtcccgtgacctggagccagcagcgcctcttcggagctgcctatttgacccttggcccttggctggtgatgaacctggcagttcccagcaaggctgctggggccgccctgcagcacatgctgggtcatgctaagcccagcagggatttgtccctccaagccagtggccatcagctgtcactgaaggggatgaaggaaaaacatttcagcaaagtttctttcctttctttctttctttctttttctttctttctttcttttctttccttctctctctctctctttctttctttctttctttctctgtttctttctctctttctttttttttgagatggagttttgctcttgttgcccaggctggagtgcaatggtgtgatcttggcttac

SEQ ID NO: 77469 - DNA, 1035 bp, Homo sapiens
actaatttttgtatttttagtagagatggggtttcaccatgttggccaggctggtcacgaacttctggcgtcaagtgatctgcctgcctcggcctcccaaagtgctgggattataggtgtgagccaccgcactcggcctggatgctttttttctcttttctgagtctgctttgatttctctgtctccagatgtaattctaattcctctggtgcctctcccttgggccacccataaacacttttgctcccatcagtcctgcttgtccactgcaccatcctttccaatgctgcctgatgtccctccctcttccaagaaatgcctggaagccgaccacgctggctgagatagctgctgtaacacgctgtacctggctacctggccgtgttgtccactcatcaaagctctaggttacagtataaatagtgcggtttcatggtgtgcttctgtaagcaaaaacctcagctttgaaccgcttgggctctgaggagaaggtctggccacagaagataaatctgtttccttatataggtggcagggtggcctgttctttccctaggtgccggaggacgggtcagggaggaaggcaatgatgaggctttggggagagggggactggccaggccagccttgctgactgggaggaaggggggcccacagagaacttccagcccttagcctctagggagggtaccaggtcacctcagtttagaaacttcaatggctcagtgagaaacttcgccctggaaagcaagcaagtcctgatcttcacatccatttgggaaggctctccttggttatttgggttacagggttgtggtgcatctccagtgccatggccagacccaccaggatgtctggccgcttccttttctgagacaggtgcttgtatgtttaacttatgaagcattccttccttcccagccggcccagcccagccacaggcctgatgaagggagccgcagggttttgttttggtttggtttttgcaacagctttattgaagtgtgattcacataccatacaactcacccatt

SEQ ID NO: 77470 - DNA, 1076 bp, Homo sapiens
atcttgggacgttacttaacctctctgagcttcatgtttctcagctgcaggcctacttaacccaggattgttttgaggctcaaatggagaaattctttcaaagctgtatagcactagatacacatcatttcttgctatgttattagttctacctagagaatttttttctcccattgctctttttcaccttcctccatcttataaagaatgttccaaagccgtacatcttttgcatgggtgtgctgtcctactcacaccaactaatgtgaaactttctctttccttgagcttaagtccagcttgtcttaagtgaattgaggctgggaagaccagagccagccaggcatgtagtgggatggaaagagtcctggactaggagtcaggacatctggcttgtgattcaaggcaagaaaatggtccttattgtgagcaaggtggcccctgacactgtgttggggctgttctcccactgcccaggcagccgaggcgccctggccaagctgtttcctgtacttgggtggagactggactcgcccagggaggctctcccagtgtgtccaagctgtgcctctaggcttgcaattttcttcaagcgttttctccacctggctctccagtttgcttttgttaacctttttttttttcccttttggtaaaatatacataacttacaacctaacattatagctctttgtaagtgtacagtgtagtggcgttaagtatattaccattgtcactcagccgtcaccaccctccatctccaggactctttgcatcttcccagagcgaacctcttgtgatgtgtccattaatgctaactcctcattccccctcctctttcaattcgcctttaatccaacggttcttagaggctagaagcttggggaaggagggtagacttcccagaatgtcctaggaaatgttttcaaaatacccaagcctggcctgtcccctacctgggtggagaacccctgtggtggatgcttttttttgagacagagtctcgctctgtcatccaggctggagtgcaatggcgtgatcttggctcactgcaacctccgcctcctgggttcaag

SEQ ID NO: 77471 - DNA, 1032 bp, Homo sapiens
gagctgtgggaggttccatactggtgccagcaggcctggcgtcacagttgggagggggccaggaacttccccacgtctcagcaagaaccctcaccctcaggcacaaggaatcttaggtgctgccccctatctgtccattctgttttccggtctcattacacccaggtttccattccctctcacgtggctttccttcctttcttcttggactcctcatcagttccttttgcttttcatgggggtcatctcctcttcccgccctgcccttctgcctcccaggtggctcacactcccctggctctagatgcttcccctagttcagatggctgtctgtggcccgctccatgctgcctgtcttccccaggatgtatttcccactgaggacagtctttggtgaacttctggagctctgacttccgtttccttttaactttgatgacttctttctcatttttcttctcttcctgtctcggaatcctctgagactccatttttggtctttattcttgtttgtgtgtgcacgcttccccccgggaagccatgctttctttggctttacatttcatatctgtactgcaaactccagcctgctcccgacttgctgtgtgaccccggggaggttactcgcctctctgcagctcagtttctttaggtttgaatggggtgggctcttaaaggggtgagcttggaccttcccggctcctgcatgttctaagcctgtgagctttcaatttgagctgttcctcctcttggtcatctggccacctccttggccctgctgcaatggagggcctgggcaacctttgagtaagttagtattggtgttggtcagttgtgcagcaacaggcttctggaaaccctgatagagagctgctttcaaaattgtctctgtgtatgttgtatgcacgggacacagctccaggccgctaggaggtggctggagagcgtcatctcaacacagggatcttgccccaggcccctagggggtggctggagaggtcagctcagcatagggatcccaggtacttaaag

SEQ ID NO: 77472 - DNA, 1106 bp, Homo sapiens
tccagaggcaaaggccacagccccaccttccccgggtgggggggatcaaggaggccaagtgcctgtgggcattgaactgtgccagccacagggctcaggggactggctctgttgtgctgagccagggcacggacccccctgcagggtggctcattccccatatctccttggtgagggtctcactagtggtctctctttggcttcaggctttatccctatataagccattggggagctagttactgcagcctcacttaacccccaaataatgcccaagagaaaagcgaagccagccctgggtacccttgagtccctctttacccctgtcccctgagaatcctagcaagtgaaggagagggacttcaaaaccatccatccagcctctgccccagaggggttaagtgggccggggtcacccagctggttgggagggaagctgggccccttctggaggctgatggtatagtttgtgcatggcgtgccggagagagtgtagggagactgcctgcgttcaaacgcagctccaggatgaaccagctctgtggccttagggatgctgctcccctctcctgcctggttccctgtttgtgagatggagatgataatagcatcctagtattgtttccaggactatcaggatcgggtaaactgctcaccatactgcatggcacttcgtatgagctcagcatggctgggctattaatgactcacacagcattcatatcctcctgctacattgcaggcctgttgaacacggagcttgtgtctcctagagctttctggccccacaagatccaacataactattctgggaaatagtcaatcctaaatggatggtaataacagtagctaatgtttattcaccacttacttcagactatgtgcgttacatattatctctaatcctcatgatacccaagtgagaaaactaaggctcagagaggttaagtgtcttgcccagtgccacacggctagcgagcaagggaggtgggatttaagcccagggctgccagaggccaaagctctttcccctgcattgcactagctgtggcctctcctttctgtaaactgcacttctggccccactttgcagtccggctgctcca

SEQ ID NO: 77473 - DNA, 1848 bp, Homo sapiens
ctgacccagagataggtcaaatgggtgccatataaaatatgaaagacggccacagccacaggaaagctaatggagtggctgcagcccttccacccatgggatttgtctgtccctgctcatcaagtgtggctagtggtggcagcaccagaaccatgtagagcagatctggtctggtccttttagaggccaccaggcctggagtcagaatcttctgcatttgccctccaagccaccttgtacacatcacatgatcatctgaaactgtagctgtcctgacttgatgagtgttaaaatagtgctagcagggaagaagaatgaactgcatttcttgggtctctctctgtctttctctctctctctcttcattttttctgtagagacgggtttccctatgttgcccactctggtctcgaactcctgggctcaagtgatcttcttccctcggcctcccaaagtgctgggattacaggcgtgagccactgtgcccagcctcttgcgtctctcttgtgtgccagattctggctatgaacttttacacagatctcagttaatcatcacaacaagcgaatgatgtcaggggtaattctcattcagggcttgagtagactgaggctagagccgttaattgaactggattctagcccacttccaactagtttcactgttcttctattacactaatgtttttctaaactgattggatcaaagaatcacttctagacagcttgttagaatccagattgcaaagccccactcccagagatactgatatagtaggtctagggtggagctggggttctgcattcttaagctcccagtgttgcaggtatgcagcatgctttgagccaaatactaaactaagtgtagtttatagattaccagacatcttggctgagggtggtgattctctcggcccaaggtagaagctggaaatctacatttgtaaacagcctcagttagtttgagtaggcaagtgtgggagcctttgctctgaaccacaatggttagcatttaatgtgcacctactatgtgtgggcacagcaccaggtatcagaggggcatcagaagaaatagagtgagcaggtcaccaggcagggaaacttacagttcaggattgtcgctcaacctctgggcagcagggtcccctgggggctagttagcaactcagatgggcaggctgggcctgagcttctgcttcaggaggtcttagtggtttagggactcaggaagcaggatcccagggccccaagtgattatggtgcccggagttctaggaccagactttagacgtggttgtccgagtgggagacagaatgtgaccctgtagcctgaggacagcaatgacagcattgcttacaagcacagagggtgcagctgggagcctggagaggtcagactcagtggcagtgagtgggtaagcagggcctggcagggcaccaggaggaggatcttgggcagggtggtggcgtgagggtgaccaactcgtcctggttggcctgagacttttctggttgtagcatccaaagtcctgagtcccagaagctccctcagtcctgggcaagtggaacggtagtctttcaggtagatagaggtattttagcaaaggggaaaggaaccccgggcaggagaaagcagtgggctttgccctgttagacctgggttcagatctcggttctgtcacttcctgcttgtctggcctcaagtgagtgagtgacttaacttctctgagcctcactctttttgtttttgagatagggtgtcactctgtcgctcaggctggagtgcagtggtgtgatcacggctcagtgcagcctcaacctcgcaggctcaagcaatcctcccaccgca

SEQ ID NO: 77474 - DNA, 1295 bp, Homo sapiens
cagaagcccctccactgagcaaatgttccctgacgtctcattggtcagaactaattcacatgcttgcacttcagccaatcacaagcaagggagtgtatctactggggccagggcccctacagtgaagcacacagcaccactgctgacagctgaacaaaactgggcccaatcaaggaggaaaatgggtgggagtccgagctggaagacagcggtggagaatgctggattgacaaccagggaacctctggctggccctgactcacaagaccccaccaaccccaagggcaaacacttgtccttgcaggacgccatttctcagggccagagtcatcacgtaatattgatgtaacttggccctcgcttccattttggaaaaccctcggcctgacttccttacttacacctgttccaactgctcatgaaagccgagccaattcaacacagcatgtgctgtgagcccaactccatgtcatggggccagaaaggtagaattggccctctagaagctgaccatttggtaagaagacaaggcacatgccaaaatcggtggagtaggggagggaaacagccctgagctgggagatgggagtggataacacccaccaccaccagcaacagaaaacagctggtagctagtgaaggctcactctatgcaggcactaagaagcacttttaggtattttggttttttcttcatttgatccttacaacctccctataagtttggcactattattacaggttcataataccttacctacagtttctgaaatccaggactctctaaaaaccaaaagttgttttttgttgttaatcatttatgggatggcagaaacctcaactgaacccatgtgaggctatttatagtctatttctcccttttgcagtgactgctcatatgctttgatgcagaaatactgacccattttattacaaaatgccgccccagaccccattgggaatgtcacataatgcccagtaaacataacatgtttcaaaaaattctgcattctgaaatacatctggccccaagggcttccgaaaaagggttttggatgttgtgtcaccaaagggggctttgcaagttgaaggttaccccccataggaagcaggtgagccatgctttgaaatcaagcaacccaactccaagccagggctcttacccactgtgcttgcttctgccacttgctggttggtggctttaaggaagacatctccctctctggcactgttttgtcatctataagaggttggactacatcaatgggtttcaagcttctttgttttaaaagtgt

SEQ ID NO: 77475 - DNA, 1044 bp, Homo sapiens
tgttctaaatctggtagccatttattattaaatgattaatgattaaacattaatcatttaataattacttaggaattataaattacaatgtcaaatcttcatacatcaggctccttgcactataattacttaaaattagtttgcatcaatagtctatataaacagatatcttagtttagaggaaaaaatattctattttctaggtactttaatagtttggtcttgtgaaaattacataggtgtgtgtttatgtatgtgtatacacacatgtattgggggcttacaataccaaattaataagactgcccctcactccttaaatcgactatctgccctgccagtaatcccccacctgtactggtatatacagagttttctctggtacaaatgattaatcaagaaaaagggtgtgaaatatttgtgttcgtttctttttaaatgaataatgggatacacataaactagtaacaccacattgatttcctaaagacctaatacagctttaagagggaataacattccagagctccaggattattttaatttagctttcaagatggttacgattttgatttaatatagagacttcatagtgttaaattttagggtttttttttttttttttgtatttttagtagagatggggtttcaccatgttggtcaggctggtctcgaactcctgccctgatgatctgcctgcctcggcctcccaaagtgctgggattacaggcgtgagccactgtgcccaacctaaattttaggtatttaaaacatccattgatgctttgttttgtttttgggttttttttttattgttgttacttaagggatgcatcttatttatttggttgacttttatctagacatcataaatgtgatgcttacttttttattagccacttcattgttgatgtcttaatgggagatcttagtttgatgaatctactctttgaaattttagtttgattagtcatttgtttctgctaggttttggcttttgttttgttttttgagtgataacctaagaagtttctacagtggaaa

SEQ ID NO: 77476 - DNA, 2324 bp, Homo sapiens
gagaccctcttccagttctcggactcagtagcttaggcatggtaggagtgtatcagtgatccattgcacctttattccctcagcatatgcctgaggcgatcttttatgcttttaaaaatgtttcccgttggtctcattggaatctgcctcctaatgatttttttcaggaaaacctgtttggttatcctcattcaaaagcactggacagagaatgttactgtgaatagagcacatattactctttttagcaacctagcatgatgccaacaagactattcttgaaagagcaaaggttcctgtaaatttaattagggctagatttgagctgcttgtaagtcacaggttttccagatgtctgccaacaagaaatgactcatactgtgatgataccttttgctttgccttgtggacaatgtgggtttttgaaatttgcacccttcaaacaatgatttatcagagaaaggggtctgttttcaaaaaagattctgtaatgaattttatgtgtggcatatacttatttcttgagagaagattttaacttattgtttttattttatggttacatatgatgataacctgctattattaaactttttctaaaaagtgaaaaaaaaaaaaaaagatataagaactcaaggtcccatactctgtattcgggatccatctgagatgcatgctaagctatgtgtatgtttttaattttgcactgctctttcctggcaatttgttttaatggttattgcagaatattaaggtacatgtctctctgttttaagtaatattgcactttataaaaaagtatgaataaagcaaactattttataaagtgcactgtttaaagcatttgcactgtatttttgccatttattttcattttctactttaaatttgtcctcacattcctcttctactttgtatgcaacaagtagaatggggcatgttgtgtcatgtagtcagccacttatgcaccaatgtgaggaaaacctaaagggaaattaaactaaacactgtgcttcatatttgtacactgtgttgtactacagtgaggaatttcctcctgtagtcatatattatgtacataatattttagaatcatacctatgacttgtttggaaatttttctgttaaattttaaatccagaaagcatattttataaacttatgcagagcacttttattgctcaaaagttctgaattcatacagaaaacaagtactatgtgatgaaaacatttcattaaaagattgctgcatttaaaaatacaattaattcgttccctatgcaaaaaaaaaaaaaaaaaaaaaagaagtgatagggtttgtgtgttatattttcttttaaagccatcatgtgaaatgtcaggactgagaaaagtgatttttttgctttgtttacaggaatcatgcttaaagagataatgcccaacatgtttattttatagtttttgttaatgataaccttttgagcattagtttggaatttggacatgatatttatttattcctttcttgaggttatagcagcattaatttcaaccagttatgaatactaaaaatattgcactctatgtaatagtagtatatttattactaaatcaatgtatatattaatagcacaggcaaaaaatggcaaatattaaaatattttcaaaatattatattatcctgttcacattttgtccacagtggttattgggaataatattttacactttttgctggcccaaatggctacataatattgagttaatgaaagttttctactcccagctttcagttattcctagtaattatgggaaattttgtgtgaattattaccaaactattgctaattcacaaaatgtgattccatcaggcacagatctctagtaatcaagaaaatgaccatatttataattatattggacatattgggaacatatttggctcttcaagccattttttaaactgtgcatcctggtagaaaatactagttataaagtacaaactaaagggactatgttgctaatagaaaatgatccagaaaaatggtcagacagtatacagattgatgatgtgattgatttcattgtgaatattggaaattaatgggtttcattttcatttatttcccttgcctcttcttgaggaggattcgacaggcgatgaaatgggtaaaaaggcagtcagactaacaggaagaaggaaagataggctagctgtcaactgatgagcctgcctgaataatctcaaatgggcttttgaaaagaccttaacaaacactgttgcactcttgtcaaatatctttatctacaccctacttataagtaccaaaaagacagcattt

SEQ ID NO: 77477 - DNA, 1020 bp, Homo sapiens
ccattaactcatcatttagcattaggtttatctcctaatgctatccctcccccctccccccaccccacaacagtccccggtgtgtgatgttccccttcctgtgtccatgtgttctcattgttcaattcccacctatgagtgagaacatgtggtgtttggttttttgtccttgcgatagtttgctgagaatgatggtttccagcttcatccatgtccctacaaaggacatgaactcatcattttttatggctgcatagtattccatggtgtatatatgccacattttcttaatccagtctatcgttgttggacatttgggttggttccaagtctttgctattgtgaatagtgccgcaataaacatacgtgtgcatgtgtctttatagcagcatgatttataatcctttgggtatatacccagtgatgggatggctgggtcaaatggtatttctagttctagatccctgaggaatcacgtaatcttttaaactcaatcatgctagttgtagcaattggtaaattacaccagttacgttactattaggattattagagtggctttaacagatctgggtagtcattctgttttgttactttttccctgatagtacacaatgttgtcaggacaggttcccttccaatctcatgaccgaagtttgacgtgtaccagcgcggtggaaatcatgaagaaaattaaaaagggagatttctcctttgaaggagaagcctggaagaatgtatcccaagaggctaaagatttgatccaaggtaagaatctaatgaaattttacattttatatgatgtgtagtgattgaagtagaatcatggccattacacatacattcatatgttaattactcgaggaatccatgtgtattctaaaaggcttccaggctactctcttcagccttgttttcttatcagaacattctctttagtaatggtatccacatttctaacatgagctagcacttgacttccactggcatctcagtcaagcacatctaaaacaaaccaat

SEQ ID NO: 77478 - DNA, 1352 bp, Homo sapiens
ccctgtctccaaaaaacaaaagtcctttctttttagaggtacatgataaaatacagatgaaaatgaacaaaaataataccttcattaaactatccgaaaaaaaagagtgctttgctaacttttctatataaatgaatgcatatctagatacaaaggctgaattatcccataacaagcacaaaatttatttgaagtctcctgatttgtttcagaaataaatggaagttttgtattttacatctaataaacatgtatgtggatattttaatatgaaaacaagttatattgtcctcattgaataaaataaatactccaggaaaatacatcatgtagtattatgaggttttgattacaacccattatacctgatggatatacaatccctgtctgaaatgtataggactttaataaaaatagagcttacacggtatattaatctgcttaggctgctgtaacagaataccacaaattaggcagcttgaacaacagaaatttattttctcacagttcttgatgctgggtggtcttacgaaccagatgccagcagtattggtgtgtggtgagggccctctctttggattacagatggccacctgcttgttgtgtccgcacacagcctttccttggtctgcacactcacaaagagaaagtgtctgtccctttaaggacactaattctcttggatcaggggcctacccgtataacctcatttaaccttagttacctccctaaaggccctgtctccaaatacagtcacatggagagctggggcttcagcgtgtgaatccccagcgggtgcaaggagaacacaaacattcagtccacggtacacagtatttagagaaagtaggataagatatataacatacctgtgaagtgttataaaattttgtttaaagtgttttattctcaggaccttattttttaatttttttcccacaattttattttgaacattttaatgctagagaaaatatgagagaatattactatgaacatctgacattttgctgcatttcctttttctttctctctaattatttctagtgtgcacgctcttctttatatgtatgtgtatatgtatatatatgagtatatataatacatatatgcagacatacatatatatctttatgtagagatagagctataccttgctacagtatttgcaaacaatttgcagacacaaagttatccttaacagatatttctagataatcaactaaaattttaagagcttggaactgagaggatcctaaagtttgtttaattctgccttttccagaaaagggatcttttatattatcaccaatatcctctccagtacttccaaagttggaaagttagttttt

SEQ ID NO: 77479 - DNA, 1024 bp, Homo sapiens
tctagtgatggaacttctgaatggaggagaactgtttgagcgcattaagaaaaagaagcacttcagtgagacggaagccagctacatcatgaggaagcttgtttcagctgtaagccacatgcatgatgttggagtggtgcacagggatctgaaacctgaggtataaaatcactggatctcttacgtaattcagtctagcaccattattaaagatctcccaaacatgggggaagtttctggggaggtttccttatttttttacttttcaaggctgttaaatagataattgaaaatacgtttctttgatgttttttcttttatatttcagtctaaaataaatttgtctttgtttattttttgccagctgatcatcttgaggttatatttgtaagtgtgagaaccttttatggaaaaaatactttatgcaacagttgtggactaaaaatagcaatggaaatttttatagcagaaaataatatctcttacatataattttagagggttttttttccaaatgatgtattttgaaaacttattttttacatttgtaatcaaattggttagctcatgaataaaaatgtatataattctattctaaatacttaaagagttgtcttggtttaattagttatgccgtctttctatgtgcttttctatgatcgtgctataatatttatagaactatatgtagcaatgcaaaagtaacagctatttatatgtctcctcttatgaaaggctaataaagaatgttctaactcttagaatgatccctttttagtatcaaaaatatgaaaattccctccttttagaaaatcaacaaaataatgaaaattgaaaaacgaaaatcaatactgtataaaaagataatgatgactcatcctttaccatatacaagattatacatattctctccaaaatagaactttgtttaattatcatgtgattataatatgttctcgagtatatataaaatattatttgatgttccttttgtgattaagccacaaaagattatttctctaaa

SEQ ID NO: 77480 - DNA, 1167 bp, Homo sapiens
ttctgtaaattaaaagatatttattttaattgaaaccagtattatattgtaagactttcttacccaaaggtttaaccacttggctcatcagttggtccattatacttttagctctaattgatattttctgataaagtaatccattttagacataaatcatagtcttatttgcttttgagtttatctagagaaaacgtctttgtgacagtgacatatttaatcaggctcacatagtgattttggcagccattgccatttctactagttgtgtatttgaaatatttttctctaaaattatttagcaagctactgatagctttgagagccatctagttgttttggtaactgatgattattattaagattgcatattcttattactctaaattgtcaggaaagtagagcattcatttcctcatatgatttgtacttttctgactcagaaataataattttctccagaatattactttttctagtgtgtggtataattcattactttcatggaaacctcattacagtatactgtaacatgtatattctgaatgcactgtaaataagacaaaattagtcttggggcagtactgatataaaaactttcttgaagagacatgtggatgctaagtgtctcatcttgcaggatggaagccaatactcaaaaggaaataacagctctgaaactctgtgaaggacaccccaatattgtgaagttgcatgaagtttttcatgatcaggtatcctactttttttttttttttttcccatgtgtactaattcacttacagggttgtacttttcacgcgttttgttggtgctgctgggtcagagtcagggatatagaacatcacccagccaccagaaagggcagtgaaaccaccctctcaaacccctccccaaccacacactgtttcccaaccccaaatcaggttatcccttcacctctcatgcttttctcactcagcagttaaccacctatgacaggaagacggagggccaggagctcagtggtgcagtcactggctacaatgtgcttgttgccagtgccgcttctacccaccatcacttaatcctggagtacctctcaggactcaggaattttgagcctccaacttccctttcacttctagagtaaaactgagagagcctggagcctaattaatgcaagct

SEQ ID NO: 77481 - DNA, 1025 bp, Homo sapiens
tcttttgatgaaagatcccaagaagagattgggatgtggtccacgtgatgcagatgaaatcaaagaacatctcttctttcaggtgaaattattgaatagataaatggtttcatactccttgccgttttcagggtccttggcgttcttggtgaaattagtgaacacagtcccctttgggatcattttccactggcattttcacgtacattgcaccttttgttttgttttgtttttaatgatagggaccctttcagtagggccaaaattctacttgtataaacattaatggtatttttctccctcaatggagtgggagtggggaggatcataatagcattcaattttctacatactgattcattagagtttctaggtggtggtttccatttatgatcttgagatctagccatatggactgagacttttactgtacttttcacttctgtctcagttcatgagctattactgccactatgtttcaccttttagatagtgatttcttcacttcctcttttcccagaagtaatctttaaaaattttaaatttacctatttctcagttacatattcatgacacatagagtgttactcatttatttcctttgtcctgtgacagtgcttctcttattctgaaaaagcctaatgagaccattctactgaggaccaactatatctgctcagtttagtacaaaaaaaacaccaaaatattaaacaactgagaaaaaacatttaaattaactgagttggctagttatttccagcctcagtcgtcaaactggggatgccacggctttgatttctaaaactctggagatatgacttttaaataacttcatcatatcagtaagcctgacctaaatatttatggtctaaagggaccatctaggttttattttttattctgtaaattaagcttttacattattatcaccaaaacaaatgaaaataatatagcaaaatgaagaaaaactgtcagttaagcttcatgttgttattattttttaaatatataaaaataaatattga

SEQ ID NO: 77482 - DNA, 1090 bp, Homo sapiens
ctgggcagaagagggaaataagatgcttcatgtggccggccgcagtggctcacacgcctataatcctggcactttgggaggctaaggagggtggatcacttgaggtcaggagttcgagaccagcctggccaacatggtgaaacctcgtctctactaaaaatacaaaaattagctgggcgtggtggcgagtgcctgtaatcccagctactcgggagactgaggcaggagaatcacttgaactcaggaggcggaggttgcagtgagccaagattgcaccagtgtactccagcctgggcaacagagggagactccacccaaaaaaaaaaaaaaaaaaaaaaaaagatgctttatgtgacagtgaagaagagtatttatagcttacataagacatgccctggggacgactcccagagttactgggtgggtgagacttttgagtgcagtcacagattccacagaagcagataaggataccagccaaataatctcaatttattattattaatgacctggctggtgtggcctagggaaacacaggttaagtggatcaaggaagaactcagtaacaccaaaagtgaagtgacagcctgtctcatagctaaaggaagacagactactatagagtgacatcaacagcaccgttcacctggggaccgctgtgtgccagcctctgtgctgagaagtcacccacattgtattctggaatcctcagaaccctgaaaaataagtggtagcatatgcagttttacagatgaagaaactaggatgtaacttgcctgggactcaatgctactgtgaggttggactgggatcaaatacagagttactggaaagttactccatgctgtcttcacgggtatcacttgtttccatgctgctgttttctttccaagtctggcaggtgcttatttcaggtaaaagactgggaagtactggcccacggactgcagggaattgatttcattaatcagtggactatttgttgaataattctttactcctaaggagaaagagaaatagagggtaaagtccttgtcctaagaacatttatttatatagcatttgggaggatatggaataaatacatgaa

SEQ ID NO: 77483 - DNA, 2592 bp, Homo sapiens
ggatagacaaatgatcaatggcaaatgatttttgacaaagatgcaaagtcacttctgtaaagatagttttgaataaatggtgctggaaccactggctatccagatggaaaaaagtgaacttcaagaaatacttcataccatatagaaaaattaactcaaaatggattatagacctaaatgtaaaacctgaaactataaaacttctggaaggaaacataaaggaagaccgttgtgagcttggtttaggtaaagatttcttagatatgacacaaaaagtgcaatccataaaacattaataaattggacttcatcaaaattaagtatttctgctcttcaaaactgttaagagaatgaaaagacaagccacagactgggataaaattttaaatcatatgtctgctgaaggactggtatccagaatgtataaagaattcttaaaactcaagaaaacaaacaactgcatttaaaaatgggcaaaaaatttgaacagacagttcatcagagaagatgtgtaggtggcaaattagcacatgaaaagactatcaacacctttagtctttagggaaatgcaaattaaaacatcaatgaaataccactatatattcaactagtatggctaaaaataaagagactgataataccaagtgctgataaagacttagaggaactggaactttcatacactgcaaggggaaatgtaaaatggtacaaaaactttggaaaataggcaatttcttaaaaagttaaacgttactcactgtctaatctgtccattccattcctgggtaattaccaagggaaatgaaaacatatgtctatataaaaacttgtacatgaatgttaatgacaactttcatttgtaataactgaaaactggaaataatccaggtatctgtcaacaagtaagtggttaaacaaattgtggtttattcatacaaatggaatactccttagcaatgaaaaggaatttatctaagacatgtgcagtagtgcacctgtagtcacagttgctgaggagggtgaggtggggggattgcttgagcccaggagtttgaggtcagcctgggcaatgtagcaagaccctatctcttttaaaaaaaaggaatgatttgtttatactcttgcaaatggatgaatctcaaaataattacaccaagtgaaagaagcgagaaaatatagaatatataccatatgattccatttctggaaaatgcaaactaacctacagtgacaaaaagcagaatagcagttgcctagggactgggattgggggaggtcaggagagattacagtacgtaggaaaactttggaaggtgatgagtatatttgtttcttgattgtggcaatggtttcacaggtgtatacatatgtcaaaacttatcaaacttagaacattttcttccatgaaattaaaaaaacataaaattatatactttgtatgtgggaattttattgtacgtcaattgtacttcaataaaactgttaaaaatttaaagtgtaccttttccaggacaggctaggaagtaaatgatttctcactgtttcaatttatttaatgccaaagttaagtgagcagtacttctttttaaaatcagggtgagttaaaatctcacctcttatgaaaaattataaatatgactttgtttattttaaattgattttttggcagtttgaaaatacctcagactataggaaactgtggccaccgtcctgagaatttgggtccagttgtaagatcatacctgtcatggtgacaggtactaagggtcgccttagcctgacaacattaagtggtggcttctctaattcccctctttctgattccacatatacaggcaatctttataaaataattttcctttccactgtaggtctgagtgtggagagaagtatatttcttatgatggcaagaatattctgaacaaagtaatgttcacatttaaattgcttttattccctttatatcaatcaattggcattctggttttagaaagagaaagagagcctgaatcagattgtttaaaaccttacaactaaagcaaatagacttttcaagaatttaaataggattccttccctttaatcaattaattatccactttgtcatggtgtcaacctgtaatttcatggttttgtgtgtgtgtgtgtgtgtgtgacagaaatttacaaacaatgtgataactaaattatcctacactacattttcctttcaaaataatcattctgagtatctttcctggcataaatcttgtatgtatcatttagataaatgtgccattatctgtccccagtgtcttaattagctcaggctttttatcatcattgaatttttccattcattaattattatgatcttccctgaactctgcatactttccgtattttttgtttgaaatggttcaaagtaatgtattatttaagttatctgttcgccatttttgtctacaggtagcctagaataaaaatgtttttctagtatatcaaatttcaaaatatgctaagaacttagaatgagaagaaacttagagtccagcttttcccctgacataagaatccctttctctgtaagaatccctgatagttgtgccatca

SEQ ID NO: 77484 - DNA, 1026 bp, Homo sapiens
gactttggaatatggacttttgagttaatgctgaaatgagttaagactttgtgggactgatgggaaggcatgattggctttgaaatgtgaggacatgccaggggtggaatgatatggtttggctgtgtccccacccaaatctcatcttgaattcccgcatgttgtgggagggacctggtgggaggtaattgaatcatgggggcaagtttttcccatgctgttctcatgataatgagtaagtcttgcaagatctgactgtttaaaaaacgggagttttcctgcacaagttctctctctctttatctgcttccatccatgtaatatgtgacttgttcctcctttccttccaccatgattgcaagacctccccagccacgtggaactgtgagcccattaaacctctttcttttgtgaatttcccagtctcggatatgtatttatcagcagtgtgagaatggactgatacactctgcctgccttctcttctctttaacctcttcctctttgaccatttctgtcactgtttaagtagacatagtctttccatcttaaaattttaaaaatggggagatgaatggactgataaataaaaaggaaaaaaaatctcagaataccatattcccgcctagctattgtctcattgttctcctttgtcagtatttgtctctacttactcacatgtcccttactcccttatcaattccaattctgcttgtacctccttgcccccctaccccgccaccatctgctgaggctgttcttgccaatgttaccattgacgtgcatattaatactttttagttactttatttgactgcctggtagtactgaacttgaaatcacctctcagcttggctctgtgacacaacacccacctgactttccttctctctctcactgccttttgttggctcttcctcttctacctgagggttcccctcagctcagtcctaggtactcttcttttttttatgctgtactcttcttacatgctgctcattcccagccttctcttggccaaccttc

SEQ ID NO: 77485 - DNA, 1870 bp, Homo sapiens
tgtgcctggcccctagtgtttttctgtatgcaattttgatttccattttaagagattattaagaactttctcatattcttagcattgaggaaaacaatatttctaagtttagaaacatttaattcaggctgacataactgaaaacatgaaacagaattcatgcagatcaagcacctcttatatgagttggatagattatttgttatatagctgaagtgttttgctatagaacttacaaaaaagtaagttttataaatgcaaagtaaaacagagggatctataaatgttacttaattgattttctttgcttatttagaactaaagtttgagcctagtgcagtggctcacacctgtaatcccagctactctggaggctgaggtgggaggatggctttagcccagaagtttgaagttgcagtgagctaggaccacgccactgcactccagcctgggtgacagagtgagaccctatctcaaaacaacaacaacaataacaacaacaaaaaacaactaaagtttgagtaaaattaacctatgatcttcaacctttatgtttaagagcctgttaatcaacaattctttataaatttcctattttatacatggtgtgctgcacaaatacctataaatacataaaaagtgaaaaaaagagttagagtataggtatataaagacaagtaggaaatagctagaaaatatcagtcatgtataggtaagtacaatgtaaacataggtgttgtaggatgaaaaacaaggaaatgacaggggatctggttagtcaggagagtcttctgaagccgttaggaagtgatggacaagaattggctatgaaggcacctgaaggtcatctagagtgagagtgaactaggaagaatagagacatgaagaagcacgagtcaagagggaggccctaaagaagctgacccaacaaggtagaccctgtgcacaaggagaacaaagacgtggttggagaggtccagagaacgcagcagataaaagaatttccattttccctgaccaatcaccaagagccattacaggatcctgaggagggaaatgccttaaaaaaaaaaataaataaataaaggtagacgagaaagactgccctaattcatttttttgtaaattattttaaaatttatatttctttgtttttgcagttggggattatatatcgtgatattaagcttgagaatattctacttgattctaatggccatgtggtgctgacagattttggtctgagtaaggagtttgtggctgatgaagtgagtatattttaatttgaagttagtaataacagcatgtaaacaaggatgaaaacttagccgtagaataaacatttagcagaaaactgccctgtgaattctgaacttttgtgcagatttgtccatggaaaatgtagagatttttagtttaaaattcgtatggagccgtcctgttaaaattgcggtaaaccttgatgggtatatcagaattcctatttatttaaaaaagaaaaaagacactatgcatttaactttccccataaaatatgtaaaatataactgaaaaatcaaataactcttttggcccttcaggagaattatggctttgatagtggccaataaagaatcataaagcaaagtacatacagtttacattgtggtaacaaagtaggacatgctatgaaggccctttgaattcgcttgacaagaatgacagagatctactagacccaatttttaaataatattgctggtttttgctcaacatgaattaaaatatggtggctaatgtgcagattttacatttggagaactttaattttcagtattaattagaatttgtttaatattacaaatgcatttaatgacacttaaaattgtac

SEQ ID NO: 77486 - DNA, 1050 bp, Homo sapiens
ctaattctttattcattattattattattatcttgagacagggtttcactctgttgcccaggctggagtgcagtagcacagtcatggttcatggttcactgcagccttgacctcctgggctcaagcgatcctcctggctcagcctcctgagtaactggaactacatgcctggctatttttattttttatttttattttttttctagggaagaggtctggctgtgttgcctgggtttgtctcaaactcctggcctcaagctatccttctacctcggcctttccaagtgctgagatttcatgcatgagtcaccacacctgacctaaaactaagggtgcttttggaaaaaggaaaaaaaaaaaacaaaggaaattttggtggtaagcaatttaagaggaagccagtagctccattagagcaacaagcttaactctgtcgtatgtggacaactaagaagggtcctcctggggtcagaacaaactttaaacactgtcctcaaaagctactcctgcaaatgggcctgaatttattggactagaccatggagtaatttatgctccagagcattattgaaaacaaaatagcgaccagccagcaattagtgggtcctaacagctgggtgtaataccagcaagaggcagacagcctaacagatcagggaaagaaagtgcaaagagagccctgctagaaccattgttcgaatgcccaaggttctgctctctgaggagcaacattggaggcttcacactgcagataaaatactttactaaaatagtcaagccaagttattaaataaagaaaaaataactataaaaacaggctaggtgcagtggctcatgacggtaatcccagcactttgggaggccatgggaggcagatcacgagaggccagcagtttgagagcagcctggccaacatggcgaaaccctgtctctactaaaaatacaaaaattacccaggcatggtggtgtgcacctgtaattcctgctactgagaaggctgaggcgcaagaatcgcttgaacccaggaggcggaggttgcagtgagctgag

SEQ ID NO: 77487 - DNA, 1058 bp, Homo sapiens
taaaatgagtgggtgacatgaggaggaggagatttttacatagtctcaattcctctccctaaaatttaccagttaattataaagggaaacatagtaacttcatagtggagaaacgtggcaaactccactttagtgactccacattaatgatgttctcaaagttaacaccaatgttgggtaaactaacatccgtgcttcctgagatgtcgtagtgagggtaacatcattttattgctattccttccaagaatacataacctgcatcatgagaaaacaaaagataaaacccagattcagagttagtccacaaaatatcaggtctgtcctcttcaaagataccaagaaagaaagaccatggattccagactaaagagatgtgatttctaatgcgttgtatgaaattgaactagaaattggactggaaaaaagtagccacaaagagcattattggggtaaatggccaaatttgaatagggaatgcaaattaggaaatggtatttttatcgtggttaatggctctgatatttacaattatactgtggttatatgcaggaatgtcctagttcttaggaaatgtacactgaaatgtttaggagtagaggagcacgatatctccaacgtattctcagctggttcaggaaaaatatgcacatatatgaaaacagaaagaatgctaaagcaaattaaacaaaatgtaaacaattagtgaattttcataatgagcatatagggattctttgtattgttcttacaattttggaatcgtgccaaaattttgtactacgttaaaggtacagtacttttttcgagaaaaccgcccagggttcatactgcactccagcctaggcaacagagcgagaccctatctcaaaaaaaaaaaaaatctaggccgggcatggtggctcactcctgcaatcccagcactttgggaggccaaggagggcagatcacctgaagtcaggagttcgagaccagccaggctaacatggcgaaaccctgtctctactaaaagtacaaaattttgcacctatagtcccagctacttgggaggctgaggc

SEQ ID NO: 77488 - DNA, 1030 bp, Homo sapiens
gtgattgtttcctacaatatgctgtatttactggtagttgccttctctttatttatattgtatctgtcatcttgtaaatcaggcatcaggactttgaccagtgaagggctagatggtaaatattttaggctttgcaagccttaaggtctctttgaccataggcagtagtgaataaataggcatggtagggttccaataatttttttttctttttgagatggagttcactgtcgcctaggctggagtgcagtggcgtgatctcggctcattgcaacctctcccttccaggttcaagcgattctcctgcctcagcctcccgagtagctgggtttacaggcatgtgccacctcacctggctaatttctgtatttttagtagggacagggtttcaccatgctggccaggctggtcttgaactcctggcatcggtaatctgctcgccctggcctcccaaagtgctgggattccaggcatgagccaccgtgcctggcccaagttccaataaaattttatttacaaaaatggtggtggaccagatttggcctctggtctgtaatttgttgacccctgctttaaagttatctattgttaagtcacatttctggtttttttttttaattcaacaacattaatatcttttaagcctctgatttatagctaatgatattggatttggtggatttttccctttatatttcttttacttttcccaaatcttgtaacgtggagatcatgtctccttttataactttttctgtacctgtgcatggttacaacaagagatataaaaatatttttatctgttctctctctcttaaaactcatatttatttcaactaacactgagagggaattctatgtggaaaataatctgtaaaaataatttttcttttgatgttttctggtttctgttagtggtgattttgttgaaacaccagctgatctatgactgtaataaattgttacattaatcagaattcacaagatgttaaataagcaaatcaccaaagtgtttgtaaaggtaatgcca

SEQ ID NO: 77489 - DNA, 1017 bp, Homo sapiens
gtcttcttccagtacttgcatggttttattttttgcatagagaacttggatccatgtggatggcgtatgacatgaaataaggatccaacttaatctttttcaaatagctaattttcccaacactgtttagttaaaagtccacatttacattgagttgaggtgcttcctttttcctctatgaaattctcatatatgtttgggtctatttgatttttttctgtttggtttgttaagtcatgtaccagtactatactgttttaatttatcaaggttttacaatgtattttaattcttggtaaggttagttgccctctgcccctgatctttcattgcctttatttttcagagctttttggaggactcttcctgttggtttatttttcagcatgaactttagaatcacattgtctggttttggggggaaaaaccgtaaggtattttcactggaattgctgtaaattaaaaaattaatttagggagacttgacatttttatgatattggttattccaattcaagaacatggtatgtttgctgatgttgaaatccttctaagaccttcaggtgtgttttagcatttacttcctagccatgtttcttaactgaatcttagatattctgtcatctgttgcttttgtaaatggggtcttctcttccaccataccttctagctgaaagctattacttttatatattagttctatatcctgctatcttactacattttcctaccttcccacattgctcatgtcttgcccagttccttcttagcctgccctgaaccatgttgtttggtgtatatgggttttctttctctcagttttgctgaaggagtaggtcatggaggtttacagcttttcttgctgtttttaaagatgttttaggagcagatgtggagattcatgtctaggctgccatcatgtgcctactagtatttatggctcactgtagacttcttgatggggcttgttccattgggattaaattcgccttgtttgcacaggcttctccaaatgat

SEQ ID NO: 77490 - DNA, 1076 bp, Homo sapiens
ctgggccacctcttttctcctccatatggcctctcatcctccagtacagtagatcagctttttcatagcatggtagtatcagggcagctagcaactactgccaagagggcaaaagtggaggctgcagggcctcctgagcctggacactggaactcacatagcttcactgtcaacacaagaccagcctggattcacgggatgcagaaatagacttcacctcttgaagaggggaactagaaagaattcatggccatttgtcacacaagtccattttcatattttactaattgtaacataattatgctttacagctgtttgtccaatccaggaatgctcacttggttgtgtccttatagtatcttttaacttattcctgcctctgctgaattctagtagtaattgggaagctagatctaaagtctcaataggttaaacttaaacgttttgagctggaatacaccataaatgatgttatgtatttcatgttatatcacgttaggagaaacctattatccgatttttcccaattagtgattctaagattagattacatagtgacagcctgatcccttcatcataaggttatattttttctcctagaagtgaaaatattctgtgtggtgtttggacactattttttttttttttttttttttgagatggagtctcactctgtcaccttgactgtagtgcagtggtgcaatcttggcccactgcagcctccacctcctgggttcaagtgattctcctccctcagcctcccgagtagctgggattataggcacctgccaccacacctggctaatttttgtatttttagtagagacggggtttcactgtgttggccaggctggtcttgaactcctgaccctcaggtgatccgcacgccttggcctcccaaagtgctgggattacaggcgtgaaccaccacgcccgccctgatactggttttaacataatataacgtggttgtaatgtaacataacatatgaacaccatataattcataaagcttttccttgttcttttttttattcctgcacagtccttcgttccattccattgtatacttaact

SEQ ID NO: 77491 - DNA, 1116 bp, Homo sapiens
taaagatgaaaacttttcaggaatttagaagaggaccatagactgttttaatggttcagttatttgtttgcagtgccctaatgcacactaggtcagtttcccaaatatcgtgctatacacttggtccctatattagtttgctagggctgggtggcttaaacaatagacatttattttctcacagtactggaggctggaagtccaagatcaatgtgccactagggttggtttctcccacggcctctttccttggcttgcagatggccactgtcttaccacctcttcacatgttgtccccctacgcatgtgtgcccctggtatctctttttgtgcccaaatttcttcttcctgtaaggacaccagtcagattgctttggggtccaccctaggggcctcattttaactccatttacagtcacattctaaggtactggaggctaggacttcaacataatgagttttgggaagatacagttcagcctgtaacagtcccaaaaggtttattggttgactgactttatccagctttttgtgaggtattagcaagaacttacatgtctagctcttcaggaaccttgctaacagtttgtctgatgactaagtaaatactataaatctttttttttttaaatatgtgttttcttaaagttttattactgcaaaggcagtatatatgcatacagaaaatacaggacagcaaaaataagaaaataaaaacttattttcactacccagcatgaaccttattatatacccctctgttatcagtatatattcttctaggtctttttgtctgtatgtctatctgtgtgttttatcaaaatgagtttgtcccgtatatgatttgtaagcagatctttccgttaatgatatctacctttcccagctaataaattttcatttaaaacccagttgtacaagttatttattgctgtataacaaaccacctaaaatttcatagcttaaacaatgatttattttctcatgatcccatgggttggctgagcagttctctaatggttagcctgggctcactcacctggtgttcagatggagagttggctgggctgtgaggtccaagatggtttcattctcatgtctggtaattggtgctag

SEQ ID NO: 77492 - DNA, 1227 bp, Homo sapiens
tttgtctacatcagtaataaatatatatatatctagaagttttatctgatgtctaaaatgtcctggttgttccagaattggattgtggttagttgaccgtaataacagctagttttctacagctaaaaatattgcggagagaataacagtaaaagagtaaaagcataattttgtcatcagtggttagatatgtaaacattaagggttagacctagaaatatatttggtataaaattgaagaaatctatcaaataactatttgaactggtaccaagggtactttttcctttaaagagtgtattttttgtgcattaaataaatttagttgcactaaattaccattttgcctgtgtagcattttaattctttttattttttcttttcattttcagcttatggaaaagtatttctagttcgtaaaataagtggccatgatactggaaagctgtatgccatgaaagttttgaaaaaggcaacaatcgttcaaaaggccaaaaccacagagcatacaaggacagaacgacaagtcctggaacacattaggcagtcgccatttttggtaacattacattatgctttccagacagaaaccaaacttcatctcattttaggtaagtgtcagttgttatcagactttttatgaaaacacttttctttgggtcttaagttataatgtacttaaagggcaagatactatggacttagaagaagtgaaatattttgattctcattctttgtggtggcatctcctggaatatcatgcattgctctggatttgaggcctcccattatgccattatggaagaatttacctccttctattccacactcttttcttagtctttttttcttttctttttttgaggcagagtctggctctgtcacccaggctggagtgcagtggcacaatctcagctcattgcaacctccgcctcccaggttcaggtgattctccttcatcagcctcctgagtagctgggactacaggcatgcaccaccatgcccagctaatttttgtattttaagtagagatggggttttgccatattggccagcctgctctcgaactccagacctcaagtgatctgcccgccttggcctcccaaagtgctgggattacagctgtgaactgtcacttccagcctttcctttattaatgttaagaaacatttgaattgttaggggtatctacctccctgagcagtatgcttccattcaaatgtgagg

SEQ ID NO: 77493 - DNA, 1961 bp, Homo sapiens
tccctaaatgattaaacttaaggcattaatataaaaaaattctaagagcttttgagaggagcatggtttaagctgattcacaacagagataagcctgaagtagaccttgaaaagatttaaaatatttattgatttagtccaaatttactaatatttaacaactcatgtggtcatcagaattgacaccagaaacaaataactgatatggtcgtactcctgtgtaccagttgattagctctattctaagtttttagtttgttgatactctttgttgttttgtatatttgtcaaaagttttcataaggcattctttctatgggaaggagttaatatttttctaagttaggatttagaggctgaaggtaaggttttggtgccactatgctgttatagtcagacatccacaaatgcccaaactctgctctcccaggcccctcttttccctcagagtcatgagtgatccatctgcaaggcacaagtagctggtgggaatcagagtaacaaatttaataagagttgtgcaaacatccaacacaccaatgtaaaactcttctgtagaagctgcattggtgcagtagtttaggtttaaggcctaagtgaggtgtcctacttcccttccaactacatctaattataatcttgagaccagcatgttcaggtgtgtgacttagaaggttagaatgggccgggtgcggtggctcatgcccataatcccagcactttgggaggctgaggcaggcggatcacctgaggtcaggagttcgagaccagcttggccaacatggtgaaagcctgtttctactaaaaaataaaaaaaaaggttagaatggagaagaaacaccaggtatcttagtttcaggtttctttaacaaagacaccataaactatctggtttaaacaacaaacatttatttttcacagttctgaaggctgggaattccaagattaaggtgctggcagctccagtgtctggtgagggcccacttcctggtttgcagatggcagtcttcttgtgtccttgcatagggaaagcagagagagaggaagcatagtctgtcctgtctcttcttgtagggcactgaatccatcatgagagtttcaccctaatgacctgattacctcccaaaggccccatctctaaataccatcactttggagattaggattttaacatatgaattttggaggatacaaacattcagatcatagaaccaggtcccaggagaacccctgaatctgcttagctaactactatgtatgttgaagggagaagtgcaagagaatggccaatctgtcaggccatggaagaaatttgaggcaaaaaaaccaaagaggccttgtggggaggctgatcttttaacacagtgagtctacctattaattgtgcccatctggagttttggactcttgaataaatgaattagtcacgtttcttacctttggggagaactagaaagggggttgggcaaaggcatgcctggcataggaaaaggagcaaaagtccttttttcccacaactagactaaagtaccatctccttttgagtgtgaagaaagacagtgtacaattctaacaggtctgtttctggcacagtctgatctaggcatgcaggtagctccacatcatctgagcagcatattttgggctttactaaagcatgtgaatgactcacacatacagatttcagcaattggttgatgttttatttcacctgtagggtgaaataaatgtgtaaatattataagtcttgttctaatactgttaatattattgtagagaagtttgagctcttgttcttaggttaacaattaagagaaatgtgatttatttttagactttcatgcacaaaagctttaatcacaatgacaaaataatagcataggaatgaaaactatttagacacctagactcacatgctcaaatatgtgttttttattgcttaggattctatataatatgat

SEQ ID NO: 77494 - DNA, 1039 bp, Homo sapiens
ttttgaaatctggctttttttctcattcttcccctattaatggttcttaaaaaaaaaaaaaaatcgctgttgacctaaccaaattagagtgtctcagtcttcatgcacttccaccttcttgctgcatttgactgcattgatacttcttttttgatgttctttctttgaatttcatacatggttagttgaaccacttctctggctctttttcttcttgcctcataactctaggtaatcatcaagacttgcctttcctttcctgtggtctcttgaagggcgttcgtcttaaagctttagccattgcctttctcctagtaactctgtgcatgatgtctctgcagaactttagttccttgtctagagctgcctacatgaaagctcttttggggtttttttctgccattcttcaaaatcagtgttgaaaccaaaaaacttccccttttgacttccttattctgttggtaacactgccattcaccagacttgcatttcttatgctttagatatagggctgtcttagtctgttcaggctacaataattaaaataccttagacatggccaggcatcatgcctgtaattccagcactttaggaagccaaggagggagggttgcatgagccaggagtttgagaccagcttgggcaacatagtgagactcggtctctattaaaagaaaaagcccagcaaccttggattaggtaatttataaacaacagaaatttatttttcacagttctaggcaccaggaggttcagtgtctggtgagggctctctgcttcatagatgatgttttctagctgtgtcctcacatggtggaaggggccagcaggctcgctctagcctcttttataagagcactaatcccatccatgagggctctgccctagtgacctaatcactttccagtggccccacctcttaatgtcaacacactggggattagatttcaacatacaattttgaggagaaacattcacaccatagcaggggccaatagggaaaaaaatggaacagaaattgagttaatttatctttgaa

SEQ ID NO: 77495 - DNA, 1017 bp, Homo sapiens
cagaacatcaatttctaaaacttaaattttgttcaaaaccttatccaattttcagttacttgacagatttttttttctttgagacatcagttcatcaattaaaacaaaaaagagggaaacaaagcctaatatgttagtaagaaagttcctacttttggcaaagaaaggagtttcagtcctagcccttattccctattcctcaataaacagtttcactttctccgttccaacacttttggtattaatgaaatctcaatactaacctctaattttcaagttctggtatgaataagatcatgacactgtattgcacatatttttgtctttttaaaactgttcctatgttatgaactatgacaaagaaagtcttcaggggaaaaaaacaactatatatggtaatcctatcttccgaacactagctactctcatttttatatgttcaattccagtcttttcttgttgtatgtgtactctagttgttacattgggcttaccagccccttataatctacactcaatactcaaatctgcagtgccaaggcctgtgcaagtccaaagcctcccctgtctgcccaggtttccctcaattactgggagagctgaccttctcagaactcttagagctacttggtcaccaacgcttttatgcactgcaataatccagtgaggacacagctcaccaacttctacacaagataaacaaaaaccaaacatgttcaaaaagcattccttagcataccagacttcagtgaagatttctgaagctaggcaaaagagtggtacaccaggcaacagttaaaacaaccccctcaaaaggagctggaggaaggaaccttctcaatctgtctttccatcatccaaccgtggggaaggggatctttatctcacctatccctgaccttacatcacttttctgacttgttttctctctcctcttccctattaggaataagaccagcaatcccatccccttgtttgctctacttcttctgacctctcagaccctgtgaacatcca

SEQ ID NO: 77496 - DNA, 1066 bp, Homo sapiens
ttagggagcaacagagtaaatcaaaaggattgcacagaggtttttaagatttactttcaaaagctagttccctcaagtgttagtttataaaccattaactatttgacaggttggagacaatcacacctggaacccgaatctagacatataaagaacagatacattctatctacactcagcacagcattccttatcctcaaattaaggtataccttcatttacaatagaagtcttgcttcagtatttttgcaagcaaaaatttgataacttgtgaatgattaaaaaaaaaattaaaccattacagcaaggcaaacattccagcttccaaagtgctaccaaatttattttgtttattatgttttgaattacacttttcatacaagatatagtttcttatagtccaaagtactatttccaaggataagatttcaatttgatgtaagaaaatatagcagcactttgttcctcctaagtcataacctcatttttccactgcagttctactgtcacttctacacgtaattctattgtgagaaagtactttatcaacaccttttcctttttctgttttccagactacatgctgctaacagtgccaatttggtttctattagcacagaaatgtggcagccttacatcaaataacagtttgtaataacttgttcttacagcaataaactttcataggactacagccaactcatttttcaagaataatcctactttttaaaaaaatgttaactcagtgagctatataatctaatactatgaaaactggtgaccaaagaaactagattcaccttgtcttgtcccagccttcattcagctttcctttcttacctcattctaactgtttaatcaaccacaactgccctccaaccccaattctgaatgtagaagaaaaaagtccaggggtgctgtggtgggacttagaggcactagagagctagagcagtgtgcagccctggtgtcccctcctgctctcatttcaaacatgaagtgtgtaacccactcccctgaaacgaagttaagcaattaatgcttctaattttatggcaagggtatc

SEQ ID NO: 77497 - DNA, 1037 bp, Homo sapiens
tgcctcagcctcccaagtggtcaattaatttttttaattttatttttaaatgatttaaaatgcaaagttgccaaaataagacaactgtcatattcataatctttttgcttattcaaaataaccctttgttcataatcaccaatttttaacattctgtcatatttttctatcttattaatacactcatacatactacatactacttttttggttctagggtacccagatatttagttatgtgtgtgttgtgtgtttctgtgagtttttttggataagatcaatatttaaatcactgggctttaggcagactccctcgataaagtgagggatgcacagcagcattccaccatcaaatgaaagtggtatacactcggttcttcgctttgcttgaaggaaaaacgaccagacatcggattacatatcaacttatggactatcaccaatagtttggttggatggtcagggacttagaaggaacatgattggaaaatcgatgacaagaaagtgtaaggaagaggtatttggctagagctctctaaacaggcaaaaaaaaaaaaaaaaaactgaaggtatttgtattctcctatgtcaatgcccaccaaaggatgacctcagcagagaaggatattaataatcaagtagataggatgacctgttctgtggataccagccagtctctttcccacctgtcatcctatctactgtcatcacccagtgggctcatgaacaaagtggccatggtagcagagatggtggttacgcatgggctcagcaacatggacttctactcaccaaggctgatctggctacagctgatgctgagtgccaatctgccagcagcagagaccaatactaggtctcgatatatggcatcattgctgacaatagtaagccaagctaccatgccaggttgataacactgaactgcttttatcatggaaggggcagtgttttgttcttgctgtaacagacacttactctggatacagatttgccttccctgcacacaatatttctgtcacaactaccatccatgg

SEQ ID NO: 77498 - DNA, 1619 bp, Homo sapiens
tcttttagcttttgaaatcttgaggacaagagatcagccagttatcaatgcagggtacactgtgaaaagagggcctatggcagcatttggaaagatccccattgcttgtgactataggacagattatgccaaaaatcaggctgaagatttaatcataagggtgaaagagctgtataccttctgtggtgggtttgtactgtgtcaactgggctaaactggaattatgtttcccagaactcccttctaggctctagattagcactggccatgagacattttgagtgagatttggaagacagaagtgaagcagcagcagctggatatattttatggctaaagattggtgctggtactaggcactgttgtaactcccacacatgattgctaagctgctgtgtcatattgttggtttggagcagtagccaggtctgcggctccttcagctcttgttgcatcactgccatcagcttctggcaattctgggccagtgtgtacagcttttctgcaggttatctgaatcattgagtttggaagcctgaaggtggtgagagacagacatggactcttgtttgtcctcatgggttccagattgtctttgggattccagtctattcttacttttttctattttgtattactctttcctttacaactccagatgtggaagcagtcttatacagactctttaaccaactcccacacctgtgtgaggccaaactcctatataagtctcttattgtataattcatagtggtcctacctctcatacacccttgacaggtgttcagggccaaagtctgaccctaacatgggaagagtaggaccctgatgaaatctcagaaggagacttctaagtggatgacctgagaatcttgaactccttaattttcctgagtcctctggataggcaggatcaacaccttgttagagagaataacttttccttgtttggaaaccaggcagagatcacatagagatggatttcttacaaggtgatacttgttctccttaagctctgtcccatctctcacccctatttcctccagaacaatagctagacacaatctcagcatagcctaatcagggatgtttttcttattctgggagtaaatactcaagcacgtaatcccaggacctggctaatatgtaccagtaggaacagaaggaacatttagggaggtggatcttgcaggtcttgcctggagtgggctggcggaataataaggatgaataagggagaatttattaacatgggaacgctattcgtaactcaggatttgacatcctaataacttggtcctaggatacactggtgggatggtttcttgaagcttggacatgagtatgacctatagtacattagataaatatgcaagaacttctttggcagagtatattgagatcagaactcacagagaagagagagttttagaatggatttactatatgagactggagaacacactatctgaccatacttcttaggaaggtccaaagaaaacacttcattcaccaaggtaattaagaatgcactggtgaggggacacaggctggagttgataggagatgcttccatggagctatgttccctagtatccatagcaatgataggattttgg

SEQ ID NO: 77499 - DNA, 1006 bp, Homo sapiens
cttctagcagcccactaaacacaaaacatttggatagtccacaggcaccttagactctgaggttaataatactttttcttccagctttccatgttttattttttaatttaattcaatttaatttaatttaagaggcggactttcgctcttgttgcccaggctggagtgcagtggcatgatctcggctcactggaacctccacctctcgggttcaagcgattctccggcctcagcctcccaagtagctgggattacaggcatgcgccaccacacccactaatttttgtatttttagtaaagatggggtttctccatattggttctaggctggtctcaaactctcgacctcaagtgatctgcccgcctcagcctcccaaagtgttgggattacaggcgtgagccacctcacctggccccatgttttatttagtggcatgccattcactattctgccaggactctagttagaaacatccagacttcttcctctctctcacattctccccacccaccaacttactctcctagttgtgtcagttataactctgaaatattaatacctcctttatttgtttcttgctcatcattgccattaccatagtctaagttcagtgtctaatctaatgataatagctatcatttatttagctttatgtgtcaggcctcttccaagattttgcctatcttacttaattttcacagcacacctatgtgatgggtactgtatttgacacctgtggtgcgcaacctcatccttctatctgccttactctggagtcaagctgtggctgtgggctgtgacaaacagttctgtttgggcttcagctcacttcaaggtgatggcacctggttttaagcacatattgctgcacattgtttactttccgtcccaggcttttgactcctccaaggcttagttctctggtgggaactggctcaggaagcataaatgtgcatctcagaaacataaggaccttgatgtcccactggggcaaccttcaactaa

SEQ ID NO: 77500 - DNA, 1041 bp, Homo sapiens
gttttcttattgactcagctttcatactggctcaatcatgtaattccaaaatcggttggatatgtaaacactgccgttttatacaccagaagtacagtaagtcttcaaggtaagtgacctgacaataagagcaaagtgggcagcattgttttaaagtacacagatattaaatataacttggttctgcctccagcagaatgctgtccagagacacggtttgaggcccaaccacaaatctaaacagcttcagaatagcttagcacctggcagttaaaaggacttgaatgtgctagctatttagcttatttttaagttcttatgtatgccctagacttgggctaattggaccctgtagacaggagttaaagattttagatttcagagttatgtatgtgttgtcaatactatactgggcaaccactaaattagagcttatctggtaaattgctttataaataatttatttccgcctgacaaaaagaaaaaaataatctcaaatagcagaaaaagatttttttctctctgcatacaattgtcaccttttgactgaagctaaattagtctaagaagcttatgttttgtgatgttgagtaaaaaagacaagggaaatgaaaaaaagttgttgtcccagtaaatgagagactaaatacatatttcctagttggcatattgaaagcgaatccaagcctattaaataaggatgattgagtcagattgtgctttgcacctgtttttgaaatcttctgcttcctcagagactttactccatgttgttctccccttttcctgatcctcaggttctccttcccacaaacacatttgagtctttttgtaaaaagaaaaaagaaaaaaaaaattctctgtcgccctctagttatttctattatccctccttccactagtttttgcaagagcagttgataccagctgtttctacttctttatgccccattcactggatctgctggaagatcaagcttccatctcaagcactccactgaaactgctttcactaaagttactaatgtctccctgttccta

SEQ ID NO: 77501 - DNA, 1023 bp, Homo sapiens
gtataggaaaactgagtcttagtgtgctcaccggcttgttcagggttactcaagaagtaagtagaagaatcggttgtgaaactgaagcagtttggccacaaggcccatctaaagcactgtgcttagtgggatcagtaggatatgggtcaggagcttgtaaaagaggtctgggttgcagattaaaatcctagcatcattgaccattagatgacatttaaagccaaggtagtaggttagatcatcttaggagagattttagagtggagaggaagaagactcagaattgagtcctgaaaaactcccaaaattaaaggaatcgatagaaaaagagttgctaagaaatgatacagaggaggaacagccagaagaaaaaccaggagaaaacctaggaaagttgtggtgtttggaagctaaggagaaaagatgctttagggggtggcaggggatcaatttgactgactacctaatggcctcatcaagaacaattttggtggagatttggtgggagaagccggattggaatggattgaggagtgaatgcaggtgaagataacttttgagagacttggttctggaggatattaaagagagggacttagccagagagctatatggggttcaggaagggtttatttgttgtgtccttgttttaagatgagtgatggtagagcgtgcttaagtattactaggctggacctagcctagtactacagtttcatagctattaaaactgtacaagatgggatagacgatggtgtcatggtcctgagaagggggatgggatgttgtgcacctggggggttaggaggtccgataaaagacttgcttttattatttaatgggaaggaagaggtagaggatacaggtccatttgcagatttggtggcaggaagatatgggagttttgagtttcgagcatgattctttttcttctcaaattatgaagaaaaggcaattctttatccaaaaagagaaaaatagcatcattgttttttaaaaattgtgattctggtcttcaaaaaa

SEQ ID NO: 77502 - DNA, 1365 bp, Homo sapiens
agttaagaaatacacagttctgtgagagaacccaaaagggatgatggcaagcttctgggaagcagtcgtgttgaagctgaggccctggttgttgtggggtgaagagcggggaaacaaagcctttctatcaaaggaagcaacacagatggtcttccaacacaatgggaaatggcttggcacactggagttactggaaggaaggtgtctggcttgagtgtgacattcaagcaggagagtcacaggaaatggggctgagaagggagccagggccatttcatgcaggggtttctagagtttagacattgagtgtcatgtgaagccattgaaagatttccagttgaagaatgatgagattagttttgctttgtaacaagatgactcctatttctgtgaggagagtgggtatagagattatatgaagggaaaccaggtaggaaactactgtggaaattcaaatggaatataaaggtttagaataggtaacaattgagattaacaattgtgaatgtgtttgagattcacttaggaaataagaatcagcaaaggccaggcgcggtggctcatgcctgcaatcccagcactttgggaggccaaggcaggcagatcacctgaggtcagagattcgagaccagcctggccaacacggcgaaaccccatctctactaaaaatacaaaaattagccaggcatgatggcaggtgcctgtaatcccagttactcaggaggctgagtgggagaattgcttgaacctgggacacagaggttgcagtgagccaagatcacgccgttgattgcactccagcctgggtgactgagcaagactccatctcaaaaaaaaaaaaaaaaaagaatcagcagaacttggtattgtattgacatggggttttgtggctggaacaaatgtgtgtttgaagatgctgtttattgaaatgatgtaattattttctattgctgcataacaaattaccacaaatgtagtggcttgtaatagcatccatttattagctctcagtttagtagattataaatccttatgagacctaaattattgtgttagccagactgagttcttgtctggaggctgtgggtaaaaatctacttccaaactcatttttgttggtagaattcagttcctgtatttgttccccaaggttccagtttccttgctggctgttagctgggggttatcttcattcttctcatttgtctcttccacctttttttttcttttttttttttttgacacgtctcgctctgttgcccaggctggagtgcaatggtgcggtctcggctcactgcaacctctgcctcctgagttcaagcgattctcctgcctcagcttcccgagtagctgggattacaggtg

SEQ ID NO: 77503 - DNA, 1062 bp, Homo sapiens
tgtaagagggagacaggagggccagagtcagagaaggtgatgtgaagatgaagcagagaaaaagaggaggagatatgaggaaacagatcagtgatgccattgctggaagggaggccatgagctaaggaatgcagacagcctctagaagcaggggaacagattttcacctagaatatccaaaaggaacacatctctgctgtcaccttgattttagctccatgagatccagtttcagacttttgatctccagaactataagaaaacgaatttgtggtgttagtaagccgtgaggtttatgttaattttctaccgcagttacaggaaactaatacaacttactaagattggattaaccaggagataattttgccccaagatatgggtgactaagggtgataacagaatgtgaagcagtcagttatttaaacaactgttttgccagaaaatggtaacacgtgtcattctttgtagaagtagaatggtgtcttctctaatgaatctgcagggagacattcctttctgatcttagcaccaaggctagctgtgctgcttttgaccagctgttctgtttttcataggagtgctctgaagtgggtggctgagcagacctcttaccaagttggtggttagaaagtgtcaaatctcaggcctacaccacttagaagtatggtttggcatgcatattgagtcttatcctggcagtgttttgtgcccttgttctttcttcttattttcttatggtttaattaatgctggtaatttgccttacatcttttctggaccaaggcaaggattaggtaaacatataattaaataagtacatttatatataaacataagtagtagggaaaatatgggaagatatttgactttatgtccagtgttttgcttcttcttcttttttttttttttttggagacagggtcttgttctgttgcccaggctgtagtgcagtgatgtgatcacagctcactacagcctcaatgacctcctgagctcaagtgatccacctgcctcggcctcccagagaagtgctgcgattacaggcgtaagccaccatgc

SEQ ID NO: 77504 - DNA, 1030 bp, Homo sapiens
tactgagattacgggtgtgagccaacctgcccggcaaaattaatccatttgtagcatgcatcagtacttcattttgttgttgttgttgataaattgtgttccattgtatagatataccaagttttgtttatgcattcaccacttgtttgaaatttgggttgtttccaccttttggctattgtaaataatgctgctttgcacatttgtggacaagtttttgtgtggacctatgtttatttctcttgggtatgtaacagcagtaaaactgctggatcacttgttaaaacaaagctaaacaaagtctgggtttacctttgtaagaaactgccaaactgttgtccagagtggctgtatcattttatattcccatcagcaatttatgaggcctccagttccttcacagcctaaccaacattgtctgtctttttgcttatcatagggagtgtgaagtgattttccatttccctaatgcctaatgacaagcatcttttcatgtgcttattggccatttgtatacctttggagaaatttgattcagatcctttgcccagtttaaaattggctagtttgtctttttttattattgagatatgagagttctttatgtattttaggtacatgtctcttatcaggaatatggatttgcatatattttcctccataaatgagctgtcttttcacttttttgatggtttccttaggagcacaaaagtctttaattaaaaaaaaatttttttttttaaataatagagatgggttcctgctatgttgcccaggctggtctcgaactcctgggcttaagtgattctccctcctcggcctcccaaagtgttgggattgtaggtgtgagccactgtgcctggcctaaaagtctttaattttttttttttttttttctgagacagagtcttgctgtgttgcccaggtggaatgcagtggcatgatcttgcctcactgcaacctctgcctcctgggttccagcaattctcatgcttcagccccctgagtagctaggattacaggcgagtgc

SEQ ID NO: 77505 - DNA, 1028 bp, Homo sapiens
gtccactggaagaactgggttgcatcaggaaccattggaagcagaaacttagcattgtctgtattttgtccaccttgaatctctgcttgtcactatgtgatggctttattcttccccactactgtgccacttttcccacatgggaaagatcatgctgttgatagactgcaagttttacatcctacagcttccactactgaaaagacaccgccgccttctcagcttcagttataaagatctcagggaaggacttttttggcctgcctttggtgaggtatccacttttggatcattcacctaaagccaggggatgggatcatgtttttgtaacatggcagcaatttctgtaaacatggatagggataaaactaaactctaagaagaggaggagttgctgggaagacatttacttagatgcctgttattaggagagagagcctaacattgaggagaaggtcgaggaagtttatgtattgtggtgtaacaaattattccaaaccttagtggcttaaacaacatgatttgtgtgggtcaggaatttaggagtggcttagcttattggttcttttttttaatcctaagtgaattaacacaggaagcttcttgattctaactcagggaccctcatgaagttgaagtcaaggtgttggccaggactgcagtcacctgaagacttgtctgggtctagtgattccccttccgagatggcttactcacatgttggcaggttccttgccatgtgggcctctccatagcgtggcttgagcattctcatgacaggcagctggtttccccaaaaacaagtgatctgagagacagcgaggtggaacctaccatgccatgtcttttgttgttgttttgtttttttggagacggaatctatccaggctggagtgcagtggtgcgatcatggctcactataatttcaaactcctaggctcaagagatcctcctgcctcagcctcctgagtaactctgggactacgggcatgcaccaccacacctggctaatttattatttttttgta

SEQ ID NO: 77506 - DNA, 1096 bp, Homo sapiens
caaacgttccaatcatccctccccgcctctttcggcagtagccaatcagagaccccgagcgcctcctgactactagacactgtttactaacagatcgaagctggggaataaggggtgtgaccgttctggggaggtcagggaagggaaggtcttgactgcgagtgcgcaccagaggaaatgggcggggcagagctttgggtctcaccaatcggagtggcggcgctcctccctctcctgcctccccgccaagcaacaacaattcgaggagcgaggcggggaggctcgtgaaacgtcacagcgtactgcccaatgggaaccggcgttggcagacgcgcgcgccctgtgtccaatcagcgaaggcggctcgaatggctcccttaccttgctggctgtgggcggagcggcctgaggaggcggcggtggagcagggggcggtttggttgcgcggtactagcggtgcccgccgaagggggaggaggcgaggagcgagccgtgcggccagagcgggaaagagactcgtctttgcgtccgagttctggagccgccgcaccccgactcctggggccgcggcagcggctgcgaggggacgggcgtccgctgtctcctgggttcccctcgtagcgacccgcgggatcggaaaaaaaggagaagatggaggaggagggtggcagcagcggcggcgccgcggggaccagcgcggacggcggcgacggaggagagcagctcctcactgtcaagcacgagctgcggactggtgagcgaccccgccctctgccggccgggcccggcgcgggggcgcgcctgagggcacgcgggtgcccgcgcggggctgggggcgcggggccgcagccgtgggcgcggaggggcgggcctggggcggggcgtcgcggtcggggcgcgtgccccgggggtcccgggaggtgggggcgcgccttgggggaggcggccgaaagttttccccagcccgggaatgagcggcgggcaccaggcatcggggccagcgcagccgccgaccgctgcccgtggcacgcacctccgaggatgtcgctgctcccccttcccgcacaggtgacacacgtgtgtctgcgtcctgtca

SEQ ID NO: 77507 - DNA, 1065 bp, Homo sapiens
gaaatcaacttacatttacattaaaacagtacataaataaaggaaagagaaggcaataaccctcagactttggtctcctggctaaaatgtatttgcaaaacagcacacagcttgcacctgctgccctctagggtaataatgagggtgggtggaggtacctgtggggtggcccattccagtgggtttgggcaaatgaggacggttatcagaggagtggctgctattccccacaaggttatggaaagcttctctctttggcctttgctgtgtgccaggcagaggtgctaggtcctctctgcagtgtgcagtgaccctggggaaccacagacattcaggaccctggctggtagctcagttgcttggctaaggtggtcaggcttgccaggcccaggcgttaggcaagcccaggcctgacctgccaaagcagctgctttaagcctcagaatcttcactgggcaatggaatcctacctcacctgactcctcccagcaccccctcccactagcctgcggggactaagtgttctctcccctgtgtccccacagcactttgttcccacagctattaaagtactcactgttggctctaagtacatctctcctccttccaaagcaatattctttttgttttgtttgctagagatttcatgtaatctcaaattctttgttaaaatggccctggggtttacattattttctatctaggagattagagttgaaaacataaattggtggtttggaattccactgagttcttctctttagatagaattgtggaaagtcaggcttgtccagaaccctcactatgggcactgtccttgaatcctgctctcattcattctgcagtcagctagtcatccaacaaacacttactgaactcccacctttgtgccactatgctaggcactgggtatatttggatgaaaaggaccttggctatgctttagagaccaacacaatgtggttatctagctctagattttgttgacatactaaaacctatctttttttttttttttttgagacaggtctcactctgttgcccaggctggagtgcagtggcgtg

SEQ ID NO: 77508 - DNA, 1032 bp, Homo sapiens
tgcaagctccgcctcccagatttgggttcatgccattctcctgcctcagcttcccagtagctgggactacaggcgcccgccaccatgcccagctaattttttgtatttttagtagagacggggtttcaccgtgttagccaggatggtctccatctcctgacctcgtgatccgctcaccttggcctcccaaagtgctggagttacaggtgtgagccaccgcaccaggcccaacaaagcactcttaaacttagtggcttaaaaccattaatctcacaattctgcaatcaaggttggtcttagcagggcgcttcttctgttccatgtggtgtctgttggggatagaccatccaagatggcttcttcctgacatgtctggcatccagtgggacatctgagactggctgaacatttcttctccatgaagcctcttcaatagtggtcgccaaacttctttacatgggacgccatgagacagattccaagagaataagtcctaatgcccaaacgcataccaagcttctgcttgcatcacacttactaatgtcccattggcgaaagcaaatcacagggccaaggccagagtcaatagggaaggggctacaatggggtgtgaatactggggagcatagtttatataaattggtgcaaaagtaattgcgatttttgccatttttttttttttttttttaaataaaagtaatggcaaaaactgcaattacttttgcactacctaatatatacagagagagccaccaaggtattagtctacagcaacctgttatatacgagcagcgaacaccagcttaaccccaggttgacgactgcttgctaggaccctgggaggcaacagagcagagcagccagggtcttggagcctggagggagacagcctgagtatgagtcccagcttcgctctttactagcaaactgtgacctttctaagcctcacctacacaatgaaagtagcagcagaaccttcccagtgggactgtcgggaggggcacctgagctgttccccgctgccgtgaaatg

SEQ ID NO: 77509 - DNA, 1048 bp, Homo sapiens
tgggtggatcacaagatcaggagttcaagaccaacctggccaatatggtgaaaccccgtcccttctaaaaatataaaaattagctgggcatggtggcacacacctgtagtcccagctgctcaggaggctgaggcaggagaatcgcttgaacccaggaggcagaggttgcagtgagccgagatcgcaccactacactccagcctgggcaacagagcaagactttgtctcaaaaaataataataataaataaataaatacaaataaagaaaattcagcttgttcctttcctctcctctcctgctgagctttttattcagtagttcttggctggggccaaagaatttgtgtttctagcaagctcccagatgatactggtgctacgggaccgtggaccagtcctgcagatagttctgcttcctagaggcaggctgacagacacatgacttttccaactccatgatggaatcttgttttgctgttctaggtgtttctaactggggaggctatgccctggcctgcgcactctacatcctgtactcatgtgctgtccacagtcagtacctgaggaaagcagtcggaccctccagggcacctggagatcaggcctggactcaggccctcccgtcggtcattaaggtaacaaaccccagccagccgctcgcctggaagcagcttttaccctggatgagcagcaggcctgaggtcccaagccgtaagccgagggctggcaccctgctgcccctcaaaagccagaggcagagccagccttgaagcagaggtctcctggattgggtgccctttaagctactcgcagttctgaatcgtgtggcaggcctgatccaagtgaccattttccttctagtttgactttgggtgagttgcttagcttctctgagcctcattttcttcatctgtaaaatgggggtggtcagcattgttgttggaggaaccgaatgcctcacccatggtgggtacttcatactgttagtggtgggcaggtgtcctgtcagccccctccaaggaattcaccacccagcgaggccactaa

SEQ ID NO: 77510 - DNA, 1098 bp, Homo sapiens
cctgcttagctggctcacttgtctttgatccatctcctgcagggtctgtgtggctcattctcccctcaaggtgccaaggtctccagcctgcccttgttatccatggagcatcctatgcactgttcaccaggattacctcccctcaatgttcttggaaatgcccagtgatgctcctatgtcccacaaatccattctggttggcaccaggcccatatctcgccttaaatcaccccatcattccctgcatgtcatctcctatctccctgtaactagcttctgcaggctgcagccacactcaccatggccaccccatggatacaggtgcttcctcaaagcacagtcaaggctaggataaaagaggaaagctgagcaaaactactaaaggtctgagcaggaatcctacagtggaatggacaagcatcaaaactggatcctggaatgcagagctcctgtggtccttgggctgggccctgctaaggggtcttctcccttgcatcagagcccctgatgttggaccacaggcctgcctctccctgtagcggggtcaggggtttggatgtgtcactgagtctaggacccttattctcagctttctctgggctcaacctggtgtcagcctctttaccaaacaactgaaatcctctccccatgaatttctgcccacagtgaagacaacccattacatggttatgcctcagactcctccatgccagaagagaaccctgctgttactactgcaaaaccaaagacccatttgtgtcttcccccaaaacatgagtcagaagcgtgctggcagctttaccatggtgagggcttctctcttctagccatcaagattgcagaaacgtcggggtacaatctcaatcagaggccctcgctacatggaactctgcagtcccaaatcagggacaaaaatcctaattggaggacatgtggtcagggaggctgcagagctgaggtggcttcactgagccgtgagatgccgcagatccccatgtggctgagttctcaggatgctggaggtgtcagccctgctgccgcaccagcactgagcacagcccctgcctgtgggaactcccctagaatgacaaagggaga

SEQ ID NO: 77511 - DNA, 1499 bp, Homo sapiens
gtaacgtgttttctgtgtctgccgcttccagcagctgatatctttggaacaaataatccacgtcagcatggggaccaattaggatgcaatgacaaactgacttcccccaaagcagacactactccagtatgtcccagtagaacactcatttgcaatgtgttgagctccgttaagcacacacacactcacacaacaggcttacgaggctcaggcctggcgggtcagaaagcccactccctctcccaaggccactggatcccaggagaagcccagactggcgatactacaaaggtctccagggcctggcagaccccagagtcaggcctgctgttaaaaagtgagagtgctgctgttccattcctggggtcccaagcacttccctttaccccaggacccagggcagcctgcagggcagctggcggtggccttggccatttgcccccagcctccagctggctcctgagctctgcaccagggggtttggggaccacacaggcacctgccttcctagatttccctggctcacttttctgcaaacactggatctgccaggcctggggattggggggcaggaaagaggcccccatccagccccctccaggccagtgtgcacagtgcaccgaggggtcatccgcacagagcgaggtgcaagctcgatgtgtaacctggctgcggcacccgacatccccggtctcggggtgttgatttatttctgaataactttttgggtatagaaaccaattttttttaatatatgacatgtatatgtacacactcatgtgaaatatgtatactttggggggatctatttatgttccagtgggagtcactctcttctgtcgggaatcttatctgctgctttgtgtctttggtcagattcctgacaatttagtttcctgttgtaaaggtgcttttcctggggtgaactaaacctattgattttttttttttaagatttttttttccttttgatttaatatactgagaaagaaatgggagacttttgaatgttaacaagatccattttaggagtgtttggggttgtgtattaaatagccattcattctggaactcaaggacaggactgtaataaaatggaatggaaccgaagtgcgttctggctttcctcactgcacattgttagcatcgggtgggcccctggggacttggggctccctgcgcccctccttatgcacccctccctctgctccccttcctctgtgcccctgcacccctccctctgcgcccctccacccctccctctgcgcccctccctgtgcccctccctctgcacccctacccctgcgcccctccacccccctgcgcccctccacccccctgcgcccctccaccccccctctgcgcccctccctctgcacccctccctctgcaccgctccctctgtgcccctccctctgcgcccctccacccctccctctgcgcccctccctctgcgcccctccacccctccctctgtgcccctccctctgcacccctcc

SEQ ID NO: 77512 - DNA, 6714 bp, Homo sapiens
tggatttctgtcacaatgcacatggctctaccatccccagccctgtgccaaactgagaattaagttctagctcctgagccccaaatatgattaccatggtcatgagcgtcattgtcctgaaccccacgtgagtggcctagcttcccagactggggaagaacatcccagcccatgttagggaaccagggacccactgggggtgtgtgggagggctggctatgtcctaaacatctacttctaaccaggaagaaccactggattggagccaaagccttagtcaaactcatcaaaccaaagaaagagggttcgagggaacgcttaaaatccaccgtggacagccctccctggcagctggagtcctcagaccccgcctcgccggcggcctctcagccgctcagatcacaggccgagaaccccgacacccccgcactgggctccaactgtgcagaagagcgcgacgcccacaacgggtctgtggggaaaggtaggggcggccgtcctggccgtggtcgggtgaggaagggggtgtcctgaagggtcccgcaccggtggctgtgcacacgtgtgcaggaacgtgccaggggtgggtgactgcatgtgcgccttcgcttagatgtgttacgagccaagtagaaattcagcgtggcgaccgttttgtcccataatgcttttgttactttattttatattttattttaatttttttgagatggagtttcactcttgttgcccaggctagagtgcagcctggctgcctcccaggttcaagtgattctcctgcctcagcctcctacgtagctgggattataggcgcccaccaccacgcctggctaattttttgtatttttagtagagacggggtttcaccatgttggccaggctggtctcgaactcctaacgtcaagtgatccacccgcctcagcctcccaaactgttggattacaggcgtgagctgccacgcccaaccacttttgttgttttagaacaaaaggtatcattcatcatgtagccgggcagatatctcaatatccaaagctgacattcgtgcaggtaccatagagacaagcgacatagcttattttgggctgcctcgtatgtgccagatttgtagaaagctgctttgtgcagggagatcccaggtgcactcaacacgttctccatgtatataagacctcccgaaagccttgggtggtttatctgttaccactttgaaaggtgggttaggacttcttcagcctgatctggccttgtgtcccaccagccacaggacacactgtgccttttccctaagggctgtcctttggagtttgccagaggttctgaaacaagaacaggatttctcatcatgtatgctgtatttcatcaactctcaggagccatgaaagctgcacagttactttatataccacgaggcaatcaaacggtacagggccaccacttcgaatttttcttacgctcttgttgaaagagcttttctaaataagaattcgatttttgtacacacacgtaaaaggaaaataggaccaagatgagttggttatgaccatgtcagttttgtcaccgtggccacctggccagtggtgactgagacatcactgaaattgcctcctaatttccaagacgttaaaggtgtcttagaatcgattagacacagcatttaccttacacattgttaaattttcagctttacctttaaatatcattttggggagattatttatcccaggcctgcatcccaagtcatttaaatttttacaaaggacactaggactttctgaagacccagcctatgcctgagacccatggggtcttggaggcggaggatataacactgaagaccagcgacaggctaccctctgagtgtggtgtgtgcacaagcctttcagggggcacattcacaagtacctgttgtgtccccttcagatgcaaaaaaaaaaaaaaaaaaaaaaaaagacctggtgcagtggctcatgcctataatcccagcactttgaggggccaagacaggaggatcacttgaggccaggagtttgggactagcctgggcaacacagggaaacccccatctaccaatatatatatttttatttagccaggtgtggtggcacgtacctgtagtctcagctgctcagtcgacttgagcccaggaggtcgtggctgcagcgagctatggtcataccactgtactccagcctgggtgacagagtgacaccccatctctaacaaaaataatgttcacgcacattgttcagggactaacacactgtcattctttatggggataagattagatagagtcagcaccgtaagacagggtgagaaggaaaaaaattagaggcctcacatgcaagtaaatgagaagcttaactttttttaagctagaggggttctgttgcctcaggtttttatattggctcctgtttaatttttggacatttgtcatctcaacttgtattactctttaagtggaattaattaactataatcagtctgagttaggaaaactttcagagaaaaaaatgcttgactggtccaaagtgatccgtgagcaagcaggtctgtaaaccatgatcatgttcactagcagccaccatgtcttgggtgctccctctgggcccagcaccctctaactactttatgtgctttatgcatctcattgaatcctaacgaccctatcaaggcaggtggacgtggcctcccctgtgtagaggtgagaaagtgaggctcagcagtgtaaaacatttgctttgggtaagtgggacccaaatgcaggtcggccgcactccggagcctgagctcttaactgcatgcacttaactgcatggactgcctccagttaaagctctctgggtccctgaagatgccgaacaagagcctagccctgaactggccacaaggacaccagccttgaataagttggtcccttattctgtggtgtgagccactgtggccaccaggtggtgctgtggaggaagaaataatggaaatcctggtatcaactttaatcctacatcagaaattggttaggtcgattaatgttactataagacagtttaggaagttagcccaattgtctgctttgttaagacactagaggctaaggagtggaggattggagtggaggatgtatatagaagatctaaaaggaaatcatgattcttggtgttgaagggttttttttagtatgcaaaggaggtatttaaattattttaaaactcatcctgccgaaagattattttagagatacagaatcattagtgaatacttcaggtagagtatttgattacagcgccctgaaacggatcattgaatgttcccaaggtctttgagtgggaacgggaggattgtgtgagctgagctgttagggaccccatcattaaaatggatgagtaagagaagttgggccctaaattaataagcattagtgtttaataatttggcacactgaaaccgaaaaatcatccagaccattggctccttgggcagtatgtaattctcctcacacgctgaggaaataaattgttggcgttcaggtgcctttaaattaattgagtcagagcacagatgattactgagccctgattctgttcttgagtactgtgtactgttttcatctttcctgggcaagacgggattctgatttcttaagtacatttagctaatttcgattcatttgtcattattgttcatttcatttatttgtgttttctttttccttcctcctttgggttatccgattgataacaatttagcacctccgcgcaaaaagagtccctttttgaaaagcaaaaacaaggacaaagacaagtctccaacgacccacccagctctctctaaacgcctgcggttctggtcttcctccgacatcccatcctctcctaacgagcctctctctttctccgacattggagatttctaatccctttcctttatcatgtgtctgtattgtgtaccctccttcatttccgaaattcaaacaaacaaaaaaagccagcgtctaaaaggccagatggccgatagcggacccctcctcctgcccccaatttcaagcttaaagtagccagcgtggattctgatttcaaaatagaagatgagttgtcacactccctggaccatttcttcagcacaacacagttttagggggagcctcaggatatacgtgcacatgtccttgggccaggatgtccgtactaagtaagtcgagtggccgtgcccccctcccgtctcttgcacctgcgagcttatgttttgcccgtgtgtcaagcagcactggcgggtggttgctgcacttcctaaaatgtacagcctctgtcaagtgagggttttttttaagacttatttttaagcagctaaatttaaaactgctgcccttttctcctcttcctttgtcagagcactgagttgtgggccttttccggtaaggcccttataaaatgtgttctgttttgaaggattgattgctccattcaggcattttgactaattggattgattttgcccagacagagttcagcccagagtgaagttttatgactgtgctgtggttttatgacatcttggatgctgaagttaaaacagcaggagacagaaagaacatcagcacacaaatcatgcctcgagcaagggaaaatgccagccggccagctaggccattacctatggagcatttcctgtctctagccatccctgtaccacctccgttatttttgtcatatcctgataccgtctatgattacctacaaaaatatgattacctgcatgttttcccttacattgattcacagtttgtagttaaatgtattaaaaggaaagattagtatcagtcctgtaagtggaaaacacacatatcatcataaaaacaaggtaatcataagaataaacacataattactaaaatatgagagtcggttaatgtgccactgacttcatctcatgagcctcgctctgggaaccctgggctgccgtggtgccgggtcctccagacctgccttccgcgcatgctgttggaattgtgctttctctgttcgctgctcatgctaactgttcactcatctctgcctcccctgtggatcctcattttagcttcacctgtaggatgacctgtcccgattcattccacctgtcccgattcaggcagacttgaatcttgcttctcatcaaggttatctttcaaaatccaaatttccccttgatttcaaatcatcagctctgggcacttaaaactgcacagtgagcccagactttgagtggctgggagggcagacggcttgatgggtggagaagccgaactgcaacagtgagtcctggctctgcacacggagtgggacgctctgcaaagtgctttgtcagctcttaggaatgccagccatgttcatttttatcttgtgttgggagagcctgtcctctttcctgtggggtacttggttttatgggctgtttttcttttatgattttatatgtttttatttaattttgaccagagtttatgttcatggtagaaaagttagagatttcagaaaagcacaagacacaaggtaaaaattttcttgcagttcgtctcaccatgcagagattaaggcttccctttttgaaaaaacagaatattgtgaggttagcaataaacttctatttgaagtccttagtgagtcaggttagcaggaccttcggatcctcagctacaggcttggatccttggaagtcagggattggagttccggacagtgttacacaggagatgtgtcctagagtgaatatgtgtgacttttaccaacagtttatcccctcaggggctccctttgtctcctcccagcctctcagggctggcagtatgaccccagcattaaagccagagccatcctcatggggcctctgacaccacctgaagccaagccctcttgcccccacctgccccgccaggccccatttaagttgcagcccgagagctgtggcagccccgcttttgtctctgtggtcctcatgccctgctgccctgcttctaggccatggtgtggtttcccagcctgggtacaggacttggcagcctcatttctcaatgtcctcttctgcctcaggccctggggatctaaaaccaaagcgaggctccccacacagaggcagccttgaccgcacagatgcctccaccgatctggccatgaggtcctggccctcggagctgggctcccggacttgctcaacttcagccaccactacagccccttccaactccacccccatcgcccggcacccaggccgcaccaaaggtgagtcacaggcccttccagagccatgagcgtcgggcctagtgtccttcctgaagaccccaggctctcggaaatcagagaggttgctctccctctcagtctgagaggtggtgagtagaggggtgaggctgctgacaggctttggtggcacagatgcagctgtgcttaccagccaaggactttgggcaggaagcccttcagaggcccaactgcaatggggcctcagaacccactgccaccaccggcattcaggaaatgaaggcaccaaatagctccagaagggaggtgaaggtgggctgagaaccagagtttgggctaaaaccaggcaactgccattgccctaccttggtaaaagtttggggtttttttctcgagagaagataaattatatattttaaattagtgtgtgtatgtgtattttaaagtttttgtagatatgtggtctcatcatgtt

SEQ ID NO: 77513 - DNA, 1011 bp, Homo sapiens
aggagagtcgcttgaacccaggaggcggaggttgcagtgagccgaggtcatgccactccactccagcctgggcaacaagagcaaaactccatctcaaaacaaacaaacgaaaacattattgatgagatttttcgtattctttttatttgtactaagccttcaaaatctgctgcgtattttgcacttgtgcatcatgattcagactagctgcattttactgctcagtagccatgttgccagggacatctggattaaacaatgcagctgcagagggaactcagccattcccacgttattggccgtttggccctttccaagtttccactggcgtagattatgctgcgttgaacatctttgtgcagtggccttcttcctttgggagctaggttcccagcagtgggaacaccgggtcacatggtgtctgagacgctgttggtctgtgttctagctgctctcccgtctcaaggggaacttggaggaagaaaatcatcacctcctgagccagatccagctgttgagccagcagaaccagatgcttctggagcagaacatggagaacaaggagcagtaccatgaggagcagaagcagtacatgtaagcagggagtccctgaacccctctccgcaccctcaccacagctgcacatcctcagtctctggaggtcctggcttcccatgcagagaggagcccctgggcccgttgggatcctgagggcagggcacagaccgatcaccagcacggactgcccttagtttcctggaatgttctcagtttctagagttctcagttggcttttgtttgctctttcagaggcgctttccaccaccagaaacttcttttctctgcttctagaattaaattcacttgaaaaaatcatgagaacactgaagtatctcaagggggagaattcaaactgaaggctgggaatgagtgctgtacacctgcctgtgtccccctggatggagggaagtgggcttgttgggccctgtgaggtgcacagaaccagttccc

SEQ ID NO: 77514 - DNA, 1354 bp, Homo sapiens
cgggtgcagtggctcgcgcctgtaatcccagcactttggaagaccaaggtagaaagattgcttgaggccaggagttcaagaccaacctggaaatatagcaagaccccatctctacaaaaaatttaaaaattagccaggtgtgctggtgcacacctgtaattccagctactgaggaggctgaggtggaggatcacctgagccaggagttcaaggctgcagtgagctgtgatcacaccactgcacttcagcctaggcaaccaagcaagacgctgtctctaaaaaatgaaaagtaaaccagatccagggtttaaaataaaatatttcccctctttacacattttctgtttcaaagtgtctacaaggggcctttaattacttgttgctttgttgaaaagtcagccatattatcagaaatcaaacatactacttaaaggtcaacataagtggcatttcaaatacatgacttagagaagtggcatattagatccatcctgacatgtagccacctggtctggttgttttcagcaccaggagggctggacaagtgcattcattggctttcctcgggaagagcatccctggggttcagagtcccctcgctccacacggaggcagccgtggcccgggaggacagttgctcacacccgggcgggactggcgcctggccttcctgcgtgttttgctgagctcctatccagtgctctctccccatcattccaggacctggtgctcgagaagctgaagagccagcagctcagcagtgagctggacaagctgagccaggaactggagaaggtcggcctcaacagggagctgctgttgcaggaggacgacagcggcagtgacacgtgagggcctcttctccctctccccatcgtgggagcacttcctccactgttcagtctgcaggctcctcaccctcccctgagacctccatgaactctctactgccgagggctgtgacctcacgcggttccttgaacccaaagttccttggtcgtttctgttccagctcttgttccttgaggttctcagataggtgtggaaggagattttgtctgatgaaaaagcttcttaatttttttttttttttttttgagacagggtctggctctgttgtccaggctggagtgtagtattatgatttcggcttacctccatgtccacctcccgggttcaagcgatcctccagccctagctggagaccactacctagctgggaccacaggcatgcaccgccacacctggctaatccttgtatgttttgtatagagggggtttcgccatattagccaggctggtcttgaactcctgagctcaaagcgatctgcccacctcagcctcccaaaatgct

SEQ ID NO: 77515 - DNA, 1930 bp, Homo sapiens
ctccaggcagagggatcagcatgtgcaaagtgttcacagtcagctgggctaggagcagtgagcaggaggtggagagtagtgtaagcagaggctgcagaggtgggcagggcccggctaccagagaccaagagaaaccgctgaaacttaagtgagggagagagatgtatttacattttaaaatcatcctggctgctctgagtgtattctgacttgaaccatctaagtggtggtgtctgtgcccactcacctgtgtctgtcaagcctctggggaacgcacaggcagtgtctgagcacaggtaggacagccgttcaaggccttctctctcccatccccagtgtgagcccatgtcactgaaataggttcctgcagcagcctgggttgtgcctgttgtgttttcccgtagatcaaggaccttgagcaggaaaaggaccacctcaaccgagccatgtggtcgctgcgggagaggtcgcaggtcagcagtgaggcccgcatgaaagacgtggagaaggagaacaaagccctccaccagacggtgacggaggccaatggcaagctcagccagttggagtttgagaagcggcagctgcacagggacttggagcaggccaaggagaagggggagcgggcagagaagctggagagggagctacagcgactccaggaggagaacgggaggctggccaggaaggtgacctccctggagacagccaccgagaaagtcgaggccctggagcatgagagccagggcctgcagctggagaaccggactctgaggaagtctctggacaccttgcagaacgtgtccctgcagcttgagggcctggagcgtgacaacaagcagctggacgcagagaacctggagctgcgcaggctggtggagaccatgcgcttcaccagcaccaagctggcacagatggagagggagaaccagcagctggagcgtgagaaggaggagctgaggaagaacgtggatctgctcaaggcgctgggcaagaagtcagagcgcctggagctcagctaccagagcgtgagcgctgagaacctccggctgcagcagagcctggagagcagcagccacaagacgcagaccttggagagtgagctgggcgagctggaggctgagcgccaggcgctgcggcgggacctggaggccctccggctggccaatgcacagttggagggggccgagaaggacaggaaggccctggagcaggaggtggcccagctcgagaaggataagaagctgctggagaaggaggccaagcggctgtggcagcaggtggagctcaaggatgcagtcttggacgatagcactgccaaactgtccgccgttgagaaggagagccgcgcgctggacaaggagctggcccgctgcagggacgcagccggcaagctgaaggagctggagaaggacaaccgggacctcaccaagcaagtcaccgtgcatgcaaggacactgacaactctgagggaggtgagcaaacacaggcggcgcctgtaaggggattggcagatggtggtagtgggttctgtggtgcatggtttcaggagagaaataagactctgtgtcctccttaaatgctttatctaattctaaacagcaatacctaaaggtctaagaacccagtgaataccacgtattacaatcttacaacccagagataacgcttctcatagtttgagttgtttcgtttcatcattttccctcgtgtgtacagacacatgcttgatgtcatacttacacacaggtgagctgttgtggtttttattaattatgttgtggtttttgttattttagatttcaaagccacaatttcccaatggccgtaagatatttgtttgtttgtttatgtatttatttatttatttttgagacggagtctcactgtcgtccaggctggagtgttgttgcgtgatctcggctcactg

SEQ ID NO: 77516 - DNA, 3499 bp, Homo sapiens
tgtcttggaagaagggtctttgccagtgttgatggtgtggggtgagctgtgatttgttagcctgttaacagctttagaggcctgttagggcttcgctagagccacagagctgcccatcactgcacacttgctttaaagccctgtgcagtatgtcactttgttcagacagcattcagttagggaccccggccgggtctgtcttcataacctaggtagccaggtcagggtacctttgagtggctttccctctcatagcagggccctgtgttgggatgtttctgtgcagctctgtttatttggaagtgagccagtacatcttcatccacagcacatgacggtagctatacaggggctgaggcttgtccagggggatctccagctgtgcagcctcacttcttgcctcttcttgcttgccccaggaccgggacacagataagaaacgaattgaggagctgctggaagaaaacatggtccttgagattgcacagaagcagagcatgaacgaatctgcccaccttggctgggagctggagcagctgtccaagaacgcagacttgtcagacggtaggtagcgcctggtgccggggagccagcctggccgtggccgccgctgcctccagggagctgagtcctgggctctgaatctgccatgttagcccatccattcatcccaggcaaacatgatttccttcaagctccacttggaactgtttcattacagttctccccagggaagacacgaggggtctggcagccttgatgtcaggacgcaaaacacaaattaagtgttgccagttttccgaattcccatatggacattcccgggagcttccagattatagtgcactgacacccagaggctctctgaggccatctgtggatggctgaaagccctggatggcaggagccatcaccagtggccacgaatccctgctataaatgtacccagggcgtcatttcctccattcatttgcataattgggcaagatggaggcagcctgttttctctctcctgggtggggagggtgctgagtggctgctgccccggagacccaggttcttagcgcctctgccaggcctctccctttccctcttccctcctgggcttgctctgctgcccactgccccgcgccccgagaggaggtgtcggtcatgggaagcgtgggcggggccgcactcagccccctgcgcaggaagcctcagccccggcaaacaatgagccagttcctgtgtttgaaaatagcacacgctcaccgttcccgtgcacgtgatcgtgcaagttcatagttacttagactttccagggtgtgatggggcttttggcttgtttagtgggtggctttaaaaaattctgatagacatctaagcattctggaaaggttattggaaacaggtgaatatttcttgcatttgggggttcctatcagttccgaacctaaaaccagtttcactgtgaatctgtgtgagaagttagctgtctgtgctttgatatctgtgcgtagttctggggcctgagggctgcacaagggggttcccccaaatcccttgcctctggaagtccaagttgggggcgccccctggtggagcagagaggtggtacaagcagctaggatggtctctcatcaactaaatatttgttagagaccatggtggctggtgagaaggcctcaccgatttagaccattttctataatgtgtgagctctttaaagttaataccgtgatttattcttagtgttgtcaactcctagtgcctagctaggagctggcatcattctagtgtttgctagaatgatggcatcgtgcaagcaaagcctgagtgtatggggcagtggcttcgagagccagaaagacctggcataaagccttggcttctctgctggttagctgggtgacctagggcaagtacttaacctcttaaaactttagtttccttacctgcaaaataggggtaatgaacctgcctcacaagatgactgtgaggatgagtgagagaaaacagtgaagcaggaaccccggctctggcccttggtgtgttctgtagagggcagctcttcttgtctgtcttactaagacatacccagttactctggttgctggggggtgctgacgagatttgcactagtaaagaaacactgggccgggcaaagtggctcatgcctgtattcccagcactttgggagattaaggcgggcagatcacttgaggtcaggagttcaagaccagcctggccaacatggagaaaccccgcctctactaaaagtacaaaaattagtcaggcgtggtggtgcacacctgtaatcccagctactcaggaggctgaggccggagaatcgcttgaacctgagaggtggaggttgcagcgagccaagatcacaccactgcactccagcctgggtgagagagtgagattctgtctcaaaaaaaaaaaaaaaaaaagagaaacactggcgttttagtagtaaaccattgtgtcgttttaatagtcttcaaggcactgactttaatggaagaggaaatgaaacatcgattccattgtttaactcacagaaccttaaaaattaatctctgtggtcagtttgggaaggtgaaaagggatggtggtgatggttgcagaaaagtgtgcttgtacctaatgccacagatccaaacactttaaaatggctaaaatggtactttttaaatatatttttctgtaattttaaaaatgggttcacccccatgaattctgcagagacactgtccagatgaccacaggttttgaaataatggagtcttatttgaggcttggtgttgaagttaggttagtttcatttacagcttatttgggatggagccctccaagcgtccttgtatgtggagtgtgtgtgtgtttatgtgtgtgtcagtgctgggctggggccaggtacacaccatcccctccacttctcgcctgctgttggtttgggtctttagggcgttctggcctgttgggtggtccatgtcgttatccttggtagaggatgaagactcagagggaaacgagatgctgttcagtctttatgatcacccggggaatctgaaccacacacatttccagatttatgtgtttgctgtgaaagccatcacccccctgtacccacagcccctggggtgaagaggtagggggaggaatcgctgtattagcaacagtgtggaaaggccccaagagatgaggacgtggcactgggttgggtaaatgaaggggggaagaaccgggctcctttcttaagagggcttttgcatacctttttttttcccctccccaaaacaaccccatgacttacctaaaatcatgcacctgcttgtggcaggagggggccaggaactcccattcctgactcaagactcttcccttctccatttgcacctgagctgtttaaaagcagagtagatagtctgccttttactatttttagcttatttttcatctcatttagaattttaaaagtaatttgcatacactatcacagttttcttca

SEQ ID NO: 77517 - DNA, 1027 bp, Homo sapiens
aaggaaatgggctcagggtccccttgtccgtccagatgagattaggcatgtcaaagccttggcactattcccagcctatcttgattcatggatttttttttcttatagcagagaaagtccattgtccttgcccgattaaaaagggtgaagatgggctgggcacagtggctcatgcccgtaatcccagaactttaggaggccgaggcaggtggatcacctgaggtcaggaattcgagaccagcctggataacatgatgaaacctcgtctctactaaagatacaaaaattagccgggcgcgatagcaggcgcctgtaattgcagctacttgggaggctaaggcaggagaattgctgaacctaggaggtggaggttgcagtgagctgagatcgcgccactgcaccccagcctgggcgacagagtgacattccgtctcaaaaaaaaggtgaagatgataaaaaaaaaagtagaggaaaaacttcctgcctcggacttccctctagattgtttgcttgggtccagatgcctgaaagagttttggttttagaattccatcctaatgacccaggtgcctttatctgatggttctcatgtatgtttttgctaaccaggagctgagagaagataatatcattttaattgaaaccaaggccatgctggaggaacagctgactgctgctcgggcccggggcgataaagtccatgagctggaaaaggagaacctgcagctgaaatccaagcttcacgacctggaattggtactgcaggctgtgttgttactacattgaaaacagattgggctcgggcacagtggctcatgcctgtaatcccagcactttgggaggctaaggtgggaggatcccttgagcgcaggagttctaaccctggcaacctagcgaggccccatctctacgaaaactaaataattgggcatggtggtgtgagcctgtagttccatctacttgggagagactgaggcaggagggttgcttgagcctgggaggttgaggctgcagtgagccgtgatca

SEQ ID NO: 77518 - DNA, 1064 bp, Homo sapiens
tatctgtggagctttccccacctgctgggaatgatgtcaggccctaactgcatccatgcactgaagcctcatggtggccctgcaggtttagcagccactggcagttcctcccctcttttcagatgaggaaactgacaattgattaattaataacttgcccagcatggcagttgctaagcagggggacctgggatgggaatgactgtctgcctccagaccttgatgcttgcctgtgaatgacttgatgcttgcctgtgaatgaacgtgagcttcagccttcacaggaaggaagaaataaagggggtgtgggaagtgctgcaagaggggtactcctaggagaggtgaggggctgccactgtctcagaggccgtggaggcctgaggaagggccccagcctccagcagctcacgttagggctgacatgtcacatcatacttaatcagggaatgtcaagattcagggcacttactaaggacaccctgaacacagggaagtcttctgttcccacctggaactttgtgtctcccttgttccttaataactgctgaggagttgtgatgaggttcagcacactaagacgttgaataggacagacctgccgtttggtttaaggtttaagtcccccatgcttctcaaagtgggtgaagtttaaaaacaggcaggtcttcggtgaagttcaagggatgtccatgaagctggatgagcaggtagggttcagagcgggggtgatgtttcctgggtgggtaggatgtctgcctgccctgagtcagctgacccagaccctccccactgaggatgccctgggccagcctcctgctgctatggcccccttagggaaccatacggcatcgtggttgctacagagctccctggcggaagactgcctgtttgtttgattccgcaccccctctggtgctgtgtgctcctcaggggtcaggaggcaccctagaagccagttttttctgttaacatgataggtgctccgtggggagtgctgggggtgctctgtcggtgtgagttggtggtgatggcggctggcgagtttgtaggtctcaggcgctgcg

SEQ ID NO: 77519 - DNA, 1027 bp, Homo sapiens
agtgagacaaacgtgggtttgcagacactgagccgccaacgcaggtgatgaattgggcatggttgattaagtccaggccactgctgagaggagtgagctgtactcccttcggatgcccatagtgtcaggaattagataaatggtggaggacacctgttctcagattggaatagttacaacagcctagcaaaccgtcttcagtcctcataggatgcttagaacaatttgggattccctcccttgtccctcttccagacttgaaacctttccgattgtgagtgactttgccttcttcatgcggtgacattaattgagcagcatggatatagtcatggaagagacagctggacccacagggcttagcctctggggagggaagcaggcaggcagcacatggttaggatgcaacaccatcagtgctgtgctgggggtcacagaggagggcgcctcacccaaacatggctggggccagggggtgggggtgctgttgaaagtgaggcctgaaatagctaggagttaaccaagcagggagagccaggcagaggcaggagcaaaggcctggaagcccgagaaagcagcgtgcaggagagacacctgaggtcagggccacaaggtcctggtgtgtctgggtggacggtgagaggtgaggctggaggggctctcagggcccagccatggaaggtgtgcagcgtgcatcgtgcccatcaagcattttcacgaggcgggtggcgtggggtgtttcagaacatttaagcactcaggctacgtggccccaagtctgcctgatgcacgagccctgctttctaccactgctttcctgagtcccaccggatgaggaaccctggcccaggagtttggtttgtgtcttcatgggcatgttctcagcatgtagagcagttctggcccctgggaggtgttggagagacgcttgctgagtgaatctggagctggctttggacagtgctgcatttgcagagctggtggctgctctgctgcattggagaccccaccttctcagatacctgca

SEQ ID NO: 77520 - DNA, 1173 bp, Homo sapiens
ggccctcctccttcgtacactcccttttgtttcactaaatatttcacctcttttcaaaacccatgccagccttttcccaccttcctcctcgtttcttagtctccgctgaaatatctgtcttttggcggtttcttcaccctgttcaagctcaggcgttgtgctggttaaccccgtttgttctcctccatccccctctctgcccggctgcagctgatcgtggacctcactcaggaacgggactacctgcaggcacagcatccacccagccccatcaagtcctccagcgccgactccactcccagccccaccagcagcctctctagcgaagacaagcagcacctggccgtagagctggccgacaccaaggccaggctgcggcgcgtcaggcaggagctgtgagtccccggctgcttctcctacctttgtgtgtgttgcagacatgtttctggtgtggtgtcgactcacatgtgtggtgctgccaatggcacagctctgacgtgtgccccggagtcagctggggtctgccctgagcttactctttgacctcggactagctgcctccccttctgaggcctgcacagggatgggggcggggattcttcccggtcttcagggtttcctcccgtccagacggtgcaagttgtccacagaagcagcctccagtccacgctcagctccagcttggggccgggacgaccacacctgatgtgttttcttggctggagggatgaggtgcccctccttccctccaatctggtgagcctgttctcccaggtttcctgcagctgatggatgtcacctgtggagcctggctgtggggtggtacagctgccgctggggtctccttacctgccccacacacagggagggagacctgagtggcggatggacatagtttaagggccggtgttgcaaacttatgaaaagaaaagaattttgagtcagtaacatttttgcaggccccataagcagatcgcctccccaccgcccaaatcccgagtcctttccttttcccacaggttttaggaagtggcagcctgctcccagggctgcttgttgaggaagctgcctcccacactctttctccttactgcctctgcagggaggataagacagagcagcttgtggacaccagacatgaggtggaccagctggtgctggaactgcagaaag

SEQ ID NO: 77521 - DNA, 1029 bp, Homo sapiens
tttacatattgtctgtggctggtttgccactacagcgacagagctgagtagttgtgacagaggccaaatggcccacagagtctaaaatatttaccatctggctttttacacatgaagtttgccccaccctggcctaaaccaggtgtcccccgtctttctgtacttaagaatcaccgggagagcttgtttaaaatgaagcgttctgtgttccaccctggtcttttcaatctgggtgggggcttacggatgggagttttaagaacaagctccccaggtgattctgatgtaagtggtcctggcaaccactagagacacatcagtgtaaggctggtaggaggacaagagcgttcttagttatgaaggagaagcccggggtgggtggttccttttgaaactgtcattctgtggctgtggtggactcagcttcaccctcacttgaacagcgcttccattaacacatgtaaccctccgcagtgtgagaggaaagaggagttcattgaaagaatcaaacagctggacattgagacccaggctggcatcgtggcccatatccaggaggtaggtgcgtggcctcgtggtgggctcagctgtggactgctgctcctgtggtggccgggaggcaaaacttctctatgagtggaaacgtttgaagaatacatcacccattacgattttgctaatcttaggtttcagacaccacagacacattgattctatttggaaagatagccatcaatcagccagctaaaataaaatgagggtaaaaataaaaattaaaaaaaaaaaacacctcaatcaagtcatcttttgtctccttctttttgccttatatggactcagactatttttaagagctgtcaactggttgaggcccagagtttgatttacaggccctgaaaatgtattctggcaaatgtcaccctgctttgaacagttgatctttatagaatagagagattctctgcttctgtcagtgacatggcagagacaagctgacaccacttgggaatcaaaaccagcgagtcccag

SEQ ID NO: 77522 - DNA, 1033 bp, Homo sapiens
tatacccagggatctgaaatgaaccgcagcattggttctcaggacggcggtttggttttttcatcccggcagtctttgacactttgggacactgtagcccagtgtgtgagttggttaagtcttttaagagaagaaagctatttctggcatgtcctttcttcctcaatacaataggatataacgaaaaagaacacatagatttttttttttttgaacctgaaagggaaccctgcacattacccaggccattttatagatgtggaaactgaggcttggagacagagtatggcttgtctgggacacacagttcctgggtgaccaagcccatcgtctaggcgcaggtgttctgctgctgtttaagtgtttgagatagataaacaggtgaagatgcattcagccccaagcacaatcaaagagacacagctcagaatgacgaaacaggatttttggcctgattgacaaagttgggaaagtggtgaggtaaatgttgatcaagggtaggaaaatgggaatcaccacacatttcccagggtgaaatggcagagcctgtctgcagggcagtttgtcaatatgaaaagcttaaaaagggaatgcataaagaattagctaccatgatattctttataacattgtttagattgaaatattttaaggccgggcacggctgctcacgtctgtaatcccagcactttgggaggccgaggcgagcagatcacgaggtcaggagttcaagaccagccaggccaacatggtgaaacccccgtctctactaaaaattcaaaaatagcagagcgtggtggcgagcgcctgtaatcccagctccttgggaggctgaggcaggagaatcgcttgaacccaggagacagaggtggaagtgagccaaaattgtgccactgcactccagcctgggtgacagagtgagactctgtctcaaaaaaaaaaaaaaaaaaaatatatatatatatatatatatataaattgaacctctggaaggggtattggttaaataagttactggccttgatttacaaag

SEQ ID NO: 77523 - DNA, 1274 bp, Homo sapiens
gagccgaaattgtgccactgcactccaacctgggtgacagagtgagactctgtctccaaaaaaaaaaaaaagtgtcttctgaacatgtgcatgactacagcttaaagaaccagagtggagtcaaaaaggactatacacattatgtaccagtcatggaaggaagataggttttgttccatgtgttaacttccattaactggtagtctgtggagggctgtgttcagaaggattctgaggcctagttccaccctaagtcagaaagtgctgtgattgactaatcatgtctgccatggactcagagttagcaagtcggggaattttcaaaccttgatataatgcacattttagaggatggtgtattttaattgtgcaactacttttctatcctcacctctgcccttagaaacgtgtgctatcaggcagtttcccttttgttttggaagcttatgactgttaacgtctgcagctttctatatagcttatgttggcctgcctgcattgcatttctgctaagaaaggctggggtgaatttctttgtgtcaagactccaggaagcaggtagtaaggtaaggtttttcttagactcagctattgactcaggccgtcctgggattcccccaggggttctcctattctcaacagagtgtagttgtgttaagtgtggagtgtgtccggtctgatgtttctcgatccccgcccgcagtggttgcttgtgacttttttggtgtagaaattcacgtcgttttataacctgcccccgtttctccctctgaacagcagctcgagtaagtgtaaccataaagcacttatactttgacaagcagcgtgctctcttacctcttggccttcgcatgtgctgttccctgggcctggaaagcccacacttgcctacccgataagtctgtctcctccttatctgtggaactcagctcaaaggttattccctttagagtccttgccctgggccttgctgcaaattagaagttcctttcccgggttcccatagcatttatcagctttctgattgctggtttggctcccagcacatagtaggtacttggcagggagctgtctgtaggtttgtttgatcttggcctgcttgactgtgtcactgagccagtcttactggcaaggacccaggagggaatcttctgctgtgttttgaaactattcaaaacccacaatctggtagatttatggaaatagcggtttttcttatgactgaaatcctgaaagaaattgggcatcggcttctcatgagaaatgaggaaact

SEQ ID NO: 77524 - DNA, 1926 bp, Homo sapiens
agacctcctgaaactccttggaatttaatatttaaccctctcagtattgatttgctctcctgccagtgtgtccttggagtgcttttcagatcccatggaaacctctctctcgtagcccacacggcacagccctgccttccttcgggggccccggggaacttgtgagggctgggtgtgccccaggcttactgacctccatcctggcaacccaggcacaggctcagagtccggcttgtgaggaacagtcctcctgctgcagagatggtgcttttaaaaatcaaaagccctgtcttcctggccctgcggccctcccagtcctgcccctggctccatgcctgctcaccgtgtggtgtggaggctgagggtcggccactcaggcttcatgagccattcttgtgttcttttcccctacccctgttgtttttattttatttctcctggccataattctctaatcctgtgtataagtgtatatgtgtgtgtgtatatatatataattttcatatttgcaaaacgttttgggcgtttgaatgggagggaagaaataagaaaaagctaatcttgcaggcattttgattgttctaaaatttcctctttcatccttgagagagaaggttcagaaaagcaaccaaatgctgttttaaactaccccgtttctatcctgcttctttgcttctgtgctgcttgttggatccggaaatgagggctccagtccacgtgcggtgctggggcacttaagccaggagccgaggctttcctttcctaggaaggtgcagagtttggctgacaccaagcccagccgagcgtcacagtgcggcccacacgccggcctccaagcacccgcggatctgcctggagaccagactttgttagtaaacttcctagcgatggcccaggcacacagagaacgccgctggctgcaacagccacaccatggcttccagcagccctactctctgtggccaccgccgtctgcggaggagggaagagatgctatttgtcaaaggtctttatgtttgagttttccacgtggtggttgggagggaccctttcccagagcgtcccctgcctgccctagctcctcgccccttcccagggcaaacttgagtctcaagctgcaggcttgtggctgattctgcttttctggtcttcagttgtttggtgctgggaaatgaattcgctctcagcttctgcaggcgtggcaggcaggtggggtaggaggtcatttttggggtgagggtgctccgaggggctgatatttcaaagtgttctacatgacctgggggtagctgtcgtctgttgtgcgtggtggtgctggggtatctgtgggggtgggactgacttgacatgggcagcagagagacactagagtaaagggccactagtcagagtgcccccgggaggctcctgcaccattccacacaggcatgcagcttagcgcctgccagagtccacgtttgataaatatgtgtgcctggttatgttaatgccggggggtgggggcacgtggtgacatgaggattccacaggggccgctccccagaatgtgagcccgtgcgtagaggtgcctgcctccttccccatgggtggggacacatatgatggagcatccccatgtgcccacccacggggaactctccaccttgagtattcctcggcagtgcctaggaagtaccccaactgttaaaataataataaacagctcttctcgttgtaagctgagccctcaggagggccctcagagccgtgcccatgtgagtgagtgttggggtgtgcccgtgtactgaggagagacaacagggtcgtgttcagtgcactgctgttttcaaatcactgtgacagcctcgtgagcatccttatgaaataactggtttttaagtacaaaaccagggaaagcagttagtggttcacaccagcatgtaagcc

SEQ ID NO: 77525 - DNA, 1064 bp, Homo sapiens
tccctgaaaaccgccttcaccatcttgccagctgcacagctattaaatatctttcgcggttactggtgagtgttttctacaagaagcctgtgagaagcaagagctcacgtctgtgctgtgagggaggatgctggatggagctagaccagctccggggtccctccagctctggcttctcagcatcttgctcagcagccaggcctgtcactgtgccacacgcacaagaaaagactagatttgtctgacgggaagccagggtgttagcaaattactttctgcgatgaatcacaggacagttgcactggaagaaagcattgttttttcttccagggtttgtatccaagtatagtagtggtttccagacttacacatggccgatcccaccgaagccatttagaatggaagggaacgagccatttaggtgtagaagcccagcccagagagcggaggagctcattcagaggcacacagcatggaggtccccataggcgcaagacagatttcacaccataaattgcacagatggttacttttgtggacagtaagccactggttccaagcaagagggttactgtcactggtctgccctgatgtttcttacattctaaatgccaagcaggattcctggaagccctggaggggctgcgactgcatatgcacaccctacagggtcctgtctgaatgcccctggaacctttgagaagagccttggggtttcattaattgccgttcagcggcctggccctctgtcctatgttttctctctcttatgatggttacagagggtgcgcattccagcagcagaggaagcaccctgaagagacaaggttctgtgcgcacaaaatgctgtgaccgaccttccttctcagctgagtgcagaactctatctactgcaccggctgaggaagccagaaggcccgacttctgacctccccaaataaaagactggagtaccttttcatccttcctcatcttagctggctgcccctcagccagaggctcacaaaaggagctcagcccaagcccctcctttagctcccctctgctggtgagatgaacaggcc

SEQ ID NO: 77526 - DNA, 1078 bp, Homo sapiens
atggatcagctggtcccagctctgaaggtggagttggagaaactggacagtgagggctgggaaagtgaaggacgggaataactctacccatcaccgagggctcagagggccccgggcctcgctgactgacatgctagacggtggcctcggcaggctgcacacagagggcaacgtgtcagggctgggggacggggagctgggtgcacggatgagtaggtttgacaggggtcccatggtgctctgagagcagaggaggctggcagcggacatccaccagcaggaagatgcagacaccagtgctaggggcagagggatgtatttatgaaatagcattttcagttttaaattgtaaaaatagatgtgtgaagctcttttcgtttctttttaaacaaagaacaaagttggtgtttttttaatttgtatggttgcccggggtggggcatgtgtgtgctttttgactaaatctatccccgtcgtgtgtgaggggcttgctttgtactctttttgatggatgctaacactgtactgttatttataacgttttatagtttggggtaacttttctgttttgggcacatagcatcacaagctcccagattccagatcccaacagagcatctggtccacccactgttccccaacacaatgatactaaaagaccctgagagtctacgcatttgtcccctttctctgacctaaaaaagggaggtgccacaacttacagtttttctgtatgtctcacttaaccccccacacccatcagacagaagggtgttcactctcttcctatcctgggtggaagtcaaggacagtgcagtaactatgaaacagtacttcgtatactgaaaattgcttttgaaatctctcctcagcatctgcccgtcccggcccaaactcctcactcccttacgctgtgtctgccctgggaccgtctctggatttctgctctgatggtgctgtggttttgcagctcactctcagctgcacccacgcccccggggaggggagggtctgtctggtgcctcactgctgtagtctctgcttctccgagcacggcctgggctctggctggaccctg

SEQ ID NO: 77527 - DNA, 1791 bp, Homo sapiens
tcctggcctcaagctatcctcttgcctcagccacccaaagcgttgagactacaggcattaaccactgcgcctggcctccttattttttaattgcacaagccatacaataaaaataagggtatcttttaaaaaagaaacatcatactgctgtcctagcatgtcatctattgcctttttttccaagacctctctacctatgcagacataactttagctttcattttattttttaaatatgctttttcttttttcataaccccattaaatctcttgtaggcatactttttatttgctaacaatcaagacagaaatacagttaggctttggctttcgtgtttgtttgcatcttacgtgctccttgctgtcattttagctccttcgtagtcaccacgggatggctgtgcacccgtccgggggcttcattacttgtaatttacttaatccctctttatttttgtttccggttcttaatggtatcttttccccctttgtttctgcaggaagttctccagcagctgattgtaatgaatttgcccaatgttttgatgattggcagagacccactgtctggtgagtgaaagccgctcccttctcccctgtggtgcccagccagaggcatggcgttgggcagctgctggccatcgagctccggctgccagcttgggccagcacagtgaaaacacgtgatcgttttggtgagattttaaagagtgggttcattaccctgaggcattcagccaagggcacatttcttccttaagaatgaagcctcccaggccgggcgcggtggctcacgcctgtaatcccagcactttgggaggcccaggcggccggatcatgaagtcaggagatcgagaccatcctggctaacaaggtgaaaccccatctctactaaaaatacaaagaattagttgggcatggtagtcccagctactcgggaggctgaggcaggagaatggcccggagcttgcagtgagctgagattgtgccactgcactccagcctgggcacagagcaagactgtgtctcaaaaaaaaaaaaaaaaaaaaaagaatgaagcctcccaaccgctcagatgtgtgtgcagaggccagtgaggccaccgccttgttcctcctgggaagatgagtttgggtttaggtgcctgagtcataccatctggtggactcacctcctcagtaagtgtggaatcagctgacaccatcagggagtgtggtaccttagacaagagagtaagaatctctttagagaactgacatctgtcactggggtcctgcgaggttcatgctcggtgacggagctcattgatctgtcttatgtctccctgttggactcagctctcctggcaggcacgcgttctaggtccccgcagtctctgacgctcagtgtgagtttgaaagactcaatgaggccgagcgcagtggctcactcctataaccccaaaactttgggaggccgaggcaggaggatcgcttgagcccaagagtttaagaccagcctgggcaacatagtgagatctcatctctaattataaaatgaaaaaaagaaagaccaaattaaatgtcctcctggcatcttacagaaagtcagaacttaatctctgcctgtcagataacttccttggtgcattaaatggagtaatgccttgcgtccctttcacctgtgtgtgtttacctgcacccatagctggtggacagaagtcgcaggccccagggacagagttactcgctggctaggacttcccttgttctgatggagaccttgtcatcattttgaaaccttaggtctggg

SEQ ID NO: 77528 - DNA, 1072 bp, Homo sapiens
gtcactccctaaccaggcgccgctacgatctgatgtcgtcctcccctgtcagagcttcattgcctatgaagcctggagtgggacacctgtatcctgtgttttggggatggtcccgatttctcaacaagtacattgatgtttgtccccagcaggttctaatagaatcagctttctctttggttctgttcttagaactctacgcctgtgaccttggaaagccaccgctacaggccttgagatgcagcatgctctgggccaccttcagtttgcttcctgtgatctgggttgggagctgggaatggaggcttgttgacaccgtgtgcagacacaactgctgcccctgccaccttcctgccggggtgacaaatgcttcctgagggggtcctggcccaccccaaccctcccccttggggtgactgataagagcctagattttagatttgaggccagggtgttgtcaggtgggtgggccctctccccttgtgagattacaaagcgcttttcagccttgctctcccccaacccctagggacaccagtggcccctgcagtatccaaaacacaaatgcacctgcctctgaccctttgttcattgacttcttttggtttgtttaaagcatttaattggccgaggagtcattccaggatgcagttgaaaagcaagtcatttatgaaaagcaaaatcttattttaggatccgaaagcaaacctaaaggagaagtggggaggagtgcaatctaccctggattgcaatgccacacccctaccatgtgctctgcggaagggggttcccttggagggccatgtgccaagcctgaccctcttcttccctgtccatcagaccacaaggaccggtgacaagacagaggcctcagcgaggctggtgtgtgtcccttgtccctcaagcttgccttggcacttgtttctgccattgcaaagactagagtggcacaaggagggctcactggcaaatgtgggggcctgtccagagcaccactgggcttgcactctccagcctggtgtggtcctgcctcacaggtggctggctggggtgtgaccaggtgccctggcag

SEQ ID NO: 77529 - DNA, 1061 bp, Homo sapiens
ttctacttacacaagttctaatggaaaattctaaaacaaattcgaagctttttttccctctgaaatgtttttaacttttgttaacagctacaggctgtgaatcttaaggaatatggtgtcagattttccaggtttcaaggcacaggaattagcagagaaaccaccctcattgcagtgatagagcagaacagtaggttttcagatcttggttcccttgtcaacatggaagagacagagaagacacctcctccacaaaagaggtttttaaaaactgtgtactcaatatatattttgaggaatattttctgatttaattttcccaactgtcactattagcagctttttgccacttcggagtggggagttgattgacatggcacagtgtagaaagtgccgcagaagggggctgaggaagcattaggagttcaggggagaaaaaaatcatccggcatcaggtggctgcctagaggagggggcgttttagctgagctttggagggcgagtagggtctggcaggtggtaatctggtggtaatggggctgtgggaggaagggcaccctcgtgggaagcgcagagagtgttggtagttcagtttgatgctcagggtaaccgaagggttgacttgctgcccacacttagcagttaatacatttcctggctctgtccctcacgtgtcagactcctaagcattctctacagcccagctcagaagctgtctcctctgggaagccttcccagacttgtctgggcagtttggcagtactccctgtgctgtgctgccactgtctacctccctcccagacaggccgagagttctctgctcgctgcaaggtgtacacagtacgtgtcttctgaatatctgaaccccagagcagacctaaaggtgtagaaaatgccccggctttgggcaccagggaagacggtgtctagaggtgtgctgggtgcacctgcgaagccgacgtcactcatgcttctgctatttcagtcttgactgttagcgtgtgtgggtcaacagcggcattctttgtggttttgctttggctgtgtggaaggctctcttt

SEQ ID NO: 77530 - DNA, 2052 bp, Homo sapiens
cctctgttagggtgccagacttgctggtgggatttgctggtgggatcaggctgtgagctccccaggacagggcctggccctatagcaaacaccctgggcccctcactgtcccccatcccacaggctttgtcctccttgtctttgtttcctggctttgagggtagcagtcttggcttcataccctccacctcccaactggcatgccatcagacacccagcaggtgcccgggaagtgtggcataaatgagagagggaatggctgcccttcctcaaggagctctccctgccctccagatgcctgccctgggacactggacaaggaggcctggtcactcgggagtgctggtaccccttgtgctgtggtgctcgtaccctgaggcctgggctcaggttggggcgtgaggttgggggctggctgcccccactgcctgcctttcccaccctcacaggtcccagcaggctggggtggtctgggctgccatctaccgctggaggctcctaggtgccctccaccatcctgctccgacttgtgcctgggagtgaagcggcattgtcaggccaccgggtgagggctgccagggtgtggcgtggccccagccctgccctggcataggtgcctgtgggcctgggtgggtgagcggtggagtgggacatgggacactgtgtgggcaggcgccacgttcccccagcccagctacttgctgggacgaggaaggccttgcttctgctgagctagggagggtgtgcccaggacagataggtgcctgcccaggaaatcagctagagccacccctgactggagggtgtgggaggcagtcttggtcccagtctgtgactccacaggctcctcgggaccaagactgtggtcttggtctgtgctgtactcctgccaccgccggcctctgtactcctgccaccggcgggtgaggttggctgggcctggacagcacatggctcctcccatgggaccactacactcattctggctgggggggtcatgcctgtcccagcccaccctgcatgcataccgtagtttcctctggccacactttctctgcccctttcttgcttatccatcagcagaactactgacttttccatccatcagcaaaaatactgactttgccaagaagcttaaaaaaaaaaagtactctaccaccatgaagtcacagtcatacgatccctcacggccataaaatcagggcccttatatcaactccaagcactggagcaccgatgctgtcgttttagccaggaggggtggacttagggacagaggaaagggcagcccagaactgctgcaggtgctgtcctgtggggaaagggtcctgctctctccatccttagcctaatccttgaagtccttctgcctcaccccaaacacacacctcagggcatggcatgcactcagcagacaccgctgagtggatacaagcttcttggtatggcataaggagccctagggcggagtgcaaggagacctgggtttccagacctgaatgtggggctacgcctctgtcattttttgctccggacctcagtttcctgactctatggataatcttgatggctcttttggttttaaaatgcagattctcagcatccctctgctgttggggtctgtatgcacggatgtgtccacctactgacccgccttcccctcccccaccatccgcacctgtggttgccgaggcatcactgcagcaggtcgttcctaaagcccgatgcagagacccggcttgcattcctcttgtaaaatggttcctgaactactgtttatgggcagaggttctcttccaaggagtcgaatgccgtgtcctgcccgtgtttctggggctgccccccgcccccttctttggctcaggggctcagaacaggcccttcctggcatcagataagacaggtctgcccacagagcaatccagggcatcacccagccctaaagggaaggtggcaggagctcctggggttacttgaaacatcctctggttccctccctgccgggttccctgagttcttctggacgcgtgggcacttgcctgctggtgagag

SEQ ID NO: 77531 - DNA, 1039 bp, Homo sapiens
ggaatggcctcaaaggtcggttgggccaccccaggctctgtgctcagcaggactgcacggcctgttctggctgtaaccccttgcccctggctgttccctctgcctgggattctccagttccacccgtccacctggctcacaccctccctacactcgcattttgttcagctgacgattcatcgagggccctctttgaccacctgtctgtaagagctatgttttctgtcacttcctcctatgttcctttattttgcttcttaacacacacatgtgacatatatttacctctttagccctctcatttactccaatattccaagcaatgaaaaatacctattgatcaaatggaccttgcattagcagatacctggtggacttaaccctgctactgcctgcaagagttaggatgagaggtaatagacacagtgtgtctagccaagctcctggtttatgcagcatgctgatttattgctgttcgaaataaagtgttctttacactgtagatgggggagggtgcgtttagttggaggtcccaaaaagcctctgttctcaccagagccttcctccccgcagccagttccatttagccagcagctggcaggcatctgctgtgggccacactgtgcagagccctggggggattcagaggtgagcatgttccagcatctgccctggggaccctgaggatctcagttccctgtgtgggactcaggcagggacacgagagaggggcctgggggcactgattgctgaggaagtgatcattgccggcggaggggtttgaggaaggcattggaggcaagtgtggctggacagagaggattttgtcaggtgcgggtgggcaggggaccggctgggctgccaggtcacctccaacccctgcccaccccccaacttggacagctgctgcaaagttgataacatcttttgagattttcacttcctgccgagatattagtcattagaaacttgtcacttctgaaccttcctcctccccggcttttcaactgtgtcccgatatgccctcccccagtttcct

SEQ ID NO: 77532 - DNA, 1089 bp, Homo sapiens
tccccagctttggtggttgtgtatttctccgtcttctctgggtcatctctgcctcacctgctagatggtgtctgtaggacccatgtcctgtagaacaaagggaaacacgctgagctggagatggaacagctttcttagggacctgactttgaagaacctttcagggtctgttattcctgacaaagaaggccaatttagagtccagataagctggggaaagattgtgttctcatgttttgcataatctccaaggtgctgtgtcatggggcccgccatgttgaaagggtctctggaaaccacctggtccagggagtggcagataggtttaatcttgagttgattggttgtggctgcccagagggctgtgttgagaaggattatgaggcctctgcgttgagatttgtggaaaagagtgcttcatcaattagtgatgtctgctgtgggggcaggaggtggacagtagcgctccatacacagtgtttgctatctctcatcttacagatgagaaaaccagggcccagagaaattgtgacttgtctctgtatttaatggcgggtctgaaacttaaacctaaggctgctgagatccaacccagtgctctttctacttccctgacattacagaacctatcctagtagaggatgagtcaaagtgtgaaacaatgaagacaagatgtcgtgataaaatgggctgttcagaaaatacaccgtggaaggcatcaagaaggaggcagggaggtgggctcggactggagagaggagtgagctgagtctcgcaagaaagggccggttttttgttgtttttgtttttcgagacagagtcttgctccgttgccctggctggcacgatcttggctcaccgcaacctctgcctcctgggttcaagcgattctcctgcctcagcctcccaagtacctggaattacatgcacgcgccaccatgcccagataattgtttgtatttttagtagagacggggtttcaccaagttggccagggtggtctcgaactcctgacttcaattgatccacccaacttggcctcccaaagtgctaggattacaggcatgagccaccgcacccggccaaaag

SEQ ID NO: 77533 - DNA, 1027 bp, Homo sapiens
ttttgcagcctaaaataaaaatttcaaatacaaaaaaaaaaaaaaaagagagatgggggtctcgctatgttgatcaggctggtctcgaactcctagactcaaacgatcctcccacctcagcctcccaaagtgctaggattacagatgtgagccaccacgcctagcctccacctgagagtttttggataatcttcatggcttggatgttgacgcattggcttttgcacctcggtctaattggatgcaccagtcctcttggtacccagatgtggtgccctaggaacatcttcccgggatgcaccagtgtgccgtggtacccaggtgtggcactccagaaggctgtgccctcacactgcctgcagaatgggtgtttatagtagtaacagagggaggctgctttctgcaggtgtcacagcatcacccattactggaaaagtttacatacagataaatttgtttctgcctcacagtgagaaagaagcctcttctcttctggggctatcaccttccagtgctaggtcctcttcattggagacccctccctgtcacagcacaatgtgggtaataaaatggtttgtgacctgcgggagtccttgtgtcttttcccagtgcttgctttccccaggaatggggctgttcccaggggtgtctggtttccaactggccattcatccggtccccacactattaagcagcaagaactggttttgcaaagtaaaccgatacctcgtggagtatcctcagccagcaaggatgagacagtttaataagtgcctggcgacctccgaggaggcagagtgtccctggctccccactttctccacccccttcctcctggctcccggacatctgagtgcccaagcagaaagagggaggggctttctcattccttggtgctggggaggaggccttgatcaaagtagtggtgtttggtggaaacaacgacagtctttcttgggggttctgttcatggccccctgagattcctggctgggccccccacggcagcatggccagcctgggcttt

SEQ ID NO: 77534 - DNA, 1027 bp, Homo sapiens
ttgaaacagagtctcaccctgtcgcccaggctggagtgcagtggcacaatctcggctcactgcaagctccgcctcccgggttcacgccattctcctgcctcagcctcccgaggagctgggactacaggcgcccgccaccacgcccagctaattttttgtatttttagtagagatggggtttcaccgtgttagccaggatggtctccatctcctgaccttgtgatccgcccgcctcggcctcccaaagtgctgggattacaggcgtgagccaccgcgcctggccaagaaaaagcttttctcctctttttttttctttctttcgttctttttctttctttttttttttttattttttaaatagagccagggtcttgctgtgttgcccaggctagtctggaactcctgggttcaagtgatcctcctgcctcggcctcccaaagtgctgggattacagatgtgagccaccacgcccagccaaaaatcttttttcacttggagtcagcatagaggtttttccacatcaaagcaattcctcttaagccccagcagccaaggtactcctgttgatgatggatagtcctaggatagcaaagctttttagaagctcatgcttaaatcaagcaggactaaactgtcagacacggaagcatccctttctacttgaaacctttggggtcagtgaccttgactttgaacttggaatcacatcttcaagagcagttgttgacttttcccctggggaagccgggaaggccaggaggaggatggagcagaggtcagggcccatgaccctcttttctcttaacgtttggactcggaggaagcctggatggagccattttccctcctcaccgtacctgtccctccctggtttgtaaactacccccactccacttgaccagtagctgctgaggccataagggccaggcaggtcttcagatgaactaattggctcctcattcaggtgggggacaggagtgtctctgtgtacttcagtttcccttgaacctcatgttgggctggcgtg

SEQ ID NO: 77535 - DNA, 1018 bp, Homo sapiens
aatgtatttaatgccactgaactgtacacttaaaacttaaccattttaagcttttttttaggttatgcatattttaccacaattaaaaacgggcacccagtgggtttttttttttgttttgttttgtttttagcaggaagagagtttgtactgtgaggatgatggtaaactaaaagaactgtgttctgcattccctgggtccagcatgaggctcaacacacaggtgccagtgaatgggcaagcttctcaggcttctagaacattctggtgtgtggctgccattgtgttaagcgcttggtgttgaaggcagtgggtgttaggactgctgctaagaatccttacttccttcccatttcagtcttcaccttcactaggtggcatttattctcatctcaaagatgaggagacagaagttcagagaaaccaaggaccctgggaaccttgtcccagagcccaagaccttaaaacaaggaagtggtgagcctgaggaccgaatccatgttcttcctttctggagacccctgtcctctgcgctctctggttctgataggtgatgggagaccaggtaaaggaagtggggtgcttccaccccattctctgggctttggaatctgttgtttgggtttttttttctttgtaactcccttaggctctgggaatcctgtaataggatgggaccagccactggcttttcgcatgtgtacctggaaggcgactttggtatggccactggccactgggaaggtgcagtgggctggccatggactttgcctcctggtgacccacaacactgacttggaacagttagttagaaaacccagaggctggaggggtgagggccctgtggcagcctgtgcgtcactgccccagtgttctctgtgatgggaggctttaatgaacaggagcgcctctgagatgccagcttggtttttcttcatttagcacagagcacggggcatactttcggtgttgcactgagtgagaagagtccccaccctctccagtctgataacgaggt

SEQ ID NO: 77536 - DNA, 1038 bp, Homo sapiens
tctgagagagccagtgagcgattggtgcctgggaaatgcccagcccagtgcccaggggccgtttccgggagcggactccggtactgtctctccctctcccgctgcctcacacgtcctgtccttgcagtttctccttccccagcacctttcctttttcgctatgtgaggccttgaggactctctggaatttaacatcattatcgccgtcatcacacccctggccctgacttgttttctctgtgtcccaccctacattgcagactcactcagggcggggactccggcagcctctgcctctcccaggaagtgcagtgagggggctcagtgagagtgaggggtgcagtgagagtgaggggcgcggtgagagtgaggggcgtggtgagagtgagggggctcagtgaggggttgcagtgaggggccgcccttgctggggtccctggtgctgccttcaagaactccaaagggccaggtcctcgggctgggctgggctttaaaatgttccttcttttatgcatcgctggtatggaaaccctgggttattatcggctctgggtttaaaagatgaggtaaattgatttctaaaggcaaagccactttgacaagccttttgatctcattccttttgaacagaaaggaattggaaatgtgaccagctgaagcctctctcgtttctctttccccttgaaaaggttctcctcctctagccctaattaaggtgtccttccctgctctgggtggttgaagccagcccctcggagctccatgtccaccgactcccacctctaggtttcctggatagggatttttgttgttgcttttgttttgttttggcagggttgggggtggcatgtaggaaagggtgatctgaagccagagtttatagagcatgttaagttctgggtctgtttgaactcctcctaggtacaggttcaggaagggagagctggaacctctggaggtggccgtgttcgtgggaacagggtcagtgggagcagctgtcatggtggccatgggagctgctaccctggaggccccaga

SEQ ID NO: 77537 - DNA, 1676 bp, Homo sapiens
gagtgtgcacgtgtgcctgtctctagccctgcacgtttttctcctgtatgatcgttttattttaagctgagtgacttacacatattatctcatcaaaggaagcctcatgattttatccctcaccagcaatagaattccttaaaagcaggcactgaatctttctgtttgtctgtcacaccagcatggaaatgtgtctgccgtcagtcagcatgtgttaatgacaagatacataacaacggaggccaccattcagtggagtaaataattcagagaataagtcattacaatcagggagcacggtgtcacaccaggcctgggccgggaatcctgtctctaggttaaaatgaccctgcaaagtgcccccgacctgctgccctttctagactgttgaataattagaggatggggcctgccttgttcctctgtgtccctgacacatggcagggacccagaccctgactgtttagagggtaaacaggggtaaaccggtatggaggtgcaatgcagtgagggggctgggctggagcttagggctcccctactgttttcacgcagacctgtaggcttttcatgtggtgtttgctttgttgatggaaatgccatatgtcaggtactgggaggctcagtccctggggggtggaaattaaattgattgttttcaactttgtctagccagcttggctcccctgagcattctaaggtttaggctgaatgactttaaaattttaagactaaaatttttgcctcctttccaaaccttagtaaccagacaggctcaccttctgcccagcaagtcagatttacgtgcctttaaagtgtggaattgtggctacttaaaggacagaaactccggagcagctggcactttttgtgctcaattggtcttctagcaccctgtttttagggtgagaatttgtggcattcagattttacggagtagagctcatgaagttgatttcttttttttgagacggagtctcgctctgtcgcccaggctggagtgcagtggtgcgatctcggctcactgcaacctctgtctcccaggttcaagcaattctcctgcctcagcctcctgagtaactgggattacaggcatgggccaccatgcccggctaatttggtattttttagtagagatggggtttcaccatgttggacaggctgggaagttgaatatttcaggtggaaatggactaagttgcagaggcgagtatcccaagcttagatgccagaagaaggaagcgttggtggtttctgagaactctgggctattttgataaccacctggggcagttaatccaaaacaggtagtccagaccttcagaggaagccagatcggggctgaggtgtgggccgtctgggagggcgcttctgtctgtaccccttctcctaccttgcccttgtttcttccttcgggaggtagaattcgctcaggttgcctctgcctcatctgcccctctgcctgcagggctgggggtttagggggtgggggggctcccatcctacttgcggacagaatagctggcacctggacctgtcatctcccagctcagcctctcccggggcagctcctcttgtcctccagggctgccctgacactggtgtgacctggggcaagcggcccaacccctcctagcctgttcctcttttgtcagatgggggtgatgactgcactc

SEQ ID NO: 77538 - DNA, 1050 bp, Homo sapiens
agttgtttcttaattcatggccatttatttacagagatgtgtgtttatgagcccatcttggggagcacaaagtaagcaacaaagcttctgggagtggaagctgagtgatcccctgatcggagggcaaggggtctgaatttgtgcttccggaaaaattatggctgaaacgatgaatgttaagcttgcagaagccgcgagtgagctgtgcttggtgttcccggtgcttgtcgggctcattcttagttagctctcgttcagctccgattgaaagctgcacttgtgggtgatgagtgttgtgggaatcgagtgatgcgggcgtgaatgaaggttggaaacacagctcactttatggacataccctaaacgccaaagtgggaggaagtggcaggaggaaccagttccttttgtgacagaaaggagagaaatggatttctcaagtcgttaaaaagaaaaaacagaggtttctcctttgccttgggtttggtgttagatgccaggatcagcatgtttgatgttctcactggtttgtcaaaaggagtttctgaagaagaacttgcccaggcaggctctgcctctccgtgaagccggctgcgtggctcacctccagggctcgtaacagtttttgttattcagctcttctttggggaatggcagagattctctgctgcttcgccttggcatccagggccccttgatccttcgagatgtaattgtcgcgatataattgtcgtcttatttttctagtaatgagaggaatgtcgagggaaggaggatgaggaagtgctggtcttaaattggtggtttcagccagtactgtaaaagttgaaggggccgcactctgtacccccagttctgagttggtggtatttaggggggaggcagagatttcagataaagagtcaaggctgccacgttccactgggagggttctattggtttgggattgggtttcggggaggctaagggttgaggggtggtaattctacatgtaggggtgttctgtaggggaagagatggggcacactgcagctctagggagaagcctctggt

SEQ ID NO: 77539 - DNA, 1381 bp, Homo sapiens
ctccagtctgggcaaaagagcaagactccgtctcaaaaaaaaaaaaaaagaaatgtaccgttttaggctgggcacagtggctcacacctgtcatcccagtgttttgggggtctgaggcaggaggatggcttgaggagttcgagaccagcctgggcaacatagtgagaccctgtctctataaaaaaaattaaaaaaaaattagctgggcctgtagtcctagctgcctgggaggctgagacaggaagatcccttgagctcaggagttcgaggctgtagtgatctgtgatggtgccactgcatgccagactgggtgacagagtgagacctgtctctatttaaaaaaaaaaaaaaactaccatttttctccttctgtctttcttgatatttcacatatttttctttgttcagcttttaattcttttaatcttgaaatatatttggctgggttggttttatacagtataacatttggggtctgcactgatatgtggttggtttttgtgggtgctaggaacggtgggaatggaaacagcactgactgagggcctgcggtgggccaggtgctcgggtcagggagcagaaaggcgatgtggcccacctgaggtcctggcttagcagtggcaggattgggatttgacttgaaccacaactgccacagcacagcctcatggtcacctagggactggaggacaagatgctgggtcgtggctgggaaaggaagtgtggcagctgctgggagatgcaatttccattctcgtgtttcttcccctagagatcccaggcccacaaatcaacgcatcaataagcacgtcaacaatgatgtgaaccttcgcattcagaatttgaccatcttggtgagaaacattaagacctactaccaggtaagggcagttctgctgtcgggaattctgatgtgtgtccatcagtatcgtcactgtcacggttttcccacaggaggccgggaggaaacggtgcttatgtttaggcctctacttgttgacagttggtctgctttcatgtgaaccctttgttggggcatgtgtgaggatgagatggtgcgttgatttcctttgtttggtgaatgttctttgagctgtgtgtagcatcgtgctatatgctgtgaaggtcccagagaggagcctcagtttgcagcctctgccccgagaatgcagttgagtggggactggctggaatgggcttcctgaaggtgaccctgaggtggttatccgcagcccctggctcagtggctctttatacaggagccattcaagggttgagggagaggaggaaccactggagggttatgaagatgggaccaagaatgtgattaacccacctctagctgcaagcaggagcactgggcttagggagcgtctgtctt

SEQ ID NO: 77540 - DNA, 1066 bp, Homo sapiens
cgggtcccagtggtcactcctgtccctggggtttagccactcccgaaaaggaccccattcttcccaaccaaatatctcatgtagtttttctgaatccctgagaccagccggtggatggcggtgacgggtggggaatggggggcgccgaatgggaaagcgaacagactggggtgggcgcactgatttacaatggatttgagacgtgagacatttattgaaaagtcctttttatttttatttcttccgctctggaacgcgggagaaaagtggcgaggaagtttttcctcctgtctcgtgtctgttgccccgcgcggggaggggagacaggccctaggagaaggccgggcttggtgcctgctgaagggtggtgtgggcgtgggtgacccccttctgctcacactgacccgtccagtctctgcctgggagagctttggaccgtttgtgcgcacggggtgacttcctgtctttctctcctcgtccccctccccgcaggtgaaaacttttggcccgtttggaagcggcagccaggacaacctgactatgtacatggatttagtggacggcatctttttgaaccaaattatgctgcaaatgtaagttaccttcttctcggaggaaggaaagaatggtgcgttagaaagtttgagagtagaaatggagtggaaggttgcatggcggggtgtgtgtggggtggggggtagttctctgaaggtggagacgctggtatctcagtattaacgtgcctgttggacattcgtaggtgtttgaagaactccaggacagtgggtctggcagttggtttgatgaaggaaatttggaattgaatgactgtcatttacgtggtgtagatagtgcaattgacttcagactcaaggacttaattgtggtttgagcaatgaaatgaaaaagtccccttttggagggcaaggaactgtaacggagagtgtctggttacaggaagtgtcggggtgggcccaggcatccgagggttactgtaaagtttcattttagatgagggtgtctgtgtttctgagctcctttacatttcatcttcctttttcagttg

SEQ ID NO: 77541 - DNA, 2225 bp, Homo sapiens
cccagcactttgggagtccaaggtaggtggatcgcctgaggtcaggagttcaagaccaggctggccaacatgacaaaaccctgtctctagtaaaaatacaaaaattacccaggcgtggtggcgggcgcctgtaatcacagctactcggcaggctgaggcagggagaattgcttgaacctgggaggtggaggttgcagtgagccgagatcgcaccactgcactccagcctgggtgacatagcgagactccgacttggaaaaaaaaaatttttgctttaattctaattaactcaaagttttcccttattgtaaaaaagtatgcatgtttattacaggaaatttagaaaatatgtaaacataatgaattgaagtttaacacagtcccaccacccagaaataaccaccgttactatgttggtaggatctattttctttctccagccagaaaacaccagtgtttttatatgttttattttctgttctttaaataatccttatttcttaacagggaggcctcgtgggtctggtagattatcctgatgatgatgaagatgatgatgaggatgaagataaggaagatacgttaccattgtcaaagaaagcaaaatttgattcataataatggcaacggcctaggatcagtacctgttgaaaaaaactggttctccacccctcccccatacaaaatccacaacaaagcgcagtggtctcttgtgaatgactgacacagatcagcctcttacacttgacttctgctcatcaagtgccaattcaatggagcaggaggaggggatatcatatatttaggggaaagacttaagcctttgagctctccagcttggaccacacattgcccttttctcagggaaggaaatggaaacaaaaagccaacagggcaggggttttgtaagtggaactctggattgactggtcagttgctacaatcagaatatgctttcttggaccatgtttgagactcagaagaatgggcctttctgccataattcttcactagtcaagaatgccagcagtttctttgtataaagagacctgcctttaaaatcatacattctgaacattttagtcaagctacaacaggtttggaaaacctctgtgggggaggggcgagtataaagttttcctcttttttaactgttccctttgcccttcaaactgcagatatttttttttttaagtggggacttctccctacttgattaaagattgagtggaattctagatgtggtcatttgtgtcataatttttttgttttattttgtttttgattttttttttcctcccctgagtgtatgcttagttgttgagtatatatatttgggaccattaaaactttttttgatgtaatataacctaacgttgtgctggtacctgttttaccatgtgtaatttttgttctacatcacagttcttaatttgtttagagttttatgaaagatggtatagtttttattgacaaaagcaaagtaatcttacaactatgtgcatacaaaagcaatactattttgtgactaaatattttatattaaaatttacatcagcaactgtcttgagaattcagggaaatagaatggaatttaaaacttcaacagttttgttaaatctagaaacatgaaattagtattccaaagagattctgaaatttcttttcttggggaaatgacggtacattaaatcaaaattgaggatggatgatttaaaaacatttgacttttgaataataaaaagaaaagtgaagagtaagagaaattgtattagttgtatgtttcttgtttttgtttttaactactccctttggaataccagtttgacttgtaagtggtggtttctaaataaatacctggccagaggaccatcacctgtcaccttattaaaacagtatttttaaataggttctttttgttgtcttagatgtgatcaaattatttcaaggaaaatgaaaataattctacttaccctcactttttaaagtgaagagtttagaacttaagaatatattttcaaatgtgaataaaacttcatatccaggaaaggatgctattttaagtatcatatactttaagagtatctagcaagcgctgtgtgcttctctgtcttgtcttgtttattcctcagtaaattacaatggtggtaccaaaaacaagactatactgcatagttggatagaaaaccagaaagtgtcaacttgctacagtcattaaaagtttt

SEQ ID NO: 77542 - DNA, 2287 bp, Homo sapiens
ctttgggaggccgaggcaggcagatcacctgaggtcgggagttcgagaccagcctgaccaacacggagacaccccatctctactaaaaatacaaaattagccaggcgtggtggtgcatgcatgtaatcccagctactctggaggctgagccaggagaatcgcttaaatccaggaggcagaggttgcagtgagccgagatcatgccattgcactccagcctgggcagtaagagcaaaactccatctcaaaaaaaaaagacccatagataaattggggactactatagtagccagtgtacgttattcccattttttattgtttggttatctctaagattatgtagttttattaaattaagctatttttggtgggtatgaattgattaaattaagcctcatcttgctaaaatgacattttcctatcattttttcattactattcttttctgtaggaagatataaaatcattaactgctcatgtaattgaaaattactggaaagcactggaagatgtagattatgtacagacatttaaaggattaaaactgagatttgaacaacaaagagaaaggcaagataatcccaaacttgacaggtaaattaccatatatttaaacctattcgttcagcatcaagtcgtatggtagtggctttattgtttatttgatattatttggcttgacaaggaacagggaaatcagcagatagcaaatagaaattgtagcttcctgtaagggtcaacataaatgtttccctgaagattaggctggttattagtataatacctcaggcatgtatcaggctagataagggaaaaaaaaaaaaaaagaccaaacagtggaagtgaggcttcatgtgttccaaataaaatcagaggattatattacttgctttgaatttacaagttactaaggttacaaattattatttaaaattttgtacattaatctaaatacctggatttacattgatactttaatatttgtaaatttcatgttaattccctatgttaacaagtttaataagtcatctgtaacagtacaattaagtccatatatgattgtatttactctttcttccctactcatagtatgcgttccattttgaggaatcacagatatcgaagagatgccagaacactagaagatgaagaagagatgtggtttaacacagatgaagatgacatggaagatggagaagctgtagtgtctccatctgacaaaactaaaaatgatgatgatattatggatccaataagtaaattcatggaaaggaagaaatgtatgttggaaaaaaatgggcaagagaaaattaaggctttcttactctagatttattcttatttcttgacaaaatgattatttgcttggaaggtgtgatggcatacggtttaaagactctattgctttatgggatgtgactgaatagcagtgttgtgtaggcataaacttaagttttcttaatttgagttgaataaggaatatactatttcaggaagggtagggatactaaatatgattctgaaggtttcaattcttctctggggtaagatccaatgaatggaattgtggttagtattttggtaagcttcttttataaattgaacttcaatgtttctacccagcgtagtaagctagttaaatgtgttttagtgttacctcatttggggaaatttaaaaaagaagtatgggggacgactattgacagtattctcatttttagtaaaagaaagtgaggaaaaggaagtgcttctgaaaacaaacctttctggacggcagagcccaagtttcaagctttccctgtccagtggaacgaagactaacctcaccagccagtcatctacaacaaatctgcctggttctccgggatcacctggatccccaggatctccaggctctcctggatccgtacctaaaaatacatctcagacggcagctattactacaaaggtacattcttgactcccattttgcccccttttttcccaattgaagctttctcaacaataattttgactaagattccctttggttactgccacctagaactgatttaacatccctgaactagaggatgagtcccccccaccgcttgaacttatataaaggttgagaaatttctgaaagttttttttatgaccaatgcaagtctgcatatagtgtgaattctcacttgggtattttggattttagaactgaaacttcaaatttgtatgtcaaaacatttacagaaatgttcaaggttttcagttattcttgaataaatgttcctaactaatacccagataa

SEQ ID NO: 77543 - DNA, 2022 bp, Homo sapiens
cagtaagttcctttgtcaaataaccttaaaaatacaaactgaaaatattgttttgggaaaataaacccttgttaggctttgacttatcacacagaaagatgcctcttagtgtttaaaatgtcttagttcaccatgagtatgtttttaaaaatattcagtagtttaaaaaataaaatgcaattattattctataaactatttagaaactccctgcccagagtgtttcttaagaaagatacactcttaaataagttgcattgttaaggcagttaataatcaactgtacctaattgggcattcacttgtggacctcttttctgccaactaaagaaaaattgagctgctttactcctctgccttcccacccagaaaccgtgtcagcatggttgcctggctacctgctcatgaaggacttgattaatagcaaattggcaatttaacgagccacttccatgatctccaaagaaaccaaaatacaaacacaatatttaatcttgccaaccgaagacgatgtgactgcatgaagtgagtatgcttttttgcactgtttacaataactggggcattaacttactgataattccatttaggtaaagagggctttgttgaagtctagctgtctgagtatatttgtgtcttgatgaatggtgacttaagtaactccccatacctcaagatgtaaatataccttttaatctgtaagttaaagcctaattaattatgaaaatgaaaactagaaaaaaattaaaaagcatactcgctacaataagcatagaggaccacattttaaataacatcctctaaatttatttttaaactatggcaaggcaaattttgggtcatgcagatttttgtgggttgatggcctttctacagccacatccacaaataaataaaattccatgaactacaatgcaaaataataagagtgtccaaaaatattgaagatcaaattatacagtggattgccctaataaaacactggttttttctattaaggtggatataaaaggtcatgttgaattttttcatcttaagtagtgtgataggttcattcatttgtcttagctcttattttagatgtaaattacattttggtcattagtaactggtttattttcaggatttttctggctttctaagacttgtgttctatgatgacatatactacttttagaagacatttttctgataacattttcataatccttatctttaggttcacagttccggaagtgcaaacatcataaataattattgatatgtgttaaacagttttttttggtttgatggttatttttgtttggtaagtctaaagtatggaagagtggtatgtgatttaaacaaccatgcctctgtgtttcaggtgcccttcgttttaaaagaaagattattggattaaaagatgagttttacaaccgctacataatgaaaagttttttgtttgaaccagtagtgaaagcatttctcaacaatggatcccgctacaatctgatgaactctgccataatagagatgtttgaatttattagagtggtaggttctgtatttttaattagaattttcattttaattgtttgagaaaattgaatatgcattacctagtattttggcttgagatgataatatttggagagatttaaaaaaaaaaaaaagtactaaaagcctgtgagagatttgagtcaagctacatcttacctctcagcagctacaaatctgttatagcaggggtcctcaaccccttggccgcggaccggtccatagcctgttaggaaccaggctgcacagcaggaggtaagctgctggcaagcaggcattattactgcctgagctctacctcctatcagatcagcagcagcattatattctcctaggagcatgaaccctttggttaactgtgaggtggaacaatttcatcctgaaactgtgctcccccactcccaccccagttggtggaaaaattgtctttcatgaaaccaaaaaggttagggactgctgctttgtaggatggtcacagtaatc

SEQ ID NO: 77544 - DNA, 1966 bp, Homo sapiens
aaaatttcacacaattggtaacttgagttgtgtcttggtcatgggagagtattgcattcttggttgaatacatagttaagatgttaattgggtaaaaaaaaaaagtgtggcatgtggacaaagtatacttggtcttttttttcttttttccttttttttttttttttttttttgagacggagtctcactctgtcgccttggctggagtgcagtggtacgatctcggctcactgcacctccacctcctgggttcaagcaattctcctgcctcagcctcctgagtagctgggattacaggagcgcaccactacacccagctaatttttgtattttagtagagatggggtttcaccatgttggtcaggctggtctcaaattcttgacctcgtgatccgcctgcctcggcctcccaaagtgctgggattcaggcgtgagccatggcgcccagcctacttggtcatttttaaagagagtcaggacaatgcagctgaaagcaaaggacttttctttagttcagttcatcatttcattattttgcttgcagtattgcaaagaaaatttctcataatctaatgagaactttggagagaatcttttaagtaaatgaaagtttattgttggaaactaagtatgttagcaaaatcttagttatgtttcattgttgatattttccaaactgagtcaggttatcattaaacctaactctttgaaaggacctcttggtgtacctctcttcccagggttgaggatatataagtatcttcctaacaaagatgtctgtcattaggaacaagctttttagaactggctttgtagtatgcaataggagtttttatcaaagatatctaagaactaaaataaatttgaggaaatttaagatacttgtggttcttctgaaaaaaagtgtacattgaagtattaggtatagtattttttaaaggagggtttattgatatttaagtttaggtgcacatatataaatgcagacagtaatgagcaattaaatgtaacagtttggggatttagggagcttttaatttttttatatttgctgctgcttaattattatactttgtcatctttaaagacaactagttaagtatgtaggtgtgtctagcaatcgtttctaaactcggtctttataggctagatatcacatctatcaatttccttggccttattaagttccttggatcttacattgtagccctttagctcatacttttatgttgtttgagagtgttttgttgttaaaaacatggaaatcttaaaaaggagtgaaataaagctttattatagaggcatttattcaattatcattagttacaaggtaaaaagtcacaaatttattacatgaaattcacgttttataaagtacagataaataatgttttttagagatgattgaaactaagcacaagaggttcctggaaatgttaatgaaggttagagatgtgagtggaagcagaatgtgctttacattgaaaatccaatggcagtgccaacttggcctatcctaaaagctttctccactctactttgagtgacttgacttcctagatcttactggtaaaattttgaaagcagctttttactcaacagcaaagaatagtggttggatgtttttgatgcaggtttcttttaagggatggatttgagtggtaataatacaaagttcttgatataaaatgtaagagcaaatggaaataaggaccaaaacaaaaagaccactagaacctccttctatctaccccagcagtttctggatagaagtgctctggaagaagtgcagtggtgccatctacattcccttgtcttagtgaatttcaggaaaggagtttttcactcacctaggaactatagtcagacaagaggggtgtgtgtgtgtgtgtgtgtgtgttatggtaggacacaagtctccacaaagcccgcaaagttggagtacaaattcttaaaatagtaatac

SEQ ID NO: 77545 - DNA, 1280 bp, Homo sapiens
tttgggaggctgaggcaggcggatcacctgaggtagggagttcaagactagcctgacgatcatggagaaaccccgtctctactaaaaatacaaaattagccgggcatggtggtgcatgcctgtaatcccagctactagggaggctgaggcaggagaatcgcttgaacccgggaggtggaggttagtaagacgagatcgtgccattgcactccagcctgggcaacaagaggcaaactccgtctcaaaaaaataaaataaaaataaaagcaacgaaagtattatgatgttctaaatcctacctaaatattcttactcttaaagctatggtcataaaacccactggctttcttcaaaaggtagattacattattagaaagttgtaaagatatattatcaccaaactaaaactttgcttttgctttattcagaggaatttaaagataatagacaagaaatttctatttagggctatgtccctgtaccacactttagggaatgaaacactgtcatatgtcctgtcagataactgagttaaacatttcactttgcagttaacaaaacagctagagcctaggtataatgctgtggtatgtgtcttagtttttgctttttccgttctctcataataagtgatcctgagtatgtctatttttctctccaggatattttgctcatcaacctcattatagaacatatgatttgtgatacagatcctgaacttggaggagcagtccagcttatgggcctgcttcgaactttagttgacccagagaacatgctagccactgccaatgtaagccatgagcatttcccctctttttcatagctagtatattgtgtattgctggtaggaaccagtgtggttaaagttcatggaattgttcttgtttccttagaaaacagaaaagactgaatttctgggtttcttctacaagcactgtatgcatgttctcactgctcctttactagcaaatacaacagaagacaaacctagtaaaggtaagataattcaggttggtagttaagttctctgttcttgaatgctgaattcaaagttggtgttaagtcagtctttttaggaggcagttagtgggaggtagaggctgggaggacacaccttttaaaaagtagtagtctttaaaagttcaaaccatcaggttaacatagaggtcttaataatttggttggttggttggttggttggttgtttttatcaaaagcaacctggagaattaatgatgtattttgaaaagaaaggttcatgacaaaaatgtccctaa

SEQ ID NO: 77546 - DNA, 1155 bp, Homo sapiens
taggttccgtatttttataaatacaggaaaaataaatgttttttgtctgcagggcatggatgatacacaggtgcgaagtgctgctactgatatattctcatacttggttgaatataatccatccatggtacgagagtttgtcatgcaggaggcacaacagaatgatgatgtaagtaagaagttaacagagcaaaaaataaccagcaaggtaaatattatttgtactaatagtaagtatttatacataggaagctataactgtttttattattcacttttaagatttaattgttgctgtttgggaaaagtgtagccataatatcagacagcttattgttcccctaaattggttcctgtctcagtttatcaatttgtcctacagcaactatttatgttcatttaaattgccttttaaaatattcatgtcagtttttttttgttttgttttgttttaattctgaagtcaacttgctatattgtgttttttaaatcatttagtcaatcaattcttgtatctggggaattaagagtaagttacctaggaaaacattgactttagggtagattctcaaaatcgccaagaatgaagaaatgtagcacagtcccttaaaatatgaagggtgctgtttctttactgcctagccatagagaacaagctgttacgttgttcacaaacactcacgttagcatctgagatataccagattttaaagtagtagagaatatatcctggtaatgtgaagggtgcgcctggatcacatagtgcgtgacatgtgagagcactaaatgtgtgtgctctcctttattttaaaataattgaaccaatgattctgattttttcctgcttcccccataacaatttggaagcaactttttacgtaagaatgagtaagaaggacctgctctcaggtccttcttaagggaggaggggaataaagatcccctaaggaaaaaaaaaaaatctgtttagaattccagcctgtggtatttttacgaaataggaaaatagactgtcttactttttgaaaagatcctatttaatgtattgtgatgtcaaaaggaaatggaatgccatgtaactgctatgtttaagtttttatttttatagtgcaggataggtgcaaaaaagcaccagtttgaactgttgtgtcatgt

SEQ ID NO: 77547 - DNA, 1830 bp, Homo sapiens
tttctacaatcaattgatgttaaatattttcctttttgcttataattatatatattttctgtgatcataacattatgatatttggtgtttatttggtcttcacctcagagttaaatattgaagagtttggtggtggcagtgtcctttagcacagtcctaggactgtttctgagacttgccttggtctgctggaaaagagggccagggatatgagatgttagtggctgttttagcatcaggcttctatgttgtgggtctgcagagggctgtttcgtaacagtctcacttagtttagcctgtcctagaaagttgttcttgccagcagacctcatactttatagggaagctcattctgtttttgaactttgactaacttccttaaaattgaaagtatacatatttggagaaatgtaatgtagaaaagtaggcagttttgtcttgaaaatgaccattataggtttcttacaacatttctagtattcatcttagagtagcatttaggtttgctggtcacctgttatctattttgtcagcaattaaattttttttcataggttcaaggaaaggacccttccgtggacatcactcaggaccttgtggatgaatctgaagaggagcgttttgatgatatgtcatcgccaggcttagaattgccatcttgtgaattaagtcgccttgaagaaattgcagaacttgtggcatcatctttaccttcacctcttcgtcgtgaaaaacttgcactggcactagaaaatgagggttatattaaaaagctcctggagctttttcatgtgtgtgaagatttggaaaatattgaaggactgcaccacttgtatgaaattatcaaaggcatctttctcttgaatcgaactgctctttttgaagttatgttctctgaagaatgtataatggacgtcattggatgtttagaatatgatcctgctttatcacaaccacgaaaacacagggaatttctaacaaaaacagccaagtttaaagaagtgattcccatatcagatcctgagctgaaacaaaaaattcatcagacatacagagttcagtatatacaagatatggttctaccaactccttcggtctttgaagaaaacatgttatcaacacttcactcttttatctttttcaataaggtagagattgttggcatgttgcaggtgagttagatcattccttttttcatatttcaagagatgcagcgaaaacaatttgctccttttaaatacatacattgagttttaattttgttaatgtataaagttaagtattgtgagttattttaagagattataatatacaataataatacgagaccagaaggttactctatctggggtaggagaggtaagtgtgacaaatgtagtttgaagaaatggtatgaggggatgattttttggatacagggtcttgctctgtcacccaggctgtagggcaataatgcagtctcagcgactgcaacctccaccttcgcttccctggctgaaacaatcctcccactgcagcctcctgagtagctgggaccacaggtgtgcaccaccacccccagccaatttttgtattttttgtagagatggagtttgtcatactgcccaggctggcctcaaacctctgagctcaagcaatctgcctgccctggcctcccaaagtgctgggattacaggtgtgagccactgggcccagcctgatttttttttttttaagttgaggtcttgctctgttgcccaggctggagtgcagtggcacagccatagcttattgcaaccttgaactcctgggcttgagccgtcctcccacctcagccttccaattagctaa

SEQ ID NO: 77548 - DNA, 1001 bp, Homo sapiens
ctcatctttctgaatcaaacacttccactctggatacagtcttcctttatgccaatgtgtaactcaaacctgaactcactttgtcattgtcatgcctggctctcctttaatattgtctgatctttacctttgtttggtctttaatatcataaagtttttcatcatcttaataattttatcactagctgctttaatattcttttctgatactccctttcaacttttatatagtttatgttcaaggtgtcatttctcagtcactctttttatgggttctgtctgaacttctcaatcattttctagatccaagaaagtcattacattttgctctctgagatattaaatgtttttctatttcttgaaccatgttcaccaatttgctcaactcaaaaagatggcattcttaatataataagggcactcctctcttttcatttggtttgctaatcaaaatctaacatttttctgtggataaagtcatagtttgggtatcaggaacttaaaactataatgagagcttacataattaacaaattcagagccagtgtgagaccatgcaggtacaagccatgaatgtgacttgcctcctttcagtgctgctgtccacttggttgaggtcaagaccatatcaccttgcagcacatttcaagaaaagtattccaggtcgtcatcttttctagtatctatcagtgcatctgttcattacgctaagcaatttaagtttcttggcttttccatataaggtctaatttttttcattgctttaccattctacttggccttctacttgctttagtgttcactgtcccaaattctagggccaagataacaaaatttgtttcatttcaaagtttatccttgaccttttgttaccaaaaaaaatgccttactttaaaatgtagtcaatataagttacctttttataataagagcccctccagtggcataaaattaggttttatgacagattttcaggctcctagagggatcatgaaggctac

SEQ ID NO: 77549 - DNA, 1404 bp, Homo sapiens
ggattacaggcgtgagccaccacgcccagccaaatatttttattataccatgcatattgtagaatatatgctcttggtactatgaggaatataaaatggtctcagtaagtattgtatgtgcagtgtcttgctgagattacatcttaataaaaactgttgaactgttcattaaattttcattaaagttctgtctagatggccaggcactgtggctcatgcctgtaatcccagtgctttgggaggccaaggcgggagggcccaaggccaggagttcaagaccagcctaggcaacatgacaagacctccatctctacaaaaaatgaaactaagaagttctgaataggaatgaaagggtggtaggtgctaggagtttgctgcttcttgaaccatagcactttgctaagtttaaaaaaaaaaacaaaaaaacctatgtataggtaaatgctcacgtactacaaatgtagccaataatttcaagggcttcatggacctcagaggcccctggtgaaaaacacctgctgacaatagagggaagagagaaggagttttattaaccctatcgtcctaacatgccctagctattttatgcttagatttcctctttggacattttaatgacagcataaaatgtaagtcagtatgctcggatagcgttggtataattggtataatgttttgtttttatcttttgcaatgcatgaaaagaatatatttcatatattggtttaagttgtccttaaggaaacattatttttgttttatagattgggggaagtgaagtgtaaaaagtcattgttttgaaaaagaaagacattgataattgccagtattagtgttgcaaaaagtaaaaatgagcacagttttatttccttttgtttgttcattttcgtttgtgatagtgtatgttaatcattcagactccttttatgtctccaaaggacactctgattgtgtggtctgaagcagaaaattatgacttggcccttagctttcaagaaaaagctggatgtgatgaaatttgggagaaaatatgtcaggtaattttttaaataaaaaaatcaacatgctttctttaagtgtttagttttttgccatgctttcaactaatgcccaagagtttaaataaatttcaaattgatcttttaaattcactgctgtctttgaacttgatttaaaggaaggtgtaatttattgacactaaactctctagctcatacctttgctgaactccagtgttttatatccacctgcctttttgaaactttctcttttcatgttcactagcatctcaaatttagtactccaaaaccaaacataatcttctcacatatatctatcccatctccttctaagtgccatgcagttgctgaaatcagaaacttgtggatcttgtttatccttcca

SEQ ID NO: 77550 - DNA, 1047 bp, Homo sapiens
agatggggtttaaccatgttggccaggctggtctcaaactcctgacctcaagcgatctgcccacctcagccttccaaaatgctgggattacaggcgtgagccaccacgcccagcctactttttcttatttttattttattttattgttattttatgtttgcagaggcaaggtcctgctttattggccaaattgttctcaaactcctggcctcaggcgatcctcccacctcagcttcccaaagtgctgggttataggtgtgagccaccgcacctggccacctgctgctttttcttgttatgaatgtatcactagcacagctcttaataaccaaaataaaatcctgaaaattgagcgtaaagagaattgaaggggcactggaaaatgtgttttgattaatctggcaaaagttggataaagaggaagaagattaaaacagtattttctccaaaatgtgagaatgcttatctgagcgtcctaagccaaaaccagtttttgtaaagaaaaaaagcccaaagaaatggggtttgtggggaatacaggtgggaaaaaataatatggtgaatgtttagttaccttaagcactcaaaggataagaaagagattttggattaattaggtcacctgtcctagacatagttgggagggttggtgtgaagtggaaagctgttcatgtgcataagacatatacaaattgagttatcataacttggttaatttactgtgttcggtattacttggtactgttctgagcacacagtagtgaatggtcattaaatcattaatactggacagcattcataaaacaaatgaactttgatgtaaaagcaaactaaatttggaaatgttaagagcactcttagccatctaaccactatttggaatgggtaaagcaattgttaagtgtaatagaagaaatgaaagctccgtatgagagacagttgcagagaaaactgctttttctcaaatattttgggccagagtttgtcttcaggtagtacttgcaggtataaactagaactggttgataagaggagaggggtatggga

SEQ ID NO: 77551 - DNA, 1024 bp, Homo sapiens
ttaccattttggaaatagccacaaatctctcttcctccattttgcaggttggaggttaaatgactaaaacaaaatgactttaatttttatctagcagggagagcttaactaaattactgatgtgcccttgtaaatttaggctgtaaggaaaactgaatgcaaagaatggacttaggctgggtgcggtggctcacgcctataatcccagcattttgggatgcccaggccgacggattgtgtgggctcgggagttcaagaccagcctgggcaacatggcgaaaccccatctctacaaaacatacaaacattagctggtgcggtggcacgggcctgtagtcctatctgctctggaggctgaggtgggagggtcacttgagcctaggaggtggaggctgcagtgagctgtgatcatgccactgcactgggtgacagagggagaccctgtcacacacaaacacacatacacacacaccatggacttagaaaaaattccaggatacttgtgaaatactgtcagtaatctttagtcgatgattaacatttcttgtcacatctaaatagggataataagtcaaaatttactgactacctactatgtgccaaactcttttagcagtttacttatattgacttacgtaattcttacaacagtgtctgatttagtgctattaaccatattaaactcccatgttactgtctacttgcatttgctgctttattagcctgaaggtttatttcaaagaaaatgaaaattacttttagcctaaagatattttcggccgggcacaatggctcatgcctgtaatcccatcacttagggaggccaaggcgggcagatcacaaggtcaggagatcgagaccatcctggctaatatggtgaaaccctgtctctactaaaaacatacaaaaatgtagccaggtgtggtggcgggcgcctgtagtcccagctgctcaggaggctgaggcaggagaatggtgtgaacacaggaggcggagcttgcagtgagccaagatcagcaccact

SEQ ID NO: 77552 - DNA, 1649 bp, Homo sapiens
cggggcaccgggcatgtgtcgtctggctacgtggagcggctgaagggcatgtccctgcttgtcagggctgagagcgacggtaagtgaagccccgcgcggcgggaccctcgcagcccccacggccctgggccgcctccctggttcttgcggggcatggcgctcgctccacgagaacagagggacggctggggagggcggccacctcgggggaggacgggccccaggtaccccagtcttgcgggagctccccggagagcgcttgaaatgtttcctttctctgagtgcctggtggcattttgggtacgaggagagccaagcgtgtttgagctgtgccgccctggagtgtggagaggtcgaggacctgagatagggagtccggagtgtgctgttcttttgcactagagtgaccttgagaaagacactgattaatccgatctgctgccttagttcacccatctgtaaagcaggcatgaaactttgcttggagctaagaaagttcttggacctttcacactttgaagaacgttttgctgtgctttttttgtttttctttttaaacatctttttgctacatgtttctgatcgtgttgaagcttggcaacactgtatctggcaactctacactaagagaaaacgctttcccttgcgaagattttcgttcaccagtgttggttgtcttttttatagtaatgcagaattttgtgtgtagcttactatataaacatcttgcaaagttggaatcatatgagctttttttgattgcttaaatgggtgttcataatttggttaacaggtgcagagaagttggcagataatttttaaaacctttcggatcttccctagtgtttatgcttcacaaattttgaaacagccctcaaggttcaaagactaagttgtttgaaaataagtgtttcacgttttttcttttttccacatgtgctgtttcatattttaaaaggcttattctctgtagggattgccactgtttttggcgatatacagtgaatttcacttaaaatactcaagtggggtaaaactattctcaaattgttacttccaaacgtgaaagtaagttatcttccacttctttttgtacattagtttatattttgcagttgctaacgatgccagtttattatgattgtagcgattctgtatctgaattattgcaaactaatttcaaggaattttcttcaattggactctccccagaactccaattccatgaaaaaccaacaagactagcccttctgtaattgaagactctgggaatattgatgttctatttaaattgaaagtggtaatctggagtatattgcccacaggttataaggttacccaaagtaacttaaatctggagagaaattattttcttttggaggcatttaaaaatttttgaatgttgggtgtatttttctgggcctgagttattggcttcttaaaatacaatttgaatgtcaagtgttagtgtaattttgtatgtgactcacataataacctactctagatctttcacacatttggaaaactttacatagtatgttggaaggtatggactttttgtatcagcttcttatgagatgaaagtatccgtagatttctttttaattttttactttcaaaaaaataaaaacaggattttgccctgt

SEQ ID NO: 77553 - DNA, 1025 bp, Homo sapiens
cccgggaaaacgctctcggaagcgggtaggggcccaggcccacgctgcccggcgtccgcaggccaggggcaggggcagaggcagggacggggcaggaacaagggaaggtggcggcgggcggaggcgaggccgaagcgccggggcccgcgggcagaggccgcaaacgtatccacgcccctcgtgcatcctggagcggggctgatgacgaacacagggcgcgacggacgcacacaccgcccagcgctcgcacgacggtgcgtgcaaggaggcgggagggagcctcgggctgtcaccggcgcaatctgcgtcccgcctcctccgctccctgcgctcccgccacctcggcaactccgcgcccgcctcccgcctccgtcggaagcctccgccgcagtaaggctcccggtctcgctgctgtctctttaaatggtggggctacgagccgcccctgcagctgctccctgggtggccccgcgcgccgcttttgaggggcgaaccaagatggcggcggttttggctgtgtgaggaagacggaagagacggcggcggagggaaaccgacttccactagtccgggtcgcttgggcggccgggggccctcagagtctcccgggcagtggtagcagttgcagcaggatcaggcgcctgtcggcttctgacgtttaaaacagggggagcggaagggagccactggccgcggtggcagggccaggtataaggaaggaaaatatggcggcggcggcggcggcctgaggaggcggcggcggcgcgggaagctgcttcgcggagatcatggcggaggcgggagcagggcagtgacgggagccccgagttcctagcgctgcggggcgggaggctacgaagcgctgcgcggccccctcggggctgccgggcgccgggctcgccaggcctggacaatagcgccggggagccggaggcgaggaaaggcggcggcccagagctcggtccctggagcgggccatgcaggcggcggcgcggccccgcggcgcccagcggcggcagtgaggc

SEQ ID NO: 77554 - DNA, 1057 bp, Homo sapiens
aggttaagacgtggttccagaaccagagaatgaaatctaagaggtggcaggaaaacaactggccaaagaatagcaatggtgtgactcagaaggcctcagcacctacctaccccagcctctactcttcctaccactggggatgcctggtgaacatgactgggaactttccaatgtggagcaaccagacctggaacaattcaacctggagcaaccagacccagaacatccagtcctggagcaaccactcctggaacactcagacctggtgcacccagtcctggaacaatcaggcctggaacagtcccttctataactatggagaggaatctctgcagtcctccatgcagttccagccaaattctcctgccagtgacttggaggctgccttggaagctgctggggaaggccataatgtaatacagcagaccactaggtattttagtactccacaagctgtggatttattcctaaactactccacgaacatgcaacctgaagatgtgtgaagaagagtgcaattgacattaatcaatttcagtctgggcactggctgaatccttcctctcccctcctcccatccctcataggatttttcttgtttggaaaccacatgttctggtttccattatgcctatccagtcaatgtgatggagggtggggtatggttggagtctaatcagagagatttctttcttttttcctgttggatcttcctggagaaaagacaggcatgtgcctgtagtcccagctactcaggaggctgaggctggagaatcactggagttcaggaagtggagattgcagtgagctgagattgcaccattgcagtccagcctgggtgacagagtgagactccataaaagaaagaaagaaagaagagagagagagagagacagacagagagggagggagggagggagagagagacaaaaaaaaaaaaaatagatgaagttcttgaatagacatttctccagacaaggtgatatggtttggatctgtgtccccaccaaatctcatgtcgaattgtaatccccagtgttagaggtgaggcctcatg

SEQ ID NO: 77555 - DNA, 1049 bp, Homo sapiens
gtcgaagctctgtaagaagaaaacactttgtgggccaggttagtaggagtttttatccttccttatatttttctatgcatttaaacagtcagttaacaaagggaatacaggataatattaaagtcaaatagagtacagttcttcagcatcataaatcaaaattcaattgctacaaaaatcgaaacttgtcagactttttgctttaatacaaatagttggaatttctgagcaatcaggtttatctttaaatatgtttttttctgagcttttttacttcaaaaacgatgagaattatcaatttttcagtactactgacttgttccttgtggaaggagggaacattaagtatttaaatcaatttcttaagtcttcgagtatcaaatttattttgtttaatctttgatttaatgtttaacatgggcactttttatattctcttacctgagttagttttgaattcctagaacatgtccattttaacagtggttgtgatattatttagttaatactactgtctggattattttaaaatcttggtacaatttgtataaaacaacataacacttgttaacttgccagtcctctaggaacttgtttcctttccttactctgaatagactagtggtagctgtccattatcttttaccttaattacgattgtttgaaccacatttaaattccaaaatctatattattggtttaaaagcttcaacttgacaagatattattaacagtctacatgaaatcctcaaattatatatgaattttcaaacattgatatcagctccttgatttactttttaatatatatttttacgtaaaatactaattaaaatgttgttttatcatttattatttggaaaagagcttgaatttaagaattcatataaccagcataattttgaagaccattaagcctttatgaagtcaattcagttaaagttttcgtatatcatcgagcctcaacttaacggtatgaatggaataggaaatttacttgagatgattttcatgataacatttgtggtgattccattctcttggctaag

SEQ ID NO: 77556 - DNA, 1017 bp, Homo sapiens
agattccagaagtgtttggtaagacccaagagtagtttatgtgtcaggaatttcttctaaaatggttaaataaatatcaaagtatgctaggtttagattattatatgtaacctatattcatatttgtgactttttttttcttttatatgcagtttctgtggaaagagattttaaagcagcagtcccaaatagtcaaaatgctactatctctgtacctccattgacttctgtttctgtaaagcctcagcttggctgtactgaggattatttgctttccaaattaccatctgatggcaaagaagtaccatttgtggtgcccaagtttaagttatcttacattcaacccaggacacaagaaactccttcacatctggaagaacttgaaggtaaacaataaaatagcagtatttaaaaatcgatatgtagcatttaagtgctattattttacttttatatttttaatacaaaattcatataaaatttttttattttactttttatattttgctctttctgtagaagaacttaatgtacagtagttttgaaaggtcccattttgaaatctgatcataatacaataatttgtatgtagaattggccttttttcaagaaataatatgtaattggccctccatatctttgggttccacatctgtggatttaaccaactgcacctcaaaaatattcagaaaaaaaaaaagaatgattgcatctgtactgaacatgtgcagacttttttcttgtcattttttccctgaacaatacaatatgacaactatctcagtagcatttacattgcgttaggtattataagtaatcaagagatgatttaaagcatatgggaggatgtgcataggttatgtgcaaatactacaccatttatataagggacttgagcatccatggattttggtatccatagagggctggaaccaatcccccacatatactgagggataactgtaattagaatacctcagttatccgtcacatgtctagaatgaaaaagtaaaggag

SEQ ID NO: 77557 - DNA, 1042 bp, Homo sapiens
tttacttcttaaatgagaaattatttcatatgtgcaaaatagtacttttgacacatctacagattcagagaatacaaataaaataaatagccccgtgcctatgtattgcttaagaaatatacataaccaacattttttgaagccaacctgtgtattctccctgattatatctttttctttccactctccttgattctctatatggttttaccacatgtctatgcattccaaacactgtgttgtttagtctactttggaactctgtataaatgatattctactatgtgaatcctatggctttgcttttgcacattctgtgagattccttcatgctgatgtgttgtagtttgttcactttttattgccgcgcataatttcattgtgtgactttaccattctttatccattatcctgcggatggatatttaggatgttttcagtctttttttttatttttttgcttttaaatttaatttttacttttttccattaaaatctgtttttaagtgacccttctaactcatgtctctttgtgttcatggttttaaaaaccttcagttttgctggaaaacaccggattgttttataaagtggctgtaccagtttatagcctcacaagcgggatgtaagtgttcattttgttccctttttcagcaacatgtaagacacttctacattcgtaattacctgaattttttttcttttagacaatcgggtgagaaatggtatcccattgggggtttaatttaaatttccttaattactgatgatgttgaacctttcattgtttatgttttgtgggtgtttatgtctttggccatttttttgttgttgtttttttactttaaaacatagattttttttttttttgagacggagttttgctcttattgcccatgctggagtgcaatggcatgatcctggctcactgcaacttctgcctcccgggttcaagcgattctcctgtctcagcctcctgagtagctgggattataggtgcatgccgccatgcctggctaattttttgtatttttagtagaga

SEQ ID NO: 77558 - DNA, 1486 bp, Homo sapiens
agtaatgttgcttgcctttgagagctgggatatttgctttttatcatctcttttgtattttgtaatttttgctaatgaatatgagttaccttcataactgaggaagaggccataatacaaatttattctttgtttaacccttcatgaaaaatttaagtatatcttgtattttattgacttcatatgaattataattgtgcatttacgaataaaactaatattgagagattaattcaggtggagagaaaatgagtttgagattctggcgggacatctggcatagctgtctagtggatatataccaatagatatattggtatcaggttttctgaagtcaagatcagacttacaaatgttggaagcagcagtggatttgtggtggttaatcctgtaagggtgtaagaaatcattcaagtaagtatagtgtaagaagagggcaagaccaaggatggggaacaccagcattaagcgatgggtagagacagccaaggagtctgaggaagagcatcaggaaaggaggaaatctagggggcagtggtctcatagaagccaggagaggagagttttaacaaggagagaagtctatctgggagtcaagaactgattacgtgcctattgtctttggaagttaggatgggggctttaacctcagcagacataatttaagtacagtgtaagggtagaagccaagtttgaatgaatctgaggagagaatagtgattctgcactcacaagtaaatgtgagtttagaatccgtattttgagaaacaaaggttagaaggagaggcgatccattgattagggagatgattaaaaaaagaaaagaaaagaaaaaagagaaataaggatgatagactacctttgtgttatccataataattacaaattttaaaaacgaagtgcatcatttcataacattgttcctctctcatggttaagtagcagaagctgagagcaagaagctgagcatgttgaaaagaactattcgtggtaaagtagttatgccccgccccatccaaattatgaacacaattttagtggtgttttgtttggtgtattgagttcaggtgttatagtgtttaagtcacacatataaactgtgttggactctattttacctgagttccaatatgttgatgttctcaacttgcttttaagttatgcggttcttttacgtatgtcccaatggttcttctaaaaatcttatgtagaaatcaggtgttgggactaaagcagaatctgtgaggcatacatcatttagggcctttgcttcaattattattatgcattcaggggaaaaagctcttagattaaaatttctgtataatgagtttcacttcagtcttcgttgaaagtttgatttttttttgttgctcaagagttcagacaaatcattttatgagtattttccttaggaatatgaaaagaatagttaaaatggaaaaggctggcaaccaagtgttgatgaggatgtggagcaactgga

SEQ ID NO: 77559 - DNA, 1231 bp, Homo sapiens
ggcacgtgcctgtaatcccagctactcgggaggctgaggtagaagcattgcttgaacctgggaggtgggggttgcattaagccgagatcgcgccattgcactccagcctgggtgatagagggagactctttatcccaaaaaaaagatgaaaaaaaagaggatctgagcggttttaaccagcctttttttttttttttccttcagagggtattgtacatcattggcctctggtccttttgcaagataatcagtatgtcttcattttttcttagatgcggatcttgagtgcttctagtggctcatatgatggcaatactggagggatcatggcttttaaagttgacagcatgattcgagtactgattttgaccctttctgtgtgacctgtcacagaattaccttgactatgggtcttatttttctcgtctctgcaatgagctgacacctacctagtaaatcccatggggttgttaggatcaaatgacacattcatttgcaatgtttattaacgaataaatgtgccacttacagaaatgccttctaaagtccaaaattctatgcagatgttaaaagtttatcactgtcgaagggtagataagaatgtcagggagttactgaagccaagagttctttccaaaaggtaaggagaggtcaatgcatgaagtgcctgctgctgcgagggctggagaggtaagttttaagaagactgtacggactcgaggaccagaaggtggttgttgcctttgactagatccgtgtagatgcagtggtaggaacaaagcctcattgttgagtgggcagggagcaagtggagatagtgtttgtaggcaactctgctgagaaaccagattgcagagggggaagagggcatgagtaggagaggcaagtgggggtggaaggagagttgtttgaagcttagagacttgagcttatggtaaattcttatggtgaggacatgattagatggagaggctgaagagagtatacagagaagagttcctgagaaagggaaacaggatcggagcacagttttgaagggattggccttagatgggaaggacccctttattggggctggcactatggaagagaggggagatgtagatgtggggggatttgggtgggagaagttgcgggaatttttctctgcagttgaaggggagcttatctgctaaaaacaaggggagtagggcttggggcttgagaaattcacaggagggagagacagaca

SEQ ID NO: 77560 - DNA, 1027 bp, Homo sapiens
tcatctaactactgaatttaattttagcataatactggatcaaattgtttgaattttcattcctgtcatttttgatttttaaaaaatgaaacaaaactaaacaacaaaaccctaggaaaagaatggcttctttccaactagtcaattaaaacgtccagtatctccccaaataaagccttaggtttcttttaacctcttaatggttaattgaaaagagtacagaaactatcaaaatacttatccaatcaatggggggaaaagctatgtcttcagggacagtagagtgatgagaattttttagaaaacactattatccatcaaacttaaaagcatttggacctgatatttaaagataatgaagttttccacatattgaagtattcaagacatcttccatccacaaaaatttatctttaagttttgtaaatatcaagtaagtatagatgatatttattttatatattcctatggaaaaaatgctactttaatgttctgacatttgtgattatttgccagtctttactttttaacttattaaaaagttaaatacttattaaggtttctctatgtaaaacaatttaaattgtcttttgatttttagggaaatatctaaacgtgggaaatttccaacgcaaccttaatattaggttgtgttatttatagagctaaagttaatgcatttttgaatttctcaggagcactgcaaggcaaaaaaatactccaaataaaaatgatatatgtaagttggcaatgtcttcagtcacaataaaaaaaatttttagcaaacagctgctgactttttctttagaaatgatttacacatgttgtttgtagcagtagttgattaactactgaagctactgtctttattcaccggatgtctgctattaggatactatttgagccttggaaattttaagcatgaacaatttaaaagatgcttgagattatgtatgaatatgaaaagaagattttcatacataatctcaagcataacctcgtctctacaaaaatacaaaaattagcc

SEQ ID NO: 77561 - DNA, 1041 bp, Homo sapiens
tgttcctttttattgttgagcatatagtgcagatatatcacttagttttaacagctaaggtatctatttaaagataccatcttaaaactaaatgttacacaaattcatgcaactttcatataagcattaaaccatacagctgcatctacgtaagtataattagcaaaatcactgaacatgccacttcctgcctccgtctgcggtgttgacatatgaggtacagcaatccgagagtcaactgttatcacggtggccactgagggcagtgaaatcactttgatagcaccagtacccagatgtttgaaacttaagaaagtatttctttaatttttcataaacccatcataaaaaaaaaatcccgacttgaaacttaactgtatctggatgttcatatttttattagttgttgaagttgtacatttaaaaagatatttcttgcaaattttgtaaatttctatatgcttttaaaatagaaacatttgtataacaaggaaggatgaaaataaaacaaattcaaatatgtgaatagtcctggctgaggccagaactaaatttggttatttgcaagttttactgtgattaactgtactttctaatgtatttggaagactggaagtcttaattccatgttgatgggtgaaacttgtttttctgaaaaatgaagtaactgaaaatgctgcttcagaatgtcttgtatctccttagataactaatttatattgccattctttatttactatactttaaaggaagttgtcatgcaagttctatattagaactgtcaaactgcctcttggtttttgcctattattatttctctgtgagttgttactccttggtttttatatgctcctaacaaagatactttcactgactatcctacattatttgctgcttgccattgaaatttcatttcagtgtggagaaatgaaatactagtttctaagttaaaaaagacacatggtcctttatttttaagaaatagaatatgtaaaaagttttctcttttaatttgaaaaagagatgcatggttggtattta

SEQ ID NO: 77562 - DNA, 1342 bp, Homo sapiens
gtgttattaccgtcaagggagaatttttaagttgataagtgatacattgattatttttatttatctatgctaatcaatttaacaatattacacagataactttatgctattacattcagagttatttcattttgacttctttgtgaaagataggagactaaatccatattttattctttagatacagcagaatccaggtctggtagaagaacagatgtaaatccgtttttggctcctcgctcggcagctgtacctcttattaacccagctggacttggacctggtgggcccgggcatcttcttctgaaacccatctcagatgttttgcccacatttacacctttgccagcgttacctgacaacagtgctggggttgtgctgaaagaccttttaaagcaatagatgattctcaagccagagacaatctagcactttaaagaaaccatgaacactatatgtatgtactttatcacaaagtggcctttggggagaaagtcatgtatttgttcgcaattatgctttctctgaatttaataaaaatattcctaatgcttttagaaactgcaggtgtcaggagcaagtgtttgctatataatctgctttattccttctgatttgacctaatttaagctaggaacatttaatttatcttttaccttaatttacaaaaatacagacagacaaaaatactagtagctatatggcagctttttatttccttttgtgatttccaagctcatttaagctagagattgtggtttatcaagagagtgttttttttttttaaacgaagaataaaaaaatactagtagtggcttctctgcatagtgcagaaagttgatttgaagcatatattgatcatctttagaggactttgtggagacaggccaacaagattgttgctggaaggtcataggttccctgaggtgaagtatgtatttggtcctgtgcaatattatcatgtgtgtagattctttttttgtttgttttaaatagagatggggtctcactatgttgccaggctggcctcaaactcctgggctcaagtgatcctcccacctcagcctcccaaagtgctgggattaaggcatgagccactgcgcctggccctgtgtgtaaattcatgtgactaccaccacaggcaagacacggaagacttccattacaagcatccccctgtgttgccctctcataatcattgccacctctctccctggccctctccttaatccctgacaaccacttactgttctccatctcagtcattttgttattttgagaatgttatataaatggaatcaatatataccctcttgagactggctttttttcactcagcata

SEQ ID NO: 77563 - DNA, 1007 bp, Homo sapiens
gatattaactaaatttttagtatttttggaaatgtgtaatcaggacttccagaattccaataaggcatcaggcttttccaataaggcatcaggcttttgcttcatatattcttgtagcaatctgatatttaattgacttagattaatttaaatggtaagaaatatattccctttgtatatcagaataattcttctctgtctgcctaaccagctatgaattattcctctggaagtgatggggaattggttacatctttcttggccacctgctttgctttctcactaatggtggttcttgctaatccgagttagatgtgtagtttatagtttgagaagggtttttctcctttgaaaatttaagtgctacactcagtaaccaaacattggcatgttaatatatataagcgcagtttaacaaactgacttgagactccaagaatgtagaaagcactcttttatgttgaaagatctgcctagagcggacggttggtggtggttaacgtgtacatatttttctgtctcactaaattgtaagggttttatttatgttcatatcatatatactggcacgcaagaaaatttatcaattgaaattgaattataatctgttggactataaacaaattctttattggaagagctcttctgaaatcttcatattttaatagactaatatgtttactaattggactgtaaaggtatatgttatatactcatatcacacatcagatgcttaaatttggataaaataataaagaatttatattctgaaatttttgaaacttctgtcgtttagacaaatatttctatttttctgaacttgtataggaagggaaagtagtaaaatttatcagtcctttaggtagtaagtagttttgcctgctaaattttgtgaaaagtcataactttatctaagaggtgtaggctatactgaaaacagtttttcttttacactaggttgtagcatcttgaaacagattcccaaattcattatggcaggctctttc

SEQ ID NO: 77564 - DNA, 1051 bp, Homo sapiens
gaaatgtaaaattatgatgtgccaatttgttgcaatcaattacattttatgttcaatttttattttaaaccaaatgttgaagaccatggcaccatgtctaggtgttccagagaagagactctgatatggcaagttttactatgtcacagatgtagagtaactctttctccaaactagactaaatctcagttgctttattgctgaacttttaaagttcccccctccacctttttttttttttaacttccaaaaaattattttggcatgtgagattatttcacagaaatattttatttggcttaaaactcatttctgaataaccatattttccctgcccatataaatacagttctgatttcaaattgtggtttgaattagggttcagtttttgtagagaaatattcagaatctctgatgggaggaaaataagggtgcttgaagaaaaagaggcatctgtagggacctttgtagtaggtgtttgactttcttttcctttccaaacccctcatagttaataccatccttctagcaccgtcccttaaattctgagtttttccccctagactcaaatatcagagtacattctaactactgcttgagtttgcaacagccctttgcattccacatcacattagctcagggacaaactgtatgttctgatagtgagtttaggaaattttaaccctgtcattttcgccttaaggatgttttgactctacctttctgaatacagagactttaataaaaaccataccaatcttagtaagttttcatcaagaaagtatttttgatttggacttctacgcagtttgatttcttgatcagtttttcatagagcaaagttaaaattttctactttattttactaaaatttttatcaggctcagctctgctttgtgaattttactctgaagatgtctgtcatttcactttctctctctctctctcttttttttttttttttggagacagggtctcgctctgttgtccaggccggagtgcagtggcacaatctgaggtcactgcaatatctgcctcctgggctcaggcg

SEQ ID NO: 77565 - DNA, 1097 bp, Homo sapiens
cttgggcaatgtatgcaaagaggttttcacagaaggacagatccagcttgccctgtaaacatgaaaagtaatgctcaaattcactagtagtggtcagggaaataaaatttaaagtaacaaagtcataatcaacatcactttattagactttcaaaaatgaaaaagagaacatttgttgctatatttctggacttcctgtatctttgtttttttgtagtttatgttgttacttttttttttttttttttttacttctgtcatcatgttgtctttcagtggcatctgctctttttatttagttcctctaaatgaggcagtattgtattgaaaagaatgtgggttctgcctttgatacttattggttggatacatttgcccaaggtcatagaggtgcagcttcaccagctgaaatgtagaggttgactctaagatgtctctcagccttatagtttgtgaaataatttttgcatacttttttttaataaagttttctttctcaggaatgtttggatgaagcaaatgctgcattggattcagcatcaagacttacagaacagttagatgtaaaagaagaacaaattgaagaacttaaaagacaaagtaggtttttttcttttcatttttcccccactacaatactgatattaaatcaaatgtagtcttctgtcataaattggcatagttgagtgagaccaacttcattgatgtgtgacttccatttgtatcttccctgactgacttgcttcaatttaagtatggtcctagtgaaaccagagtcattaagttggccctggctgtccagttagttttcctggatgttgaggcaatgccattgcattggctgtcaccctgttgaccatcagaggggttgattggactgatttgactttttatggatatgatttctcccttatcagttcacgtgcatcttgcctaaggccatctgatctgttagagaaggcagaattctcaaataaaagagcaactttctgtagaatgaatgtctgggtatagctagatttttatgattgtagatggtgttttaccacaggtgcatcatgtattttttgatgtttataaggtgcctcatatgccct

SEQ ID NO: 77566 - DNA, 1042 bp, Homo sapiens
atttaagctttaataacttcataagtacaaatggtgtgggttaaaaaaatcatttgaaagtttacatttccttcacactaaatttagttttgtggatttttgaatagtaaatattttatttaaaattttcaatttcattccctctatatatcaatcaggtttcagcccctaaaagcaggatcagtagggtgtgtatgtatatgtgtcaaatttatatattgatatatatggatacacacatgcaatttattacaaggaattggctacaagattgcagccgctggataagcaagtctgaaatttgtagggttggcagtcaagatgggaagcccacatcaaaggcaggctggaactcagcaggcatgggccaaagctgttgtccacaggcagccaggaaaggaaagtcacaagcaggatggaactccataggcataggcggaacctgcggtccaaagaaggaatttcttcttttttagggggaaggctaaaccctggcttttaagaactttaaaactggttcagtcgggcccacccaaattatccagaataatgtgcctttcttaaattcaactgattaaggactttgattacatttgcagaataccttcacagcaacatctagatcatatttgattgaataactggggactgtgacctatccaggatgacacagtaaaaaggctatcacactgattgaagatggcaaaacttgaccttaaatttacatgggagaatacttgagaatagccaagaaaattatgagaaataatgcagtgaggagagacctgcctactagatgtcataatagagccataaatcgatacaatattgactagattagtggattaaggagaatccagaaatagagcccaggatatatttgagaatttgaaactaaaacctaaactaatttaatgagaaaaaggatagcttatctaattaatgatgttgataaaaccagctgtccataggaaggaaggaaaaaaaaacaacagaccctcaccttacatcataaacaaaagtaaagtctaattgtattaaa

SEQ ID NO: 77567 - DNA, 1054 bp, Homo sapiens
cctggaggaggaggttgcagtgagtgagccgagatgacaccactgcactccagcctgggtgacagagtgagactctgtctcaaaaaaaaaaaaaaaaaaaagtttttgaggtctactttacagtataatgtaattattagagtgggtatgtatacaaagcagtgtggaactgagactgtagagaaagtgttgccaaagaggaaatatttgagaagagttacgaagggagagaagaatctgcaagatagacaagatggagaagtgtttaggcagaggaaagtgatctcattagtttagtaccgcttaacattatcactaaggcatatattcttttctgtttgagacatttgaactgttttcgttggattattaaaatttaaaatggcttaacattctaacttaacacacgattgcaaaatactaatgttaactttcttttctctttagaggaaaaagctatgtattctgctgaactcgaaaagcaaaaacagcttatagctgaatggaagaaaaacgcagaaaatctggaaggaaaagtgatatcattacaggtaggacaaaatagttttctcttgtaggttttattattcatggaacagttacttgtagagtctttgtcttggaaataatctcctaaactgttcatttagtaaattttctaccctgaatccagccctctgctgtagcctgacagtgaacaagatacccaggatttccctaaggtgtcatagtttagagtagacacggcaaatgtaagatgacaggacatttaaatttttttggcacatagaggtattttagaggtctccggggaaaaaacacccaaattaatctataatttaactttataattttctctctttttttttttttttttttttttgagaccgagtttcactcttgttacccaggctggagtgcaatggcgtgatctcgacccaccgcaacctctgccttccgggttcaagcaattctcctgcctcagcctcccaagtagctgggattacaggcgtgcaccatcatacccagctaattttgtatttttaatagagat

SEQ ID NO: 77568 - DNA, 1259 bp, Homo sapiens
atttttgtgttgatgacagattatatccttagggtaagttttgagaaacggaacttctagatcaagaagcattttaaaacttctgagattatactgccaaattatttcacaaaaaattgtgtccatttgtattcctattagttgtatatgcatctttgtatttatctttttactatttatgacacaaagggagataaaatgagataatcatttctatctgtctgcaaataaattataggctagtagagacaatattcctgcgaattaacccctaccccacctttgcagagtatattattataccttcagactcagctggaaaacttgtttaaaacggggattaaaacaatgagtgatcatttggctatatgtttcagtttggcagaaatgctgtaacattctgtattctcactctttttttgcacttttcaagcccttattttctcttaattaaaatagtttctagtctctgcacttttcatttatttttcataataactttgagaataaccttccttacatagaggtgtgatctttttactccttttttcaaaaactggtcttgactcaaggatggtcccaggctcctaccaccttagccttatttcatgttatcagctacatccagccaaactgtattactcactttctcagagccactgttttcctgtttctttttcttctgctttttcttttcatatgccttcttctgcctgaagggtgaacctgatcccctgcaagttgttctatgaatcttgcctattcttcaattccattttcttcctaaagggtgctttatttagcaccccacttgtcatatccaaaaacaaatcttcctggtgtgatgtttttcctttgaacttgcataatatttagtttgagtcttatagtttgagggcacttatattttaatttagggtacaggtaattgtcgacgtgtcctatactgcctcccacccaatgaaatgtaaagtcactgggaggtaggaatgggctcattcattttctacctatcacatagcatatattacacagagtttaatagctattcagtaaatacttgttgtatgagtaactcagatctacaaaccggattatggtggtgtgagcccttacttaacaatagtaacacctggtatttattaacttctagagtgccatcatagctcatttcattcctacaatcacccactgagtgattgctaaccaacaaagttgaacaaggtccagagatatttgggagctgaatttagatcttc

SEQ ID NO: 77569 - DNA, 1047 bp, Homo sapiens
tataaaacaggagttcatagcagttatatggatagtgccagtagcttttgataatatttaaatttttatatgcaattcattttagtaagaattattgaggatttcctgttacactgtatactatactgtactatatgatagtatagtgtagggcttgtttggcagtgtatagggtgctgtgtagggtttgtttagtagtgcctttttactgtgatttctatgcttttagtagcagaaattttgaaaagagatgataggcaaaacaataaaatattcaactagcacttcttgagcattacttgctgccaggcataagatacaaagtgattcaacttcatttgccagttaggttccctcttagagtcttggattaaagttgtgaaaacttcattttttcctttgtcatctgatgaagtaggcacactgattatcagtgttaaggtgttcttctgagataacttcttagctttaatggtactggtctataattgatgtgaagagagtcctagaggctagagcttcctattgttcactagcccaaattggctctagcttcttaaggttataagagtagaacagaggaataaagtacaatgatgtcttctgtcatttatagatattttggagttttagcgttttgtacaatttagttctatttcattgacctttgcagatctaaagtgtgcagatattattaacactctcctcacttttaggaagcttccctaagttagctaagtggtacttaactattgtattacttgagggtaattagtgtaaactaatttcttccaatactctgtatataatataaaagtacctttagattatatcttgaatataatgagtaacatctttttttagggagaaaaggatgttctcaataggagatattcagatctatttaatttctcaagcatttgctctttctttgtagtgtgaaaaaaaaaaaaaactgaaaaactatttggaaaatattggcctccctatccagaagtgttaatattaaaggaacagattgttttatattttggttataatgattta

SEQ ID NO: 77570 - DNA, 3217 bp, Homo sapiens
gcagagaattgcttgaacccaggaggcagaggttacagtgagccgagatcatgccactgcactccagcctgggcaacagagcgactctgtctcaaaaaaaaaaaaaatactatttaccatctttggttttaaattcttatccctaaaatgctttaagaaatgacaagatggggccaggcacagtggctcatgcctgtaatcccaacactttgggaggctgaggcaggcagatcacccgaggttggaagtttgagaccagcctgaccaacatggagaaaccccatctctactaaaaatacaaaattagccgggtgtggtggcgcatgcctgtaatcccagctactcgggaggttgaggcaggagaattgcttgaacctgggaggttcaagaggtggaggcggaggttgcggtgagccgagattgcgccgagccgagattgtgccattgcactccagcctgggcaacaagagcgaaactccgtctcaaaaaacaaaaaagacaagatgggtttgctgtaaaataataataagtaattttgtagtgggtgtttttgatagaaaaacaatgtttttaagaaggattagaaatatttgaggattattttctattatgtatgagattttataaaattttctttgagtactaaaatgagaacatgttgtaaagtcaccatgcaaatttttctttcagcacatgattttgataaaagatcagctatcaaaacaacaaaatgaaggagatagcatcatcagtaaactgaaacaagatctaaatgatgaaaaaaagagagttcatcaacttgaagatgataaaatggacattactaaagagttagatgtacagaaagaaaagctaattcaaagtgaagtggccctaaatgatttacatttaaccaagcagaaacttgaggacaaagtagaaaatttagtagatcagctaaataaatcacaagaaagtaatgtaagcatccagaaggagaatttagaacttaaggagcatattagacaaaatgaggaggagctttctagaataaggaatgagttaatgcagtctctaaatcaagactctaatagtaattttaaggataccttacttaaagaaagagaagctgaagttagaaacttaaagcaaaatctttcagaattagaacagctcaatgaaaatttaaagaaagttgcttttgatgtcaaaatggaaaatgaaaagttagttttagcatgtgaagatgtgaggcatcagttagaagaatgtcttgctggtaacaatcagctttctctggaaaaaaacactattgtggagactctaaaaatggaaaaaggagagatagaggcagaattgtgttgggctaaaaagaggctgttggaagaagcaaacaagtatgagaaaaccattgaagaactgtcaaatgcacgtaatttgaatacctctgccttacagctggaacatgagcatttaattaaactcaatcaaaagaaagacatggaaatagcagaactcaaaaagaatattgaacaaatggatactgaccataaagaaactaaggacgttttgtcatctagtttagaagagcagaagcagttgacacaacttataaacaagaaagaaatttttattgaaaagcttaaagaaagaagttcaaagctgcaggaggaattggataaatattctcaggccttaagaaaaaatgaaattttaagacagaccatagaggaaaaagaccgaagtcttggatccatgaaagaggaaaataatcatctgcaagaagaattggaacgactcagggaagagcagagtcgaaccgcacctgtggctgaccctaaaacccttgatagtgttactgaactagcatctgaggtatctcaactgaacacgatcaaggaacatcttgaagaggaaattaaacatcatcaaaagataattgaagatcaaaaccagagtaagatgcaactacttcagtctttacaagagcaaaagaaggaaatggatgagtttagataccagcatgagcaaatgaacgccacacacacccagctctttttagagaaggatgaggaaattaagagtttgcaaaaaacaattgaacaaatcaaaacccagttgcatgaagaaagacaggacattcaaacagataactctgatatttttcaagaaacaaaagttcagagccttaatatagaaaatggaagtgaaaagcatgatttatctaaagctgaaacggaaagattagtgaaaggaataaaagagcgagaactggagattaaacttctaaatgaaaagaatatatctttaactaaacagattgatcagttgtccaaagatgaagttggtaaactaactcagattattcagcagaaagatttggagatacaagctcttcatgctagaatttcttcaacttcccatactcaagatgttgtttaccttcaacagcaactgcaggcttatgctatggaaagagaaaaggtatttgctgttttgaatgagaagactagggaaaatagccatctaaaaacagaatatcacaaaatgatggatattgttgctgccaaggaagcagctcttatcaaactgcaagatgaaaataaaaaattgtccactagatttgaaagtagtggccaagatatgtttagagaaactattcagaatttatcacgtatcattcgagaaaaagacatcgaaatagatgcactaagtcagaaatgtcagactttattggcagttttacaaacatccagcactggtaatgaggctggaggtgttaatagtaatcaatttgaggagcttctacaggaacgtgacaagttaaaacagcaagtaaagaaaatggaagagtggaagcagcaggtgatgaccacagtacaaaatatgcaacacgagtcagcccagcttcaggaagagcttcaccaacttcaagcacaggttttggttgacagtgataataattctaaattacaagtggactatactggcctgatccaaagttatgagcagaatgaaaccaaactcaaaaattttgggcaggaattagcacaagttcagcacagcattgggcagctttgcaataccaaggatcttcttttaggaaaacttgatattatttcaccccagctgtcttctgcatcattgcttactccccagtctgcagagtgtcttagagcaagtaagtctgaagtattgagtgaatcttctgaattgcttcagcaagagttagaagagc

SEQ ID NO: 77571 - DNA, 2989 bp, Homo sapiens
tcctgacagcaggaacatacacaggtaggtcaggaggtctggagtagcatactgtaataactgtatatgctgcttgtgtgcttcagaatgtgtccattttggtggacagtactttcttagtggtgaggcataaagagcaacagtttcagtggtagaaagaagttctatttttttttttaatgagatggagtttcgctcttgttgcccaggctgtagtgcagtggcgcaatctcgggtcaccgcaacctccgcctcccgggttcaagcgattctcctgcctcaacctcctgagttgctgggattacaggcgccagccaccacacccagctaattttgtatttttagtggagacggggtttctccatgttggtcagggtggtctcaaactcccgacctcaggtgatctgcccacctcggcctcccaaagtgttgagattataggcgtgagccaccacgcctggtgaaagaaggtctttataggggtacagagcaacagtttcagtggtagaaagaagggctttattgtatgtattcatagcaaggaaggaataagattctgaaagggaaaggtatttagaagtatttttatgtttgaaccactttggggaaatttcttggctaaggcaggtgcttaaatataggagagttgtaagctagtattattaagttaaaggccagtgtcttaatttaaattcctaattttaaaaagtgatgcatattttctgatatatgtgttcagaaaacatacatactgaaaaccttcggatagtacaagtagagtatcttttgtacctctgtggcttggcctctttcccagaggcagtctctgttaccaatttctagtgtttctttctggactatgtctatgcatgtatgattgtatgtatcagtagctttaaaaaatacaaatgtcagcatattataaatatcctttttacataccatatttccaacatctttccacattagtatatatgcagtgtttctcaaagggactgctattggcatttaagcaggaaaattcttagttgtgggcactacactgtgtattgtgggattcttgctgccactctttctacccactatgtgccagcagtatctcccagtcgttttaaaaattactatattatatatattttatctttcctgtttttgctcccattgtattctgctctttacctgactgacctagtcgtttgtagtttgcagaactctctgcacttacctggcagggcctgtaaccttttcatgatgtgtttggtttctgtagcttgtcctgatagctgtttctcctttcttttgatgttaaagtagtccattgtaactcttccttgagttgtgtctgcttactgattaagaataccaaaagtgcctatgagggccgagtgtggtggctcacgctgtaatctcagcactttgggaggccaaggtgggatgattgctcaaggccaggagttcgagaccagcctgggcaacatagtgagacaccatatctacaaaaaaacactaaataatttttttaaaaagtacctatgaggctgtgtgtgcttttaagatctacctaaagaaaatgtctgtgattctcctaatttgaacagataactttagaaagacttaagagaatgctgtttccatctttcagctgtagttagaataaatttttgaattagaaggaaataagaattgtgatacagatactctagtatagcttttatcggatctctgttttttcaaccaactctccatagcaatgttgagtttcttttataaggtttatattaggctgtttctttgaaggaatttgagattcttatttttttaattttattttttagagagagagagtcttgctgtattgcccaggttagagtgctgtggctgatcatggcatgatcatagtgcactacagccttgaactccttggctcaagtaatccttctgcctcagccacctaagtagcctcctgggactatagataaatgccatcatgcctggttcaatactctatttaaagtagattccatatgggtttgatttttaaaaatctgtcaatgaaagaaggctttaatatatagtttattacaaacatcataactagagactgaaataatgttgaagcatagagaactgtcccacttctgagattttggagaaagcattaaataccaggtagtagactataaaatgtatatatactatctttaggaatgtcaggtgtgacagaggggaacctagtctggttaaaaggtaaaggaaggaaggaggattctttctagggtcaagaaaaagttccatgttctaacagaagcaaaagtaataagggaaattcctttagtaagagaaaagaaaccttttattttctaattagagaggctaaacatttgggtgaaggagtgttgattttttatatttttatttagtctgaggctgttgatgactggatgttagagaatggaagtgaggaaggcagaaagacttgcggacattttggaaagtatgtatgtatggtaggtggggccaggggatggataaagggtagccacggtggagcaggataggagaggctctcaaatgggaacgttttttataaagaagaacttggtgctagaggacaaacttacagtcgctgcatctgtctagggttatagaaatgttttgcttgaagctacaagtaaaattgcacatgaatgaaggatgtggtttgttgaatttcacatacaattattgaggtattgttcaatattatttccaatatagagcacttaaatagaatcccaagttttgcttctatgtatgtttttaatcttttggtgtctccaattgaaagtatgtgttgcttttttccttttatcatttcaggaagaacttcagatgtcacttttaaaattgaacaatgaatatgaagtaattaaaagtacagctacaagagacataagtttggattcagaattacatgacttaagacttaatttggaggcaaaggaacaag

SEQ ID NO: 77572 - DNA, 1076 bp, Homo sapiens
tctgtgaaaatggaaatgtcctttttacctttgtggtaaatagttataatttatagatttctttgcattgtttggtgatgatactttggtaataaatgattagagatattatcactttctttcaaactaagatacataggcctttatgtagttgattcaaatattttcccccaacttatttattttaaaacacttagtttattatagtaatttaacttttaagctttccaaattctgaactgtcttatatctcttagttgtatatagcaaaccgtttatttcttggtacttgacatttgatgtcattgttttgtgtttatgttctaggtggctctggagttatagaaactgatctctctaaaatctatgagatgcaaaaaactattcaagttctacaaatagaaaaagtggagtctaccaaaaaaatggaacaacttgaggataaaataaaagatataaataaaaaattatcttctgcagaaaatgacagagatattttgaggagagaacaagaacagctaaatgtggaaaagagacaaataatggaagaatgtgaaaacttgaaattggaatgtagtaaattgcagccttctgctgtgaagcaaagtgatactatgacagaaaaggaaagaattcttgcccagagtgcatcagtggaagaagtgttcagactacaacaagcactgtctggtatacagtctttggaacttatttcagattgctgtttcattgcatagtagttgtttttagagacagatgcttcactaactgaatacttagtggaaatggcatattcctggaaatgactgtgtgtcatttgggtagaattgtgtggtttggattcagtgtaagagttaatagattgcaaataggaatttcctattaaaaaggattaggtattgctatactttctgtaactcatcacagcccacatcctccagttagggaatacagcctttcttcttcaaagtcagttgttacctgtttgaaacgatctcctatatccaagcaaagccctgagtgcttagagccataggtcttccaccattttctatgctcatgatgatatttagtta

SEQ ID NO: 77573 - DNA, 1011 bp, Homo sapiens
gctgagtgagaggatggaagtagtggaacagcaggtacagattggtcagaggggtgacactggtattggcagaaagtgtcattaggaaaaggagaagttcatggtcacagatattaaggaaaagacatttttacttatcgtttgttttagccttttcttgctgatgttccctcattagaagtagaaaaactgtttttgagacctaagaaaggaaagggtgaagttgttcagaatagtcctaattttgggtctgtgtttaaattcttttcagccttaacatgttctgagaattctttttaataatgcacacttttggacaacagttaaatatatagcttacataaatttattgattataaatgtgaataactttgtttttattttttaaggaactaaaacagaaccgaagtcaggaaattgatgaccatcaacatgaaatgtcagtactgcagaatgcacaccaacagaaattgacagaaataagtcgacgacatcgagaagaattaagtgactatgaagaacgaattgaagaacttgaaaatctgttacaacaaggttattagttttatttctttattattattattttttttgagatggagtctccatctgttgcccaggctggagtgcactggcgcgatctcggctcactgcaacctccgccccccgggttcaagcgattctcctgcatcagcctcccaagtagctggattacaggtgcctgccaccatgcccagctaatttttgtatttttagtagcaatagggtttcgccatattggccaggctggtcccaaactcgtgatctcgggtggtccacccacctcggcctcccaaagtgctaggattacaggcatgagccactgcacctggccagttgatagttttattaatttaacatattagatgacataactaaatgatagacctagcattctaagaccaggacagtgctgtaaacttgccctaagttataaggaagtgtaaatgactagttctgcttatctgccag

SEQ ID NO: 77574 - DNA, 1050 bp, Homo sapiens
acctaactcagccgaacacccctctcaggtttgttttctctaaaataaacctgtcttaactggcaagccaccctttgtgtttctctcctctttctttaattcttacagttagaaataaggcctaaagccccagttgagtaagcttcatctaaaattatagcagcattagcccacagagaaatagttttaatttctaaagcttaatttcccacaacaaaattctaatgaacatttctaaggggtaaaggtagacatcctaagatacagggcataggcaaaaagaatgacttttatgacaatgaagaacattagtgtcagtgaaaagttgttatggaaataaagcgatttgtttcttctgaatgctttcatatcagcctactattctgtgtaaactcagtgaaatatattttcttgaaaatacctatttattacttcatatggtattgattaaatattcaatatttgttatttctcttgtagcagaattacctgattctaggacaaaggaaattgaagccattcatgcaatcttgagatcagaggtaagaaaaatcaaagactacttagatttttcttttttgaagtcatgaaggttactcaaacattactttgatcctttctttttaaatgtactgcttagcactttttttctcttcttgtttaattttgattgttttttgagcttttatcaaccttctgtagatgaaaaatatatttacctgttactgcagtttgctattctttaatattcccatctctatttctgtataagtaggaaaactgccaaatgtagaaataatagtatcaataatttatcataatccagagtttactgtgttctaacagcatactaaattgcagtggcacatttatttaagaataattttttttttttttttttgaaacggggtctcactctgtcacccaggctggagtgcagtggcactatcttggctcactacaacctccacctcctgggttcaagcaattcttctgcctcagccccccgagtagctgggactacaggtgcacgctaccacacccagctaa

SEQ ID NO: 77575 - DNA, 1321 bp, Homo sapiens
ggtgcaggccaccacacccggccttgggccactgttttcaaagtgaattgtttgttgtatcgagtccttaagtatggatatatatgtgaccctaattaagaactaccagattggatcaactaatcatgtcagcaatgtaaataactttatttttcatattcaaaataaaaactttcttttatttctggcccctttataaccagcatctttttgctttaaaaaatgacctggctttgtatttttttagtcttaaacataataaaaatatttttgttctaatttgctttcatgagtgaagattattgacatcgttggtaaattctagaattttgattttgttttttaatttgaagaaaatctttgctattattattttttccaagtggtctggcattttaagaattagtgctaataacgtaacttctaaatttgtcgtaattggcatgtttaatagcatatcaaaaaacattttaagcctgtggattcatagacaaagcaatgagaaacattagtaaaatataaatggatattcctgatgcatttaggaagctctcaattgtctcttgcatagttcaaggaatgttttctgaatttttttaatgctttttttttttttgaaagaggaaaacatacatttttaaatgtgattatctaatttttacaacactgggctattaggaataactttttaaaaattactgttctgtataaatatttgaaattcaagtacagaaaatatctgaaacaaaaagcattgttgtttggccatgatacaagtgcactgtggcagtgccgcttgctcaggacccagccctgcagcccttctgtgtgtgctccctcgttaagttcatttgctgttattacacacacaggccttcctgtctggtcgttagaaaagccgggcttccaaagcactgttgaacacaggattctgttgttagtgtggatgttcaatgagttgtattttaaatatcaaagattattaaataaagataatgtttgcttttctatttccttttgaatttgtgtttattgttaattcatagctattcaaagtgtgattagagctgggcttggtggcttgcatctacagttccagctacccaggaggcagaagcaggaggattgcttgagcctaggagttcgaggctgcagtgagctatgatcctgccactgaattctagcctgggcgacaaaacaggaaaaaagtatggatggaggaccagcagcatctgtatcacctgtgagtctttcagaaatgcagagtttcaggctacactcggacctactgaatcagaacttgcactttttacaagatccc

SEQ ID NO: 77576 - DNA, 4198 bp, Homo sapiens
gcaaaagagtacacgaaacctctcttaaatatctttacaacttcctttgaattgacagtttttcaaaatagaaagttgggtttttgtaaatacatgaattgttgatatacacaacaaatctcaaatgcattatgctacgtgaaagaagccatattcaaaaggctacatacctactgatgccttttatatgacgtgcaggaaaagataaaactgtaggacagagaatatactggtggctatctgggattaggaaatggggatcgaccacaaaggggcagcatgggggaattttctggggcaatggaatggttgtgtatcttgatggtgtatttgtcaaaatatatagaactataaaagtaaattttgctttatatgtattaaatcaaaaaaagaaactcgtgctcaaatagaaatacattttctgagaacttgccttttgatgactttgagaattttctggaaattttaaagaaatgtggttttgtttcccaacaggtgatgctatgagtgaagaagacatgcttcaggcagctgtgaccatgtctttagaaactgtcagaaatgatttgaaaacagaaggaaaaaaataatacctttaaaaaataatttagatattcatactttccaacattatcctgtgtgattacagcatagggtccactttggtaatgtgtcaaagagatgaggaaataagacttttagcggtttgcaaacaaaatgatgggaaagtggaacaatgcgtcggttgtaggactaaataatgatcttccaaatattagccaaagaggcattcagcaattaaagacatttaaaatagttttctaaatgtttctttttcttttttgagtgtgcaatatgtaacatgtctaaagttagggcatttttcttggatctttttgcagactagctaattagctctcgcctcaggctttttccatatagtttgttttctttttctgtcttgtaggtaagttggctcacatcatgtaatagtggctttcatttcttattaaccaaattaacctttcaggaaagtatctctactttcctgatgttgataatagtaatggttctagaaggatgaacagttctcccttcaactgtataccgtgtgctccagtgttttcttgtgttgttttctctgatcacaacttttctgctacctggttttcattattttcccacaattcttttgaaagatggtaatcttttctgaggtttagcgttttaagccctacgatgggatcattatttcatgactggtgcgttcctaaactctgaaatcagccttgcacaagtacttgagaataaatgagcattttttaaaatgtgtgagcatgtgctttcccagatgctttatgaatgtcttttcacttatatcaaaaccttacagctttgttgcaaccccttcttcctgcgccttattttttcctttcttctccaattgagaaaactaggagaagcatagtatgcaggcaagtctccttctgttagaagactaaacatacgtacccaccatgaatgtatgatacatgaaatttggccttcaattttaatagcagttttattttattttttctcctatgactggagctttgtgttctctttacagttgagtcatggaatgtaggtgtctgcttcacatcttttagtaggtatagcttgtcaaagatggtgatctggaacatgaaaataatttactaatgaaaatatgtttaaatttatactgtgatttgacacttgcatcatgtttagatagcttaagaacaatggaagtcacagtacttagtggatctataaataagaaagtccatagttttgataaatattctctttaattgagatgtacagagagtttcttgctgggtcaataggatagtatcattttggtgaaaaccatgtctctgaaattgatgttttagtttcagtgttccctatccctcattctccatctccttttgaagctcttttgaatgttgaattgttcataagctaaaatccaagaaatttcagctgacaacttcgaaaattataatatggtatattgccctcctggtgtgtggctgcacacattttatcagggaaagttttttgatctaggatttattgctaactaactgaaaagagaagaaaaaatatcttttatttatgattataaaatagctttttcttcgatataacagattttttaagtcattattttgtgccaatcagttttctgaagtttcccttacacaaaaggatagctttattttaaaatctaaagtttcttttaatagttaaaaatgtttcagaagaattataaaactttaaaactgcaagggatgttggagtttagtactactccctcaagatttaaaaagctaaatattttaagactgaacatttatgttaattattaccagtgtgtttgtcatattttccatggatatttgttcattacctttttccattgaaaagttacattaaacttttcatacacttgaattgatgagctacctaatataaaaatgagaaaaccaatatgcattttaaagttttaactttagagtttataaagttcatatataccctagttaaagcacttaagaaaatatggcatgtttgacttttagttcctagagagtttttgtttttgtttttgtttttttttgagacggagtcttgctatgtctcccaggctggagggcagtggcatgatctcggctcactacaacttccacctcccgggttcaagcaattctcctgcctcagcctccagagtagctgggattacaggcgcccaccaccacacccggcagatttttgtatttttggtagagacgcggtttcatcatgtttggccaggctggtctcgaactcctgacctcaggtgatccgcctgccttggcctcccaaagtgttgggattacaggcatgagccactgcgcctggccagctagagagtttttaaagcagagctgagcacacactggatgcgtttgaatgtgtttgtgtagtttgttgtgaaattgttacatttagcaggcagatccagaagcactagtgaactgtcatcttggtggggttggcttaaatttaattgactgtttagattccatttcttaattgattggccagtatgaaaagatgccagtgcaagtaaccatagtatcaaaaaagttaaaaattattcaaagctatagtttatacatcaggtactgccatttactgtaaaccacctgcaagaaagtcaggaacaactaaattcacaagaactgtcctgctaagaagtgtattaaagatttccattttgttttactaattgggaacatcttaatgtttaatatttaaactattggtatcatttttctaatgtataatttgtattactgggatcaagtatgtacagtggtgatgctagtagaagtttaagccttggaaataccactttcatattttcagatgtcatggatttaatgagtaatttatgtttttaaaattcagaatagttaatctctgatctaaaaccatcaatctatgttttttacggtaatcatgtaaatatttcagtaatataaactgtttgaaaaggctgctgcaggtaaactctatactaggatcttggccaaataatttacaattcacagaatattttatttaaggtggtgctttttttttttgtccttaaaacttgatttttcttaactttattcatgatgccaaagtaaatgaggaaaaaaactcaaaaccagttgagtatcattgcagacaaaactaccagtagtccatattgtttaatattaagttgaataaaataaattttatttcagtcagagcctaaatcacattttgattgtctgaatttttgatactatttttaaaatcatgctagtggcggctgggcgtggtagctcacgcctgtaatcccagcattttgggaggccgaagtgggtggatcacgaggtcgggagttcgagaccagcttggccaaaatggtgaaaccccatctgtactaaaaactacaaaaattagctgggcgcggtggcaggtgcctgtaatcccagctacctgggagtctgaggcaggagaattgcttgaaccctggcgacagaggatgcagtgagccaagatggtgccactgtactccagactgggcgacagagtgagactctgtctcaaaaaaaaaaaaaaaatcatgctagtgccaagagctact

SEQ ID NO: 77577 - DNA, 1061 bp, Homo sapiens
ttcaagtgattctcctgcctcagcctcccaaagtagctgggattacaggtgcctgccaccacgcctggctaatttttgtatttttagtagagatggggtttcaccgtgttgtccaggctcgtgtcaaacttctgacctcaagccatccacccgcctcggcctcccaaagtgctgggattacaggtgtgagccaccactcctggccatgataggttattttgtgatgaaaatacctacctcttaatttgtctgataaatttaaattttatgtctagatttcctaagatcagcacttccatattttaaagtaatctgtatcagactaactgctcttgcattcttttaataccagtgactactttgattcgtgaaacaatgtattttccttatgaatagtttttctcatggtgtatttattcttttaagttttgttttttaaatatacttcacttttgaatgtttcagacagcagcaaaagcagcaacagcagcagcagcagcagcagcagggggacctatcaggacagagttcacatccatgtgaaaggccagccaccagttcaggagcacttgggagtgatctaggtaaggcctgctcaccattcatcatgttcgctaccttcacactttatctgacatacgagctccatgtgatttttgctttacattattcttcattccctctttaatcatattaagaatcttaagtaaatttgtaatctactaaatttccctggattaaggagcagttaccaaaagaaaaaaaaaaaaaaaagctagatgtggtggctcacatctgtaatcccagcactttgggaaaccaaggcaggagaggattgctagaacatttaatgaatactttaacataataatttaaacttcacagtaatttgtacagtctccaaaaattccttagacatcatggatatttttctttttttgagatggagtcttgctctgtcacccaggctggagtgcagtgtcgcgatctcggctcactgcaagctctgcttcctgggttcatggcattctcctgcctcagcctcctgagtagctgggact

SEQ ID NO: 77578 - DNA, 1789 bp, Homo sapiens
caatctgccagcctgggtctcccaacatgctgggattacaggcatgagccactgcactcggcctgaactttttatagtagtaacgataattcagtaatgtccaataatgactaagtaagttataacaagtacaatgtcagcaataactagtgctttttagtaaacagggtcaggcaaccttgtacccttttaaaaatgttcgaatatcgatatacctccttcctacttggtggaggattgattgaggaggaaagtgtgcagtgatggttaccagcttcagcctcttggcttgactttgcaaatactggtgagaatttggaaagagcttgagaatatcttacatagtcacatgttgctgagaagagttaagaactaacttcttgatgttcatttttaacaatggcttgcattcaaaaccttgtagagctcattagtaggagctaagaagctaatatttgcctttcactaaaattcctgattacttagcctaggtagttcgttgtctctctaggttctgtctttgggagcttgggtctaaggttatcaagctaactctttcttccctctcacccttcccaaattgaccctggtgctgatttgttattcatacgattttctagtttttcttttccctttttgagtatttgaagcttcatactgaatatagtaatcatagtattcatgcataaagaaaatcataaagtaattgcataaatgcataaagtaatcatagttttcatgcattaaaaaaactagttttggctgggcgctatggctcacgcttgtaatcccagcactttcggaggccaaggcaggcgaatcatctgaggtcaggagttcgagactagcctggccaacatggcgaaacctcttctctactaaaaatacaaaaaaattagccgagtatggtggcgggcgcctgtaatcctagctatttggcaggctgaggcaggagaatcacttgaacctgggaggcagaggttgcagtgagccgaggttgtgccattgcactacagcctaggcgacaagagcaagactccatctcaaaaaaaaaaaaaaaaaaaaaaaaactccctattacagattcataatttatgagtcattaaataatattttcaagccatgacattttttccagcagtagtctctaaatctgttttaccatcataaaaccccaagcaaaactctactacatcagctgtgtcactgtaaaacctgccttaactcacagaagcatgaaattaagcaatgtgtgtgaaactattttataaactgtaaagtattccatacatacatgttggcagttattaatgtcttctctaggtgtggctttgaaatggatgcagatgctttctgttacaaaaaacataagttgcaaatgttctataacaaggagagacacaaatatcttcatggacatggattgctatgagtgtttgattgcctaatacttgagccaccacttcagtgatatggtataatttatcaaacagtgttgagaaacagaaactactggggatgttttaaagaggaaaatacttaatatagaaattaggggtttacataatcttaagaaaggatgaaggtgcagctcttagccaggcctccacagtaccacaaaccaacttgcaggaagagctgtaaccactgccccagttgggacaatgggtaatgaggatattaaatttaagaacatactgctatagcaatgatccttggcatagaaagctgccaccacaattgcctagagatgggaacatgaagtctggcccccattgcaacagcagtg

SEQ ID NO: 77579 - DNA, 1374 bp, Homo sapiens
aataatcagacccactgatcctaggtcagaaaacagagtcatagctcaatctgacttactatttgctgtatttcatccattctgagatgcacatagtttcacatttcaatgtctctgaaattgagaagcatcttacagtcataattgacagtatattagcagcacctataaatattggctcattttacatttgatggtataatgaagaaaatatttacctttttttctgttttgtttttaagtcacaactcagaagtagatgaaggaaaattctgatcagctgacatcctcttaatgtgagatatttctagtctttattcagtatagattaatggctaattatatgttaaatttcaaagtagtgcttattagtgctttttacttttaagtttcaaaattaacttttttattataataaactccaaatttatacaaaagtagaaaaactagcatactcctgtttatgacccagattcaacaaatactagcacacggccaatcttgcttttttttttttttttttttgagatggagtcttgctctgttgcccaggctggagtgcaatggcacaatttctgctcactgcaacctctgcctcctgagttcaagcgattctcccacttcagcctcccaagtagctgggattacaggtacacaccaccatgcctggctaattcttgtatttttagtagacacgggatttcaccatgtcgtccaggctggccttaaactcctgacctcaagtgatccacctgcctcggcctcccagagtgctgggattacaggcatgagccactgagcccggcccaatctcgttttataatactcccatctcccattctttccactgtcccacctgcaagtttggattattttgtaacaaatctcaatcatcatattattctataaccattttaatatgtgtctctaaaatatattagctttatttttaacatagttaaatgctattgtcataaaataataatcataataattaattgtaattctatatcatcaattatctagttaatgtaaaaaataaatctaaggccaggcgcggtggctcacacctgtaatcccagcactttgggaggctgaggtgggcagatcacctgagatcaggagttcaagaccagcctgaccaacatggagaaaccccatctctactaaaaatacaaaaaattagccaggcgtggtggcgcatgcttgtaatcccagctacttgagaggctgaggcaggagaatcacttgaacccgggaggcgaggttgcggtgagccgagatcgtgccattgcactctagcctgggcaaaaagagtgaaactccatctcaaataaataaataaataaataataaaaaataacttaaatctac

SEQ ID NO: 77580 - DNA, 2193 bp, Homo sapiens
aggaagccagtccaagtcccaaaacctcaaaagtagggaagctgacagtgcagccttcagtctgtggcaaaaggcctgagagcccctggcaaaccactggtgtaagttcaagagtccaaaagatgaagaacttggagtctgatgtttgagggcaggaagcatccagcatgggagaaagatgaaggctcagcaagtctagtacttccacactcttatttctgcctgctttattctagctgagctggcagctgattagatggtgaccacccagtttgagggtgggtctacctctcccagttcactggcttaaatgttaatctcctttggcaacaccctcgcagacacacccagaaacaataatttgtagccttcaatccaatcaagttgataatattaaccatcacaggaaggtactagtatcatatgtttaacagtagaaaccaagacaaatgcagctaggaagtgggagaactgggatcagatgcaggcagtctgattctaaatcagttgctgttacccactctgacaacagtaagtgagtagcctgctcagtcaagtactatattagtagggccctttacagacatatttatttctcacagtcactcaatgagacggctcttccagtcttacaatggagaaagtgaggctcagagactttaagtaacttaccttagacgactttactagtaagtataagaatcattatttggactaaagtctttctgaatcctcagcttgtatttttttccagtgttctgtgctgcctttttatctactagtgttttacatcaattttgaatctctttactaactggttaggttgatttttgccttttttttttaggttattctatatttgtcgttaagggtgatctgccagattgcgaagctgaccaactcctgcagatgattagggtccaacagatgcatcgaccaaaacttattggagaagaattagcacaactaaaagagcaaaggtaaaaatgaggcctgcagtatggaatatatggtagtatttcattatgagaattaaattttcatgcttagattgaatatgtggtccttgtgttgttggcgactctattttggaccttatattttagtgaagtttattagtttaaacttgaatcaactctttgaaatacttaaatatattaacttagttagctggtatggtatattcctagcacttcgggaggctgaggcaggctgattgcttcaacccaggagttcgagaccagcctgggcaacatggcaaaacctcatctctacaaatagtacaaaaattagccagatgtggtggtgtatgcctatagtcccagctacttgggaggcagaggaagaaggatcacctgaaactggggaggtagagactacagtgagccataatcacactaccgcactccagcctggtcgagagagtcagaccctgtctcaaaaaaaaaaaaaaaaagaaacggaaaaaaaaaacttagttggattcaaattgcaacacaatcattatattactagagcttatttgccagaaaacattttaagttttgacttacttaaagcctttacattacaaatgcctttatgttatgtctaaaatagaagattggttgcagttattaccagtgcttttgttctttagagtccataaaacagacctggaacgagtgttagaagcaaatgatggctcaggaatgttagacgaagatgaggaggatttgcagagggctctggcactaagtcgccaagaaattgacatggaagatgaggaagcagatctccgcagggctattcagctaagtatgcaaggtaaagacattctgatgtgtgttgtattcattgctgaagaattgattccaattattcttagatttcatggaagttaatgtactcttagaggtgttttgacaattactgcagaagcaatagctatatagtgggctttccctttagatttcttataatggaaatcactttttacaacctatattttattaggagtagttatatttttactcctggttattttatttggtttcaacactgtactaacacaatagtaaattgtggttttaatctttgtgggtatcagttgacccttatccaaatcagctgttacataaatatgtgccattagacactatggaagggcctggacagggaatataaactgattttacaaaaacccaacattta

SEQ ID NO: 77581 - DNA, 1129 bp, Homo sapiens
cttaaatgatctatccatccattcacccatccatctatcaaagtgactaggcctatttctgaagcccaggctggagtgcagcagcataatcacagctcattgcagctccaaactcctgggctcaagtgattctcttgccttagcctgttgagtagctgggactacaggcttgtgctaccacacctagctaaggttttactttaaatttattataatcacaaaattcagatgagcctttagtgctgtctgatatttctactatgttttcttagtgatgtaccaccctccaaggtgtttataaaaaattatgtaccactctccaagaagtttataaaaaataatgtgccaccctccaaggtgactaatttcacagcttatgtctttaaacctttaagcactttcctctcccttacacaccttccttgtggctttccgttacattctgctgagaacatagaagcaattaaaattatgttctttctaccagcaaatttatcaatttgcttatatcttcacctgtgctttgagcctatttaaatagatgaatggtcccctacctctaaccaaaaccagtccctcacttgtgggctggatcccagctcttctcacctactcaagatgttcctgctttcatctctccactctcttatataatcagttccccccccctttttttgtaatattcctataagcagtaaaataagctttttatttccattgattaaaaataaaaatcctctcttaattccatgaaactccagctgcctccccatttttattttttccttaggattgtctctagtgtgccttctccttttcttgaactctgcctcctgggttcaagcgattctcctgcctcaacctcccgagtagctgggattacaggcgtgcaccaccatgaccggctaattttttttttttttttttgagatggagtttccctcttgttgctccggctggagtgcaatggcgtgatctcggctcaccgtaacttctgcctcctgggttcaagcgattttcttgcctcagcctcccgagtagctggatttacaggcatgtgccaccatgcctggctaattttgtattttagtagagatggaaggggtttctccatgtttgttaggctggt

SEQ ID NO: 77582 - DNA, 1112 bp, Homo sapiens
cttgggaggctgaggcaggagaatcacttgaacctgggaggcagaggttgcagtgatccgagatcatgccactgcactccagcctgggttacagagtgagactcttctcaaaaaaaaaaaaaagtatttaatagtgataaatctgcagtattctcttgtagtttttaagatcatattattcagtcaaagaaaagagctcaacttgaaatatttccagagtttaaacaatcttactaagctttgatgggttgtatctattcttaacatgtgaaacttccttattacctataatatacactaacttaaatattgacaatttttttccagtggtttaacttgaattctctcttgacgggtccagaattaatatcagatacatatcttgcacttttcttggctcaattacaacaggaaggtaagtaacggctgaacattttgtaatgttacctttcgaagtagttaaataaccaggcacattagatgacagtgtgataaaactgtttttctggcagtggcagtgaaacaatctttagttttgacgtggtgataggctgtgatttgggtgacgctgttcagttagagttctcactgacacctggcccttcctcttctgaggatgctgctttctttgcagcccttctaagtaatggctttttcttttatacatcacatatcacacggctgagaggagggatagatgtttttcttctttgcctcttctaggccactgttcttccttataaactccagtttctttgaaatacatgcccctaacggctgggcacggtggctcacgcctgtaatcccagcactttgggaggctgaggcaggcggatcacgatgtcaggagatcgagaccatcctggctaacacggtgaaatcctgtctctactaaaaataacaaaaaattagccggggtgtggtggcggacgcctgtagtccgagctactcgggaggctgaggcaggagaatggcgtgaacccaggaggcggagcttgcagtgagctgagatcgcgccactgccctccagcctgggcgacagagcgagactccgtctcaaaaaaaaaaagaaaagaaaaaaaaaagaaatacatgcccctagattaaactat

SEQ ID NO: 77583 - DNA, 1024 bp, Homo sapiens
atccaggagtttgagaccagcctgtacaacatagtgtaagaccccttctccacacaaaaaaattagaaaatttgtcaagcatcttggtgcacacctgtagtcccagctgcttgggaggatgaagcgagagaatcacttaagcccaggtgttcgaggctgcagtgagctatgattgcaccactgcactccagactagatgaccatctcttttaaaaaaatgtgtttatatgttatatgtgatagtgctttttaaaaacatttttaaattatagagacagggtctcactatgttacagcccaggctggtctcaaattcctgggctcaagcaatcctcccaccttagctaacctcccaaagtgctcggattataggcatgagctgcatgcccagctaatttagtgatttttaaaaactgagctggtaattataaattctcttcctggaacttctgactttctcacaattggaatcttttgacaaaaattatcagtaatgggaaaactttgtgtagttgtcatttttcctcccatcagtgtgatagatatgattggagttatgttggactgatattttgaaaaaagatttaattatagctattaataaagacatttaaactactgactatgcatttttattcttttgggagggtttaatgtttatagtttaaagcaaactgttgtttttaaaaaagtatctaacagggccgggcgcggtggctcacacctgtaatcccagcactttgggaggcctaggcgggcggatcacaaggtcaagagatcaagaccatcctggctaacatggtgaaaccctgtctctactaaaaatacaaaaaaatagctgggtgtggcggcgtgcgcctgtagtcccagctactcgggaggctgaggcaggaggatggcatgaacccgggaggcggagcttgcagtgagccgagatcgcgccactgcactccagcctgggcgacagagcaatactctgtctaaaaaaaaaaaaaaaaaaaaaaaaagagtatttagcagaggc

SEQ ID NO: 77584 - DNA, 1680 bp, Homo sapiens
gcagttttatttaggaattgtgtggttttctggaacatctcagagacctggtatgaaaagcactcttctaatatatatgtgtttttttttatggatttagtgatatatctatacacacacactttttaaaacctatagccggctgggcgtggtggctcatgcctgtaatcccagtactttgggaggcccaggcgggtggatcacaaggtcaggagattgagaccagcctggccaacaaggtgaaaccctgtctctactaaaaatacaaaaatagctgggtgtggtggcgtgtgcttgtaatcccagctactcgggagcctcaggaggagaatcgcttgaacctgggaggcggaggttgcagcgagccgagatcgtgccactatactccagcctgggcgacagagcaagactctgtcacaaaaaaaaaaaaaaaaacctatagccttctagagaaatttatatatgaagtacacaactaacatagctacacttcctaaatttggaatggagtggtttagcttatgaaaagttgctatttttcttaacaggttataagcaatgccttgaaagtttggggtttagaactaatcctgttcaacagtccagagtatcagaggctcaggatcgatcctatgtaagattctgttttgcatttcatacatttcttttcccaaatttgatttttaaagttgtaatttcttaaagaagagaaatacattttgaatacttttgttttgatgttccctgtttcattcactcagactttcctatttcacctttgtgatgtccatgagcatctgccctgtagccttcctggcaccccagtgtctgtggcagcacagagctgaccccataagtggtgcatgaggccatcttgtggcacagcatcactaagctgctgcagagacgttcatatggttgtgtgatcttttaaaaacatcagtgacacttaactataaatataatcttaaattatcacaaattttatataatatttgccagtagacaacataaatatgaattcaatatttcaagttaatattgtctgttttcttttttagaaatgaaagatcatttatatgcaattataaggaacactggtttacagttagaaaattaggaaaacaggtaacatttcttacccttccttgtctttttttcttatattgtaccccatttaaaactaaaatgtgggccaggtgtggtggctcatgccaacagtttgggaggctgaggtggggggatcacttgaagccaggagtttgagaccagcctgggcaacaaagggaggtcctgtctcttaaaaaaaaaataaaaataaaaataaaaataaataaaaaaaaaaacaaagagccaggcatggtggctcacatctgtaattccagcttacttggaaggctgagtcagaaggatcacttgagctcaggagtttgaggctgcagtgaactatgattttgtcactgtaccccagcctgggtgacagagtaagactgttctataaaacataaaaataaaaaaaatatatttaaaaattaaaaaaaaaaaaggattgctgactttaaaattaggaaactgaccagtaatgtgtgtgtgtgtagcatggtttatccttcttgatagatagaaattgtcattttaaaagataatatcagttttccttataaatttatttgtgacaag

SEQ ID NO: 77585 - DNA, 1012 bp, Homo sapiens
tctctattcaggtaagtagtcacaagcatgtactatgtgttgcttacatcccaggcaccgtttcacagcctttcaatagtcactgtaacaaggcgaccttcggaagttcttctgtctacagagtatagattatactctagagtactagattttttttttcttgagacagagtctcgttctgtcacctaggctggagtgcagtggcgtgatcttggctcactgtagcctctgcctcccgggttcaagcgatcctcctgcctcagcctcccaagtagctgggattacaggcacccgccaccacaccagttaatatttgtatttttagtagagatagtggggtttcaccgtgttggccagtctggtctccaactcctgacctcagcctcccaaagtgctgggattacaggtgtgagccactgcacctggccaactagagtactagatttttatatagataaacatgaaaggattgtagaatcttcatattagagtggggcatttaaaaattccttcttgagaaagattaatttgcatctggatgctaataataaccttaattctggccgggcgcggtggctcacacctgtaatcccagcactttggggaggccgaggtgggcggatcacgaggtcaggagattgagaccatcctggctaacatggtgaaaccccgtctctactaaaaatacaaaaattagctggacgtggtgacacgtgcctgtaatcccagctactcgggaggctgaggcaggagaatcgcttgaaccagggagtcgtaggttgcagtgagccaagatcgcgccactgcactctagcctggtgacagagcgagactccatctcaaagaaaaaaagaaatccttaattctaataagtcacaatgtctcaaacttaccatctgttgggtaaatttgagaaaatgcaataccttgctaccatccttttaaatcagcctaccagactggatttccttattatggtttgtggcttttgattttttttttttaatgtata

SEQ ID NO: 77586 - DNA, 3693 bp, Homo sapiens
tttcctgtagcaatacagtttttctttgatgaagtttgatttcaagtacttatttttcataatttaaagctattttttatagagagaattttaatcaaatatttggatgtcactattgctatatatggtattaagtatggtgaccatagtttgtaaactccaaactgacagcaagacaggaaatttgtgttagcaaaggcttttttcttactgtttgaattttttaaaaattagatacaatacagagaggagcacacaaatcattaagagtacagctcagcgaattttcacacagtgaacatgtgtaaacagcaagtaacaaaagatttacctgcatcctataacctcccattattcccttttctaggtactgtctctccactgcattcccaccaaatataaccactatgctgaattctgacatcataaatgagttttgcctgattttgagcttttgtgactggaagtgtacagtgtatataccctttcgattctgtcctctttagtttaccattgtttgagaaatttatccatactgttccagaattaactactgttaattattgttaattaactactgttgtagttaattcatcctcattgttatctagtattcttttgtgagtaaacacaatttccattctactgtgatcccagctatccatttgggtcgtttccagtttggggtccattacaaatagtaatgctatctgtaatgctattttgtattactacaaatagtaatgctatttgtggcacaaaaatactgcttttgtgaacattcttatacatgtcttttgatgaatgtatgtttgcattgctgttgtttacattatgtacctagtaatggaattgctagatcataggagatgtatatattaagctttagtggatgcattacataattattagttattattggttataccaatttatcctctcatcagtagtatacaacagtttctgtatctctaatctccaacattttagccattttagagtttgtgtactaacacattgtggttttaatttacatttccctgatgactaataaagttgagtacctcttttgtgttctttatagccatttgactgtcttgtgaagtgcttgtttgtcttgcctatttttcttttctttctttctttttcttccttccttcctttctttctttcttctttctttccttccttcttttctttctttctgtctttctttcttgtctttcttgtctttctgtctttcttggtcttgccctgtcacccatgctggagtgcagtggtgcagtctcagcttactgtagcctcgacctttttggggctcaagttatcctcctttctcagcctcccaagaagctggactacaagcacgcaccaccatgctcagttaattttttattttttgtagaaatggggtttcaccatgttgtccaggctggtctcaaacttctgggctcaagtaatcctcctgccttggcctcccaaaatgctgggattacaggcatgagccaccgcagccagccttggctatttttcaaaaggatataagtagaacatctgtatatcccttcaatttgcatattattcagtaagagttgcactctggtagtagaaatatataaggaggagaaagaagtggaaacaaaaagtctattctcatgagaagacttgggggatagtgttctctctagctccaagctacttattccttacgaaaagttgaagataaacttatctcagactgaggctgtctcaatgttgtcttcctattccattatacacatataacccatatttttttcaccagctgaattttgctcctagaaaattgattcatcaggaaaaatatccgtcttgcaaggtggttctctttagagtctgctgtgtgacatagctcaggacaaattgtgtgatgtcagataggttgggttaaggaatagaccttattggggaaagagagaacttggagggccaaggttagcaggagaaggaaatgttctctcatctgccgtcaattcagggaggggcaaacctggtgtctgtgttcacagggagggatccatccatctgtgattctcccttcttatcaggtagcatgggaaagctacactgttgcggggaggagggtcacacgcaggctacttagtaccaggcaccctggacttggattcaggttgccagttgtgtgagaaactgcccagcacctgaaggccctgaacccatgagaagttgtacctacctcccatgaggaggaatcctgtcatcccatgggagctgagcttgggtgcagtccctcttgctggcttgtccaggagtgagctccagggttgtttgggacagttctgctcattgctttacactgtgtatacattatctgtagagttccatgaagagaacttcagcactgtaactgcaagttttaacatggaacagaatttttctcacctgtattaattcttaagatttgaagttctatcaacaagcatttagattgtgtggagatttttttatttttatttttggagacagagtcttgctctgttacccagactggagtggcagtggcatggtcttggctcactgcaggctctacttcctgggttcaagcgattctcatgcctcagtgtcctgattagctaggactacaggtacacaccaccatgctggctaatttttgtatttttagtagagacgaggtttcaccgtattggtcaggctggtctcgaactcccagcctcaagcagtccacccacctcggcctcccaaactgctgggattacaggtgtgagccaccatgcttgactgacatcatcatgttaaaagaataaatgttctagggagctgggcacagtgtcatgtttctgtagttctagctgctcgggaggctgaggcaggaagatcccttgagccctggagttcaagtccagcctgggcaacatagtgagatctctttttttaaataaataaataactgttctagggactaaaatttcctttcaccattagtaatttactgtagaatctccaagaatgaacttattttaggtactgaaaatgagggagactaaatgttttatacagtagtttttagtaaaatatgagatttgatgcatttgatagatgatgtttgtttaaaataattcttaaatttttgatcatgtaattatagtttcattaatggtagatttgtaaaataaatgttaccaaatgaaaatgcatgtacctatgttaattatccttatctaaagctgaaagttcagttcaactatgttaaaacatagtaggggcctggcagggtggctcttgcctgtaatcccagaacttagggaggccaaggtgggcagatcacgaggtcaggagatcgagaccatcctggctaacattgtgaaaccgtatcgctactaaaaatacaaaaaattagccgggcatggcggtgggcacctgtagtcgcagctacttggtaggctgaggcaggagaatggcgtgaactcaggaggcagagcttacagtgagccgagatcatgccactgcactccaggctgggtgacagagcaagactccatctcaaaaaaaaaaaaaaagttggccaggtgtggcggctcacacctgtaatcccagcacttttggaggccgaggcaggcggatcacaagatcaggagtttgagaccagcctggctaacagagtgaaaccctgta

SEQ ID NO: 77587 - DNA, 1036 bp, Homo sapiens
ccaaattctgtataaatgacttgaagtgctaatagcacaggttttgaaacctctgcctgggtttgagtctcagctctgccttttactacctgtgtgatcctgagcaagttacttagtatccctgtcctctagtttcctcctctgtagtgtggggataataacatagacataacctgagagttagagtgtagagaaggctccctggcagatagtgctgtagaagtactggccattgccattactcaggtgcttgtgtttgctgaacctcatagtaagggctcggagagcactaagaggaggtgagaaatgctgctagattgacagcttgtccccagatagcccattcccgagagcaccttaggtttatacctgatttgtgttgtagttagtagtgtctctggtaatttgaactagtttcaggttggtcttgaaaacctggggaggttgggggtaaatgatttggtagcagttctcttttgtgattttatacattatctttgtagaactgcagtttgctaattctctgagcccaacacaatgaagtctgggcctaaaatcatagaatttcttttatttttttttttgtttttaatttatttattccctccctccctcctttcttcctttcttccttttctttctttctttccttccttccttccttctttcttttctttctttcttttctttctttggagtctcactctgtcaccaggctggagtgcagtggcacgaactttcttcagagtctcactttgtcaccaggctggagtgcagtggcgcgaactcagctcactgcaacctccgtctcctgagttcaagagattctcctgcctcagcctcccgagtagctgggactataggcatgtgccaccatgcccagctaattttcttatttttagtagagacgaggtttcaccatgttggccaggatggtcttgatctcttgacctcgtgatccacctgcctcagcctcccaaagtgcggggattacaggcgtgagctaccacgcccagcctattttttattttttgag

SEQ ID NO: 77588 - DNA, 1055 bp, Homo sapiens
tttaacatctattacatctatgtctatcatcttcttgtttcagatgcaatttatttattttattgagatggagtcttgctctgtcgcccaggctgaagtacagtggcacgatcttggctcactgcaacctccgcctcctgggttcaagcaattctcctgcctcagcctctccagtagctgggataacagacgcgcaccaccacacccggctaatttttgtgcttttagtagaaatggggttttgccatgttggccaggctggtctcgaactcctaatctcaagtgatctgcccacctcagcatcccaaagtgctaggattacaggcatgaaccaccgcacctggcccagatgcaatttaaaagctatttcaaaaaaaaaacaaagcagttgtatttctgataatttttttttcttttagctatcatggtgaacttacttcagattgtgcgggaccactgggttcatgttcttgtccctatgggatttgtcattggatgttatttagacagaaagagtgatgaacggctaactgccttccggaacaagagtatgttatttaaaaggttagtctgcatttttttaaaccagcaattggccaaatttggggaatattctttttgatatgtgccaaaaataaacagaaggggtaatttttcccccttgaggacttagattcaaatgatactgtttttagtcttgtttgttattgaatccttggataaaacagtatgattacctctagaatttaaagtcttcatttaatgaataggctgtttcaggtctttgaaagtatcgtctttttttaattcaaagtgcattttaatatagaaacagtttaaaagtagctggccaaaacctagcttatatacagcttccacatatattgtcatatattatcttacttaagacatgctatagctgagataaatagtaataacagcagctaggtgctgtgttcttagcagcactacctgagagctttagacctggtggtagagtgatagcaactggcagctgcctggtcccattgtgcctctagagatggctcctctgg

SEQ ID NO: 77589 - DNA, 1013 bp, Homo sapiens
gcccgcacggagcagaggggtgacgccagcaaatcatactactttttcctcctcagggttgactcctctcattttttttttttttagcttccaaacattaccaataatttctgaataaaatttcgctccagacagacgaggcgtgcaggcgtgaccgccgtcgccttccgacagcaccgtgcccaccccccggagatggtctcgccctggttcctcctcgtctccgccgctagtctccagctccaaaatggcggctgccactgtggggcttctgccggccggtagtccctggcgctgctgacccagcatcggcttttctacgtcttgaacctggattcgcctaggggttgggaagggctgtggacggcgttgggggaggcctgacgaggcaagtgagggcgggagaaaggagcgagcctcgggctggggaaggcggcgtcattggccctccgggagcacggggccccgactccgacccggtctcccccgaggactcgcccccgccgcttcggctgcgactgtcccggtcgttcccggcagaagtggtcagcgagggaaagagaagtgacttctccatgggtttcaagctcccagctgttttgcggcagcccgtacggttccctcccgggatcttcttccctcctttctgcttccctctgcttcccctttcatctcttggcgctggaagagttaaaccgacgccagctttagctccttggcttcgtggctacggcgttcttagcctcccctgctcgggctcttcccgtcgttttgggttgagagaccacgaggttgctaagctctggacaccgcttaggcgtccttttagttcttcgactccagagacctttcggttgtttgtaccacactgtactaaaagggtcttgggccttcgcgccctcccgccatcgccctccagcgcttccactatcactgcgaagttctaattcttttttgacttcgtactattttacgtgctctttagaaaagaagaggtcagattgaaccccggc

SEQ ID NO: 77590 - DNA, 1720 bp, Homo sapiens
gtgttgagattaaaggcgcaagccactgcgcccggcaacatgcacgattattattaagagggcaagtaactgtgagatatttgcgatgaagtagtatctgtcaaaaccagtgctctgaaggaatttatgatatgatgaggcttcattccttcttgcagtacccatttatgctgccttgaccactgaagttggtattggatatacaaagatgatcacttttactcctctatacattgaacatccattcaacaaatactttatgtgcctcctttataacaaaataactaactttgcctagggcaacaaaaaggctttataaaggagtaaatatgtgagctgggtcatatagcatcaaaaggaatttgctgagctcaaaaggagaaggtaatttcgggattcagtacaggaatacagagctttgagaagctttagcatacttagggagagtgggataatcaacctgcctgagcatttagtgcacgagtgattggtgaagcaagaggtaggttaagatcagcttgtgaaggatcttggtttccaatagggagtttagatttttttcagtagttaccaggaatccagtggatattttgtgcaaggagtgagcaggaggatatttgtttttttaggatggtctctgacagctatatggaggatcaactgggaacagaaaaactagatgaaaggaaatgggcaatcattcaggtaaggcaatgagggcctccatggaggcaggacataaaggaggtcagagagacactaagtaaatgtcaaatgggattcacctgctgactgctaagttaatggtaagaaggtgacttgagtttttagtctgggagagtaaatggttggcaatactattaaaacttagtctgagacatgtacataaacataggatggtgccaacctgcactttaggggtgacaacatgatgctctatagtgtaaagcattggtttttatggtctggagtctagatctgcactgttatggtagtcactagccacatgtagctattgagcacttcagatgtcgttagtctatttgaaatgtgctgtaaatataaaatacacagtggattttgaagatttaatatgaaaatgtaaaatattcaacatgattacatgttgaaataatattttggttctattgggttaaataaaattcattaaaattcacccgtttctttttcacttttccatgtggccatgaagaaattaaaaagtacatttgtggcacgcattatatgtctgttgacagagctgttctagtctagactagatgtgggaatttgtaaggaggtggaacatgagctgggcctgaagacattgagcagtgatgtcagggtggcttcctggcaacctccattgccagttaaggcatttggtttgtcttttctcaagcagtaagaagccttcagagatttctgagcaaggggtaataggtgcagggtatttctgaagatgaatctggtagcaatgtttaggttggatgaagggaggaaatactggaggcagagaaactgagaaacccaaacataaggtagtgaggcccttcctgtattagggtactggcagtgggatagaaagggaatgatgtgcaaagcgttcctgagggaagaataatcaggaactggtaataatagactgtcccagaagtgaagaatcagcatgtagcatttcaaaccttggttacttagataacaactaatatattcatgt

SEQ ID NO: 77591 - DNA, 2292 bp, Homo sapiens
tattctgttagtttagacgttagcaaaaatggaaacatttggtaactgtatatacaaaatacacattaaaatttgctagttcatactaaataatttaatagtgtactagcttttaaatctaatctctagccttgtacttataagcacaaataactctacaagattacataatatagtaacaagaatgtttgcctctagtgagggagtggagtaggtgggggacaggagagtgaagcctgctttcactatatgcatttttacttttgaaatttgtattattgcatatacagtattacctattaaaatattatagttgagaaataaataacctttctttagggttgtaaaagaaatctgagtattgttatcttgttgacataggtaaaggacatggcctgtctatcacacctctgccagctggtcatatgataggtggaacaatatggaaaatagtcaaagatggagaagaagaaattgtttatgcagttgacttcaaccacaagagggagatgtaggtatatcaagagaaaagctaaaggcaatgcaattggtattattttattctttggagaaaaaataagaaacacagtttttgttttggttaccagaaatttagagcaacttaaaaccgtcaaatagggagtgttttcaaaattaattatttgcatagtaagggggaaagtatggtataagacataagagattttaaaaatttataggttaagtatacactctacaaaacgggtatctccctggagatgttgcaaaggagatgaattttttacgtatcaaattacatgttcttgacctgctatttaacacaactttgtggatgggttgttcttttgttttgtaacgtgatatggtttggctctgtgtccccacccaaatctcatcttatagctcccataattcccacatgttgtgggtgggacccggtgggagatgattgaattatgaggttgggtctttcccgtgctgttcttgtgatagtgaatgggtttcacgagatctgatagttttagaaacaggagttgccttgcacataatgtaattaccatctaatataactgccctgtatgtttaaagttagtccctttgaaagggaactcaattctagttatgattttacacacttcatgtggcactcagagcattactatataatattttggtgtttagtctcttacaggctcgttttgttttatctgtacattaagttcatagctattttgtgttacattacaatagtctcaggatctttatattaagaaatatttaagacaaatagactgaattttagacacttataaccatagattaatgaggaaaggatggctatgttgcagggcaaaagagtgagggtcgtgatcaactcagtataccactggaggctatatgagtaaacagcaaactgttcgcataaacgcagaaaattggcaaactgacaaactgtgtctgccacccagaaggaatgctgagggcagtcaggcctcaggtgcaggtgtttcttgtgattagacacatctgaagcctgttagcagtaatgtgaacctgtgatcaattaagcagctgaccaattgttacctcgtcctccctgctctttctacccaataaatatgaagggctgtagaagctgaaggcagctccctttgctcactagaagcagggagctctcttcttcttctcctgaccccttcctttaaaatagttacttttgttttaagttttcatttctgcattcgtcctccttcgttcagtctcgtagtaaccgtggcaaactgcagcatggctatttgagtaaatggtattgaaggattcaaccattttggaaaaaaatcaatttgtgtccttttaattatataacaaaagaaatttcagatggattagaactaaatagaaatgaagcaatattggtgagtctgatctctgatttggaaaagactttgtaagcataaaaataatgaaccaagttacaaagtaaaagtttgatagatttgatgacatacaggttcaaatgtctgaaacaacaaataaaaaaaaaaatcaaagtaggaaaatatttgcagcaagttgcccaaaaacttacaacatatatataagatcaagtattaatttattaataaaaatataccagttgcaagatggacaaaagttataaagtcaaaagagaaaatttaaatgatctttttttgttagataccattaaaattattattattcttatttatatttttatgtatttttttgaaacagagtctcactctgtcaccgaggctggaggcacaatca

SEQ ID NO: 77592 - DNA, 2092 bp, Homo sapiens
cccggggccagtacccatgggtactgagggatggctgtatatataattatgtgagtgtatatatgtatgtatataaatttgggaattcatcataacggagttcactggggtggataggcgagaccagggtagcccggaaacaccaggctggttacatttggcctggtcatacaattttctcagtgatacacacaccattttctatgtgtattatgatgtataaagtgttgaggactactgatttataattttttaatgaagaaagattgagagttaatgacactgaatatatgaagagatattcaacagaatcaaaagcagttgtaatgacctgaacaaaattccttcattttgtacttggcctagtagttgcttatttgtaaattatagtctttctaataaaaacagggagataaaattatctttaattttgtagcatagtattgttacgttctatggggattttacattcttgttttctagcaaatgtcctggaaacacttcgaggtgatggaaatgtgttaatagcagtggacacagcaggcagagttttggaacttgctcaacttcttgatcagatttggaggactaaagatgcaggattgggtgtttactcattggcactcctaaataatgtcagttacaatgtggtggagttttctaagtcccaggtttgttctcatgttgtcacttgtaataagtttgctacagtgattgggtctgtggaagtgggcgtcttaaatgttttttggattttatttttctcttgaagagattgttaataagatgataacttggcattaaccatttactgtcctgtgtgctttaaatgtattatttaatttaatccctatttattctattaagtagtttccattgtgtccctgttttaaagattaggcaaattgcttcccttctaactcttagtatcccagtctgtaaaatggggacaaaaatagaacctacctcatagcattggcatgttagaattcattgttctttcttttaaataagctttttgccttgaaatagcaatctttgggagtaagattttcatttagaacatataccttgccttttcaaaaagatttaaggtgatttatatgtgaaatataatgcaaaattggttttctttgggatgaaagtgagggtgggataatctaatgggaaatggaagcagaaaataagctgcttgtcaaaacagtacaaatttaagcaaccagtgggggtaaaagatagaacttgaattccttgactattagagaatatattgaagttataatatagtatttctaattcttgtcatctttccccccatgttaggtagaatggatgagtgataaattgatgagatgttttgaagacaaaagaaataatccgtttcagtttcgccatctctctttatgtcatggtctttctgacttggcccgtgtacctagccctaaagttgtacttgccagccaacctgacctggaatgcggattttcaagggatctctttattcagtggtgtcaggaccctaaaaactcaatcattctaacctacagaactactcctgggactttagcacgtttcctaattgataatccttctgaaaaaattacagaaatagaggtaagcacttgtatgtgaactttatcttaaaactgtttgggggatacattgtgcatgatgtaaaaaaatagtgaccaaaaataaaacttgaaattgttttaggatttttatcagaattactcttgagagccaggagtggtggtgtgtgctgtagtgccagctactcgggaggctgaggcggaaggaccactcgagcccaggaatttgaggtcagcctgggcaacatgccaagacccaccccccatctcttaaaaaaaaactactgtggaagagagcctttaatagcacaaatttcagagttccttaactggaggttctcattcttctttgagatggggtcttgctttgttacctagtctagagtgcagtggtgctatcatagttccgtgcagcctcaaactcctgggcttaaaggatcctcctccctcagcctcctaagtagctggaaccatagacatgtgccaccatgcctggctat

SEQ ID NO: 77593 - DNA, 1024 bp, Homo sapiens
ccgaccttaggtgatctgcccgcctcgacctcccacagtgctgggattacaggtgtgagccgtcgcgcccggcctattattattattaatttatttatttttgagctggagtctcactctgttgtccaagctggagtgtaatggtgcgattatggctcactgcagtttccgcctcccaggttccagcgattctcctgcctcagcttcctgggtaactgggattacaggcatgtgccaccatgcctggctactttttatatttatagtagagacggggtttcaccatgttggccaggctggtctcggactcctgaccttaggtgatctgcctgcctcgacctcccaaagtactaggattacaggtataagccaccatgccctgctggttttattattttttaaatgaacagataaatattttaaaaattgctcagttttaatttctgataaggtagacattgataaatataacccacaaaaacaaaaagctctttggggttctctaatttttaggagtctaaggtagtcctgagataaatatatgagaactactgatttaatcattccattttgatggattttaaaattttgtccagttttttactactataagcattgctgcaatgtacgaatgtactttttttttacacatttgtgattgtttcagtaggataaattcctagaagtagaaatactgtgtcaaatgtcaaattttatttttagatgttagcaaattgccttttaacatagttgcactaattttccaacagataatggaagaaggtactctttccccatgtatggcattgccaatctcatagatgaaaacaattatgttttttatattttgtgcttttcaaaaattagtaaaattaaggatcttttcatggccagtagttatttgtctttcttattttgtaaattgcctttttaagtatcttgtgctttttcatgtgttgatcatccttttcttaactaatttggaagagctcttaggaaaaaatcatttttattggtcgtagtg

SEQ ID NO: 77594 - DNA, 1050 bp, Homo sapiens
tgtaatcccagcactttgggaggccgaggcaggtggatcatgaggtcaggagttcaggaccagcctggccaagatggtgaaaccacatctccactaaaaatacaaaaaaattagccgggcgtgatggcaggcacctgtaatcctagctactctgggggctgaggcagagaattgcttgaacagggaggcggaggttgcagtgagccgagatggcgccaccacactccagcctgggtgacagagggagactctacctcaaaaaaaaccaaaaaacgcaatacatacagccatctggtaattgatatgaaattgcatcagctttggatgaaatgtatatttaaatcttgagatatgtgaggactccaaaaattatgccacctactagtcatatatgttatgtagtattagcttgctttttactgcttctaattagagacttattatttagaccagaggatttcttagtgccagagcttcaagctactgaagaagaaaaaagcaaattagaatctggtttgacaaatggagatgaacctatggatcaggatttatctgatgttcctactaaatgtatttctacaacagagtctattgaaataaagtaagtgcttttgtgacattttgaaaatagattataagataaaatttcaagcatttgaattatataatttacattatgtcaagcaaaatttctgaatattctttagtaagtttgtgcttttaaaatttatttttgtatgaagagacttgtgaagtatggtggcatgatattttctcttcattaatggtatttgaatgccaaagtaattgaattggtggtggtggggggtgcttaaattgtaacattaaattgtacatttatatgaagaaaaattatttttggcctttttattctgtaagcaggtgaaagggaataatgtgactcacagtttaatttttctgagtaactgcttgtttcataaaatatactccttaacttaaacatctctaagaccctaatgtctggaaaatactgttgtgatctgaagtagttagaaaccttttttctcc

SEQ ID NO: 77595 - DNA, 1742 bp, Homo sapiens
gtgccactgagagaagaagtacaggatgctatgagagtatcaagaggggaaaccacccacatttagaggtttagaaaaggtttcctacaggaagtgataactaatcctaactgatgtttagatgggttgtcaggacagacagagtaggaaagggggggaagagcgttctaggcagagggaaccatatttgcaaaagtacagaggtgaggaaaatgattaagaattcaaaagttttagaagaattcccggatatcaaggttctactcctaattggaacaaatggagatggataccaaatataggactagcacagtagagagataaattttgtctggtaatgggagatggtgtcagtttaaggccagagtgatgtctatatctggaagaaatggatgtgcacataccaggcaggaaatttattctgggcagagtaagaagaagcaaccttccaagaatatggagatgtgaaattctgtggtatattcaggaaaggacaagcagttcagtacctactgaagtatgccaagtactagaggatgggagtgatcagtggttctcaaccttgactgcacataagaatcatctggggagcttcgtgagggtcagagggactcagtttttctggtcttaatcttaccagttatgttagaaacactggatatgacgctctgatatactttttgttttaattgccatgtgattccattttgtagtcagggttaagaatctctattttggaaagtaggcaggggcccaatgatctgcaggtaatgaggtcattgcaggtcattgtgggactcagatgagtgaaagattttccaattttaacatattaccagaggtagaaaatgataataggttatatttaatttgttaatatgtattctgtgggttttatttctctccccctcctttgcatgtctaggtgaggttaaaagactcacttgtcagctctcttcagttttgtaaggcaaaagatgctgaattagcttggatagatggtgtcttagatatgagagtttccaaagtggacacaggggttattttagaagaaggagaactaaaggatgatggagaagactcagagatgcaagtggaagctccctcagattctagcgttatagcacaacaaaaggccatgaaaagtctgttcggagatgatgaaaaagaaacaggtgaagaaagtgagatcattcctactttggaacccttgccacctcatgaggtaaaaaaagcatgtgcttttttgatttcttcctgaatttgtcatccttctagttttcatgtcttttggtttttttccccccttctaaaactaagtgggtctgtggaaccttttatatttttaaccatttaaaatatatgtcagctgggggcagtgactcacgcctgtaatcccagcactttgggaggctgaggtgggagaattgcttgaggccaggagctctacatcagcctgattatagggacaccctgtcagaaacctagtcggcatggtggcatgcacctgtaatctcagcttagaaggctgaggcaggaggattgcttgagctcaggagttcgagactacagtgagccacaattgtgccactgcatctagcctatatgatagagtgagaccctgtcttgaacataaaatatgtctcacatttgggctgattttggagtttttaaaaaagagaacttgtgacatgcttctgtgtgtatgtctctgtgtatatattaattctatatagctaagg

SEQ ID NO: 77596 - DNA, 2935 bp, Homo sapiens
ttgagaggtatctagttaactagcaagattctaggtaattaaacttggaaaaatattaaaactatgaatcctacatgcatgtcaagtgatgtcttcagccctactatgaaattaagaatagagagacagcctctgttgttggattcccttctagtacaaccctcaaaattgggaggaggaataagaatatttttttcttctgtgctaaagctaatgctcttcaaagtaatgtcaaagcagaaagcagcagcattaggcaagaaccactttcgttactgattgtagaacctatggcatccattacatttgctctgaggaaggagggacagggaaaatgggattggggaggaaacgtcttttgaagtaagcaaatgactgggatctagaaaatgaatttttggttcagtcctgcccatggcacgctagttgaccccattatgcaagtgggtgagtgaagagcctaacattaccaaacgtctctgttatgatgaggcatgactaacaaaactgattgtgaaacagaaaatgtgaagggctttgttaaataatgttaaataatggggtaaaatttagaataacaacttggaatgtgatttacagtcttgaaatgatctgtcaaaggacttcagggaataatagaaaatctcttagagataatgtagtattttactttattcagtacagttgtatgtctggtgttttacttgaagttattctttcccctttgaccttatctaaggttcctggacatcagtcagtttttatgaatgaaccaaggctgtcagacttcaagcaagttctcttacgggaggggattcaagctgaatttgtaggaggtgtacttgtttgcaacaatcaagtagcagtccgcagagtaagtgtgttttcaataagggctgaattgaacacatacgtctgatgttttgtcattttgaaattctgtaattcttgtttggtattttcacaaaactgaagatcagtaatttatattcatgatcatgacctcaaaggcttacagaagtcttattgacttgaaggcttatgaaagactcttgaagaaatgatatataattttattgtaaattttaattatttgaatcttctgacatttatgtctatgtaaaattcatgacttcaatattatatccatatgctgtgaatcagagcaacccatgtcctgaccaatcataaagtaatctatttcatatatttcggttattatgtctgcatattaatgaatagaaaatgtactaaagaattttttttatttggtttctagacggaaactggacgcattggattagaaggctgcctttgtcaagatttttataggataagagaccttttatatgaacaatatgccattgtataaaggacatgatgtcaagaagtatctgcttgacctttctaagaaaaagggattcttatcttactctgagcttttgatgttttgttttgtaacatacaaaaagaatctgccagaaaaacttacatgtatcagatttttaaaaatataaatagagaacattttgcaaatgctcaaatgagcattctatcttttggctttcagagtgatagagctcctaacaggtgtacaggcccaagagttgaaggtgattggttttctttacagactccttgttctctagaagggctttttacttgaataaaacaatgcaacttagcaaaccaatttatggccttagagaaacatttttgcatgagttcttacaaactgtttgttatattttctggaatgataagtgagaattatttagaaaagacatgctccaaaaaaaaaacaaaactgataaaacagtttttcgaaacttacttttaaaagcatacgtgctatgactctctccagtttgaatatgcaattgttttcacaggcaggatgtctgttttctgcctgtatttcccagtgatttactctagggtaaggtagtacacatttggttcagaaattaatttttatttctcctatatcttgttttatcaagattttgttgtggcatttcaatgtaaattataacaccatcatttgagtatacataattcaaaagaactacttgatgcagtatagtcttaagggttctgcatacattttagaaacatcttagccgtaagttaggtcctgtgttaaactgtttagtgctctgtttttaagaaaacaaatgttgaacctcacacttttatgtggtgacagtgtaatttaattaaaaggtgtaaatgttttcatctcttaggcttgctgtctcctaaggtcacccaagcagtggttggattttatacacattactactaaaataatactgaagttggataaggttatcctttctgtatttgcgtctttcttgtgactaaccaccctgatatagtattaaccactgtgttcaagagtaaaaacaatatatgcaattttcattgaacttaaagagtgaaaaccatgtaaactattgaaactattgtaatccattaatgcttttttagaatggcagaccttgatgtttatttctcaaatggttaagccctcttctttactcttaatttttttttgagacagagtcacccaggctggagtgcagtggtgagattttggctcactataacctcttcctccagggttcaagtgattctcccacctcagcctcccaagtagctgggactacgggcacatgccactgcacctggctaatttttatatttttggtagagacagggtttcaccatgttggccaggctggtctcaaactcctgacctcaagcgatccacccacctaggcctcccaaagtgctgggattacaggcatgaatcaccacaactagcctacccttagatttttggaaggatcgatcttatttaactatgtgtggaacaacccagtaatatcagactcgaattactatttcattctatttcaaatgcttataa

SEQ ID NO: 77597 - DNA, 1028 bp, Homo sapiens
cgatctcggctcaccgcaacctctgcctcctgggttcaagcgattctcctgcctcagcatctcgagtagctgggattacaggcatgcaccaccacgcccagctaattttgtatttttagtagagacggggtttctccatgttggttaggctggcctcaaactcccgacctcaggtgatccgcccgcctgggcctcccaaagtgctgggattacaggcgtgagccactgctcctggcccaagatctgatggttttgtaagggaattttccccctttgcttggcacttcttcctgctgccatgtgaagaaggatgtgtttgcttccccttccaccatgattgtaagtttcatgaggcctccccagcctgtgggactgtgagtcaattaaacgtgtttactttataaattacccagtctcaggcaattctttatagcagtgtgagaacagactaatatgaataccaatactgaaaaattgtttcttgcctcaccttgtcctatgaacaggaattaaattttaaagtattgccttaagatggctgtgctaaataataatcattgcaagagcaatacttttacctgtttctagatgacaatattactaaaatttctcaaatgaagactttgttttagcttcaattacttcagaaaatataaattttaaagatgactatgagataaatcatgaactcagtggaattttcagatgagatggggcgcgttcagggtggtatgactgtagacggaattttcagatctttgttatttagaagcaagtataggtataacgtggactatcaactgatatctgcaaataatttggttaaaatgaaatttgattgtagtatttgttgctgtaggattataaatgtcaaatatcattgtaaacatttctatatttttagaaatatcttgggtggcctgaaacagaagtgaggaaatcaattttttaaggtgagccatttggcttttttaaaaaattgagattcaacttacataccataaagttcactcttctaaagtgtacaa

SEQ ID NO: 77598 - DNA, 1126 bp, Homo sapiens
tttacagagttgtacaactattaccactatataatcccagaacactttcatcactccaaaaagaaacaccatacccactaccagtcactcctcatgcccccttcctatgacccctggcagccattaatctactttctgtctccttgaatttggattttctggacacttcataaaaattgaataatacaatatatgaacttttatgtttgacttctttcacttagcataatgttttcagagtgcatcactgttgtaacatgtatcagtaccctttttgtgactgaatattattccaccgaatggatataccacattttacttatccattcaaccgttgatgtacatttgagttgattccaaattttggctattaagaatgctgctctgaacattcatgtgcaagtttttttttttttgtatgtacatatgttttcaattttcttggatatatatctaagaattagaattgctggatcatacagtaattctgcttaaccttttgaggagctgccaggctgttttccaaagtggctacaacattttgcatttccaccagcatgtgtttgagggttccattttctcctcattcttgacaacatttattactccctttttaaattttagtcatcatagtgtgggtgaagaagtgtctcactgaggttttgatttgcatttccttaatgactgatgatgtggagcctctttccatgtgtttattgactttttatatattttggagtaatatctgttcatatcctttgtccattttcaatttgtttatgttcatatcctttgtccattttcaatttgtttatctttactgttgagatgtaagagtttttttatatattttctggatactaaaccattatatattgatttgcaagtattttattccattctgtggcttgtcttttcactttcttcgtagtgtagtttgaagcacaaaagtttttaattttgataaagtccagtttgtttttttcccttcagttctttgtgcttggttttatatctttttttttttttttttttttttttgagatggagtcttgctttgtcacccaggctggagtgcagtggcgcggtctcagctcactgcaacctctgcctcccagattaaagg

SEQ ID NO: 77599 - DNA, 1050 bp, Homo sapiens
tcctgacctcaggtgatccacctgcctcagcctcccaaactgctgggattacaggtgtgagccaacatgcctggccctaagacaatttaaatacagcaaactttctggtttggtcaatgtggtaatgcatgaatctagagatactgaatcttatctttactgctgattttatgctatttcccatagaatagcagaaaacaagtatcccttagtcaaaaataagaaaatccacaggctgtatgagaatcttataacatgtttatccaggaatgcttatatgttggttccaaagagtcattgaacaatttctcataaaatctttggataagagggagagatgagggttgcgtagggatttaatgaagtgggtgtctaacccttccaaagctgttttcaaaggttgctcattgatggatctatgctggtgtgaaatcacagtttctgccctcattttaccttatgtgacattttaataaatttctgatttgaggatattggtggcaggttaagaaaatttgcaagtgacctgccactggaagaagtagctcttgtatgagaagacaaagttggtaccaaaagggatcctgacaaatttggacaatgggctaaacctaataaaatgaaatgtcacctgtctttctaaaccaatggtacaaaataatggagagataaagtctagaattttaggttttacaaaaaaggttttgttggactataagctgactataaagatagcagccgaaaaaggtaaaggacttagggccacattactaagaaacgaacagactctgtaattgctaatacactgtttaaaataaaggtcgtggtggtgctgcttcattctactgataagaaagaccctgaataaagcccttccttcaggaaacactcttcctttattttactttccactctaacgagtagtaaatgcacattatggaaaatttagaaggcatagaaaaacaaacaggaaagtgccactaaatgtagtacttttatcattttgttgtatctccatctttttttctgcgaaatgtttatataatatgt

SEQ ID NO: 77600 - DNA, 1057 bp, Homo sapiens
taacccaatatatccaaaatattgtcattttaagataccataaatatattaaaaattactaataggacatttcatatttttttcctattaagtgctcaaagtccagtgtgtatattacactcacagctcatctcaagatacttgagccacatctcaggtgctcactagccacatgtggcccctggctaccatactgggtggcacagccctagagccgtggttctcaaccaggagcaaactgatcccccagggggacatttggtgatatgtaaagatacttttgattgttacaactcagagggtgatgctactggcatctagtggacagagcccggggatactgctaacattctccaatgcccaagacagtccacacgacaaggaatgacccggctccaaatgccaacaatgccgtgtttcagacaccctgctcgagagagagaaccagtttgtgctccttgagtgaaccggcaggagcccaggagtgccatggacgccaacacctagtgtgctgcctggcacacagtgggtacccgaaatcagtgctcagaactgaattcaatggaagacggcccatgactcagtctcagaggaatcacgctccatcctcttcaccagcagtgcagagacaccaagagccaggaaatgagttgtgaaatcaagaacaagggatcagtctcagtgcaactgacagttcacttgcttcgagatgctactgattcatgcttgtaaatagccagcctgctggggtcagggtgcagctttcttcccaccccccttaggcatcctggggcagccccagctcttgggacggggaagcctgcagctccggggagcagagtcaaagagggtgcgtgttagggcactggattgtgccctaactgcatcccacaactacatccccttctaactgtgaggcttcctctcaatttccttattcattttcctttttatcatgtgcctgcactgcatccttcagctcagcccattgctaagaaagctgacactgatctgcatcttcctcatctttgtctatttcctcactggttctgagcgc

SEQ ID NO: 77601 - DNA, 1058 bp, Homo sapiens
gggcacggactgcagtgtcagaaccgcccaaggccacgtcctagcctcaccgcttcctagctctgtgaccttcagtgagctactgagcttctctgggtctcacagtggcggtcactttctccaagacctcagatcaaagttcccaagcttgcaggggaaatggtgaactttgtaagattctgatgttgaaggtggtattttctggacagtcttggagatccttctgtggcactcagggctgttgtcactaccaaggtgttacccacctcccttctccccgtcccctctgctcccagagagaacaaagtgttttttctcaatgggtccagtcaaagacatctccccggccctgcggcgtgagcaggaagcaggtgggattgctttccccaacatgcacctctttccagggtggcacctttacccagcatctcccctgactccttccacctccccttcccctaaaaatctccccagcctggtttctctttagccttccctgacacttggcaatttgcaaatctgtccaatgtctccccttctgttttggcatctgaacctataaatagctcccagacaaagtcctggctgcattgtgacagtttgtatgcttgcactgtattccttttctcagacttttagaaagcctcatctacgcacttgctcaatacgaagagcagcttccaagaaaaggaatcttttattacagcatgaacagtgtagtggggagtcacctcagggtaacatgctgcttgcagcaacgacgagccctgtgaagcatgcgagatggtccaggcaaggtcctggacccaggatggtgaaaagaaatgaggtctgggccctgctctctggaagcttcgtccagggccagagctgggcctgtaaataaatcatgatgtgctgtaatcagctgtaaagtcagctgtgtgcccagtgcccaggccagtgggaggggccagaagttctgcccaagaaggcctcaccaagggatcacctggggactgcccgatgacaggggagatggtggcccacaggaaaggcatcactgccgacagtgaggc

SEQ ID NO: 77602 - DNA, 1024 bp, Homo sapiens
gtctaatgaagaacatgccgtctcggtgtctcagggctattaggacttgccctcaggaagtggccttggacgagcgtcatgttattttcacaactgtcctgcgacgttggcctgggcacgtcatggaatggcccatgtccctctgctgcgtggacgtcgcggtcgggagtgcgcagccagaggcggggccagacgtgcgcctgggggtgaggggaggcgccccgggagggcctcacaggaagttgggctcccgcaccaccaggcagggcgggctcccgccgccgccgccgccaccaccgtccaggggccggtagacaaagtggaagtcgcgcttgggctcgctgcgcagcaggtagcccttgatgcagtgcggcagcgcgtcgtccgccagctggaagcagcgcccgtccaccagcacgaacagccggtgcgcctgcggccgctccaccgcgaacttctccgcgcactgcgcgcacagcgcctgggcctgggtgtccgcccgcgacgccagcgtccgcgcctgctgctcgggctccaggtacgacacgcagatgaagtcctgcggagacgcgaggggcctgtggtcacggcggggccctgtctcctcaggcgccctctcccggcccaggcccctccctggatggatagcgggtggcgggcgccaagctgtctgcgagtccggcacctgcgcctttcccgtctctgccgcgagcctgcggggggcccgtccccctccctgcctggcttcccagctgggccgacagttctgggagatgaattaaggcgcgtctcggagtccctgcaaagaggagccggcgcgtcccctggctgctggtccacaggctccccatcattcattcattcattcattccctccctccctccctccaggtgagttccctgcaccccaggcgcaatgctgggcacggagggcagcacagataagaagggaggtgcgagcccgcccgggcatcccatagtgcgggcgggcaacacagtccagccccttagggctgcaagagcc

SEQ ID NO: 77603 - DNA, 1404 bp, Homo sapiens
atcgtccataaatatcaccagattatctaaaggttgggaaaggatccatgaaccaaaatagggcaagagccactggtcaagatgcttcccctctgcaattgcaaaagtggagtggattgtgtggtgagatgaggaagtttcattcttctcgtttgttttctcccagtacgagtatgcgttgagacatttgtacgtgctggtcaacctttgtgagaagccgtatccgcttcacaggtaactaatgcagcggtgacgcttgaaaggtcgatgtcattctgaaagcagaaggggctgccatcctcttctgcaagtgggcattttcacttctgccaggagctccctccagctttcctctacagccatttgtcagcagggtccagaagccacgttctcagtgacagctgctgggcgggcctgtcataactgcctgcctgccgcatgtgggtttgcgtttgtctgcctttcttcagagttgacacggttcaccaagttctccttcctgtctctcgcaggataaaattgtccatggaccacgtgtgccttggtcactactgaagagctgcctcctggaagcttttccaagtgtgagcgccccaccgactgtgtgctgatcagagactggagaggtggagtgagaagtctccgctgctcgggccctcctggggagcccccgctccagggctcgctccaggaccttcttcacaagatgacttgctcgctgttacctgcttccccagtcttttctgaaaaactacaaattagggtgggaaaagctctgtattgagaagggtcatatttgctttctaggaggtttgttgttttgcctgttagttttgaggagcaggaagctcatgggggcttctgtagcccctctcaaaaggagtctttattctgagaatttgaagctgaaacctctttaaatcttcagaatgattttattgaagagggccgcaagccccaaatggaaaactgtttttagaaaatatgatgatttttgattgcttttgtatttaattctgcaggtgttcaagtcttaaaaaataaagatttataacagaacccaaatattcacgtccgacactgactttgtggttgatgctcctgcacctcctagcgggggcctcctccgtcatcgtcttttccagcgttatcgtcccgagtctcccctcccgctgctctgctgttttctgctcctctgcactccttgggctctgcagcctcctgtgcctttgctacttgctgttcctcctgccctggaacgcctttcccatctcctccacacaccctccaggtgcagtttaaagtagcttctttcctccagccttcctcaccttctccccactcatcaaaagttgtttttggctgggtgcggtggctcatgcctgtaatcccagcactttggga

SEQ ID NO: 77604 - DNA, 1581 bp, Homo sapiens
ttggttgaggagttgtggtggatcttctccaaactctgtgtttttatatagattggtgtgtgtggtattgctgattttagaactgttgttagattattgttgcttgctttaggaagagaacgcttgcagcattttcccttctgattgggagccagtctgtagtgaccgctacagccaaatcgagcctggccgctgtgcccatttggtagctcttgatgccaagcatcagcctggcctctctgtggccttagctctgcccttcccagtggacccagacttcagctctaacctgggcagatgctttgtaccttcccactactggtccttagggacttgcaggtgagtgcgggggagtgagcacatacaggtcacccgcctggataggcggcatcctttgcaggtgacattctttgcctggcatcctttgcagcagaactgctattcttttacatatgaagggcactgctgatgcagtcaggcagagcttggaccagagctgtctggtgaaagaatagcagttctgcaaaggatgccaggcattttgagtcactcactggtagatttcaggggctcccgtgcattgcctgcgtactgctggggtgaccatgcctttcagactgtgactgtggccctgtggtcctgaaagcatgaggagtaaatgtgagcctctgagggagaggctggacttggggtatgttgggcacctctgctcctcccactcaaaccagctctctctctccctctctctctggccttctctcactctctctcgctttctctctcgctctctcttgctgtctgtctccccagacaatctccaccatgaaagtgatgcagtttcagggtatgaaacgcaaagccagttctcccgtccccctacctccagtcacacaccttgacctcacccccagccctgatgtgcctctcaccatcatgaaaaggaaactgatgaacaccaatgatctggaggagtccaggcagctcacggaggagatccagcggcatctggatgtgagtagtggtgaaaggagctgtgcccaggtgctgtccccagcccaggtgggcagcatgcatgagcacggccctgcctcctatgctccctgccacacaggagtatggggggacagaagccagcctttgtcctccatgtaacggaagcgggtgggcggagccgtggttgcctcccatcttcatgagtaaactaaccttgacctcttcggtagtagggagcagtggaatgggggcctatctcccctgtatcgtaccaagaagccatgtacatgggtgtttccctcttttataccttgttgcttagaggatatttttattttgttgcttattaagttattagctaatcatattcattttaaaaatccagagacaggtacggtggcgtgcgcctctagtcccagctacttagggggctgaggcaggaggattccttgagtctgggactttgaggtcagcttgggcaacctagcaaaaccccttctcttaaaaaaaaaaaaaatccaatccacaaaaatttctgctgttctcagaaaaacatagtcatgcctaaaattctttctaaaatgctta

SEQ ID NO: 77605 - DNA, 1055 bp, Homo sapiens
ggtggtggtggtggcggtggtggcggtggcggtggtggtgttggtggcggtggtggtgttggtggcggtggtggtgatggtggtggtggtggtggtggtggcagtggcggtggtggtggcggtggcggtggttgtggtggtggggtgtgtatgtgcacgtgtgctcacatgtgcaatgtgtacgtagcccacgtgtgcactagtttcctgctgaataatactttggatggatgggagatctttttaaattgagataaaaaatatcaatgtatgtgttttaaaataataatttaaatgcctgaccgacgggatgattcacagtaagtcttccaggagacagaacacatcactccttagaactccaaaattggcctcccaggcaagatctaaaacttcaccaaatcatttctcccaggcagacgcgtgccatgcctaccagatcattcaccgcaatgggattcctgacgaacagatcgttgtgatgatgtacgatgacattgcttactctgaagagtaagtggggaacacttggaacttggtggggaaggacttcagggtatttaaaaaaaggtcacatagactcacaggaatcctagtggcctaatgttaaaatatataagagactcccagacagaagatcacagggatacctcatgttgagcttttttttttttattattatttatttgagacagtcttgctctgttgcccaggctggagtgcagtggtgcgatctcggctcactgcaacctccacttcctgggttcaagtgatcctcccacctcagcctcccaagaagctgggactgcaggtgtgcactgccatgcccagctaatttttgtatttttagtagagacaggatttcaccatgttggccaggctggtcttgaactcctgacctcaagtgatccggctgccttggcctcccaaaatgctgggattacagatgtgagccaccatgtctggccctcatgttgagcttcgaccataacttgggtgtgccctgggaatggcaaagacataggaagtgggtgctggtcgctgctttgaaaggg

SEQ ID NO: 77606 - DNA, 1396 bp, Homo sapiens
ttcatttgattattgatatttgtttatataaccttataaagtatcaagtcttttacccatatactgattgttttagtcagttttattatttagatatatagttcattttcatcacataatttttagagtaatttaaaagtatacttgcattatatttagtaacaaaaacaagattaatctgaattcatgtgtctctatctctttgggtaagacatgttagattccagtttgattaaaaaaaaaaaacaaaaaaccttgtagtgacctgttattactcttcttgccttgaaacctgcagctactctattgtgccttcccaatttttcagtatttgagacttctcctggttttttttcccaaaagcattttggagacaaaaggaaatccaaacccattttacctgaacccaaccactcacatgatctctgatgttctccccagaatggtgttgtactgtctgttgtcattcattcagtgtatccagacttgagtatccttagaggtccatatgccccatttatgagaatgaaatttaatcagagggaagactattgaaaatttgtttatttatgtattttttttgagatggagtctcgctctgttgcccaggctggagtgcagtggtgcaatcttggctcactgcaacacctttggcctcccaggctcaagtgattctcctgcctcagcctcctgagtagctggcactacaggtgtgtgccaccacacctggctaatttttgtatttttggtagagatggggtttcaccgtgttggtcaggctggtctcaaactcctgacctcaagtgatctccctgcctcggcctcccaaaatgctgggattacaggcatgagccaccgcgcctagctgagaatttactttttatggtgttttagctgtagcagtcaacttgagcatcctaccaaagcaagttgttaatgcatatgtgatgaacacgccaatgtaacaaaaacgtattcttttttttacagaagctgccagtaactcagattctagccatgaaggtcaagaggaatcttcaaaggaaaatgtgtcatcaaatgctgcctgccctgaccacaccccaacacctaatgatgatggcaaatcacatgaactgtctaaccttcgactggagaatcagctgctgaggaatgaagttcagtctttaaatcaagaaatggcctcgttactccaaagatccaaagagactcaagaaggtagaggcttaaattgttcaggattaggaatttaacttttaaaaataaacttaaggctggacgcagtggctcgtgcctgtaatcccagcactttgggaggccgaggcgggcggattgcctgaggtcaggagttcaagaccagtctggccaacatggtgaaaccctgtgtctactaaaa

SEQ ID NO: 77607 - DNA, 1050 bp, Homo sapiens
gcactactttgctctttttgcattgatttcctaggtcaaaagaataacatctttttgcaacagtaattgaaagcaatagattcttttctgtgtttaggttttgttttgttcttactaggatgtacctttgatttggatttgcattcctttccctgtcactagcagaactttacaaaatatactctgctatctattaatactagtttcggctcccagatgctttatcatatagaaacagcattgtagaagagcagctagcttcacgcccctttctaatcaattaactataatctagctgtgaatattgcccttgaaaagtggatgaccctttggggcaaagaaaattgaagacgtgtaagttcccaattttgtcaataaggaaagtactaaaggcactcaaagtagaaactgtacgtgctctgagaaaaatgtgtttggttttgcttgtatagagaaatttaaattttttaatagaattaaacaaagcaagagcaagagttgaaaagtggaatgctgaccattcaaagagtgatcgaatgactcgaggactccgagcccaagtagatgacctgactgaagctgtggctgcaaaggattcccagctggctgtactgaaagtgagactccaggaagctgaccagctactgagtactcgcacagaagcattagaagccttacagagtgaaaaatcacggtaggtgattctatgaataatgaaaaaaatgagcaagtaatggtaaacattgtagtgtatccacttatgaaacttagctttcttggaaatttacaagagggaatatttcttttggtagtgttagaaatgtgtatgattaaaatggattcattggctgggcgtggtggctcaagcctgtaatcctagcactttgggaagccgaggcaggtggatcacctgaggttgggagttcgagaccagcctgaccaacatggagaaaccccgtctctactaaaaatacagaaaaaaaattagccgggggtggtggcacatgcctgtaatcccagctactcaggaggcgaggcagcagaatcact

SEQ ID NO: 77608 - DNA, 1917 bp, Homo sapiens
catctcatgtgtaagccctttctccatagatctatgcccttccttcctgtgtgtgcctctctgctgctgctgccttctggctcagcttactcaagagcacatggttatttagtggaaaaatgaagactagatctcggactcctgcctaagagaaaaacagtctcttttagctttgtgaccactttgcactatttccctatcttcctttctttcagtgtcatgcttaccagaattgtgtacgtgctgtcttcatttctgtagaacttgttaactcttatctccttcttttcctactacatgtctgaaatttcttctcaaaaatatttgatgacctaaataaatattctctgtccttttcttagtctccataccttgtattttggtagaacatttggctctgttaaccctcccacttccttggaactcctgccttctatgctattcacatctccttggctctctttttgtcctcttctactgctgtttctgtctctcttgggcgctcttcccaatctccaaagagtcagagtcctcctaagctctgtcctgaaccctctttcattgtcctttcttaccttgcactgctgtatgctgcctctgcttctaatagccgcctgcatatgacttcaagcatgtttccaagcctgacctcctgacctcagtgcccagctgcctactgtgcaggcatggagtgttcagctcccagaccaacttctccctcattcttctgttctggtcaacgttactgccatgtggcagtaaagcttgaaacctcagggtcatttttgactttaccttttttctttagtctcaaacttctaatggctatgaatacctttttttaatgctacttccatgaagtatcatattgatctcctcctcaaactcttctttctaagtacttttttgtatcaccctaatttgttaattcattgaaaagttacttattgagcacctaactactcactaggcacagaggatacaaagctcaaaagatgtgtcctcttcctttaagaaaacattcatcttagtggaaagaaacagataattgacgtaataaggttattaatgcagtacaatgggagcttgagagaagaatcccttaaaacttgcctgaggctgtcaaagatcactggactgaggagatgtggtataaagagaaacttgaaagatgaataggaagactcatgatagggaagagatttccgagagaacaacctgtgccagagcaagggggccagagagaacatggcatatttaagggactgcagctagttccatactgctggaacataacgtcttcagagatgggaggcaaaagactcataaagttcaacggcaggcagaagccatggtcaggtttgagtgtgagaactgtggcagcctgatgaaaaggttaggggagatttgggcctctgtcttgttcatcgttgtatccccagcacagtgcctggtattcggtacattgttgaaaacatggaagtgataaggggtggcatcaatggcatgtagatggtgaagaggtgatcataagaaataatgaggacctgatcaaagtttttggcagtgaggatggcaggcaggggacagctaagagatatgtgggagatagaatatatgacatgtggagatttaactggaaggatgggggaaaaaggcaaatggaatccaggatgactccaggtttttggtttaagtgtatgaatgatgtttccttgtgttaataaaaggggaaacaggaaagagaacaggttagggttaaaggagagtatgacgaattatggtaagtatgcaaaattgatgcaacattgaggtgacaatgttagaaaggtaattagaagtaagttgggagagtaggtaagtttaggcaagagcgatgtgtaacctaacggggagaaaggctgaggtctaaaaaca

SEQ ID NO: 77609 - DNA, 1050 bp, Homo sapiens
agtgcggtggcgcgatctcggctcactgcaagctccgcctcccgggttcacgccattcttctgcctcagcctccctagtagctgggactacaggcacctgccaccatgcctggctaattttttttgtatttttagtagagacggggtttcaccatattagccaggatggtctcgacctcctgacctcgtgatccgcccgcctcagcctcccaaagtgctgggattacaggcgtgagccaccgcacccagctggaaaaaaaaaatcttattcataacaagctttcaactttaccatgattgtggggctaaagtccaaggacattatacagcaaggctctgttgtgttttttatccttagggatttaagaaaatctgtggactttctttgatggagataatggaattttttttagtgggttattttctgtatagtagatgatattcaatatacaaactaatctctgctttgcttaaacatatttcttcttttataatagtctaaggaaaaattgattaacagcttgaaagaaggctctggttttgaaggcctagatagcagcactgccagtagcatggagctggaagaacttcggcatgagaaagagatgcagagggaggaaatacagaagctgatgggccagatacatcagctcagatccgaattacaggtaagattcatggtggttcagcttagtagacaccatttaccctcaggtgttaacagtttgagaggtggggaaacagcattactaaagcgataggtttctcgcttctcttcgcttcgcttcgcttctcttctcttcctcctcctcttcctcttctcttcttttggagtcaggatcttgctctgtctcccagcctggagtggtgtgatcatagctcactgcagcctcgaactcctgggctcaagcagtcttcccgcctcaggctcccaagtaggtggaactacaggcacatgccatcacgcccagctaatttttatattttgtagagacagggtatccctgtgttgtccaagctggtcccaaactcctggcctcaagtgattgt

SEQ ID NO: 77610 - DNA, 1133 bp, Homo sapiens
ttaatatatcagcatcattaatgacattgacccattttcttacccttctcaaaatttatgcaatgtataataagtgttaggtctaacaaaatgaaagaattgtaaataattacaatagctattgtttactgagcacgtatgttccagatactgcacagagcacttaacatatatccttacatttattccttaccataactctgtgagggagatgatgatattctcattttatagttgaagaaatttaggcatggagaaggaaagtaacttgctgcaagactagtaaagtggcagagccaggattagaacctagtctaactccaggacatgtttttgaccactgtgcatactgcctgcctctcaagaatttgcccgatgtagtcaaattgatgacaaagattaatctaccttctgctaacctgaaaactcaaaggtagggaaaaatagttgtcattattgctttttcctctaaatctacaaagttgtgtgagttcagaggattgcactgtgattatctgggcatcttgttagtcttagttctttcaaacagcatgtgaagttccaaggtttgtggtgatgagtatgaaacagaatgtaccaacagataaaaaagcaaaaataagatgctgattttaatcttctgttgtgccatatgaatggactcatgcttaatccatttggggaaaatatagaaacctagagccatgtttttgctactaggagatttgacaggaaatccagaaggtgagttcaaagaaatgagagtaagaaacataagaacatgtaaaaaccaataatagtaataaagtaataaagctaaaagaagaaaattatatgccaacttctggtgatatgcaagacaagttatattcttatcatatgttgattactggggaacagatgcacaccaaaactaattataacctgcaatttcaggggactaatgcagtgaagtcctttgtgctattatgtttctgattttttttgaaactgttagcttttgagtaaagatataagtctcccagtgagcctctgccgatactcgtgaaaccacatggcttatgtgctgcagcagctgtagcgccccattcattctgctgttagccatagtagacaatgaaggtgtcaggtta

SEQ ID NO: 77611 - DNA, 1059 bp, Homo sapiens
gctccctataggctgaaaccatgtctcattcacctttattcctcagtgcctcctgagcccagcacatagtaattgcatggtagacaggttgtgtggctcaacacctgtaatcccagtgctgtgggaggattgtttgaggccaggactttgcaaccagcctgtgcaataaagccatatcccatctcttaaaaaaaaaaaaaaaaacttaagccaggcctcgtggcatgtgcctgtagtcccgctactcgggaggctgatgtgggaggatccccttgagcccaggagtttgaggctgccatgaactgtgattgtgccactgcactccagcctgggtgacgtgagactctgattcttaaaaaagaaaaattgctcaataaatgttgaactgaatgttaattattgcttttacatgtaagctttttctctttaggatatggaggcacagcaagttaatgaagcagaatcagcaagagaacagttacaggatctgcatgaccaaatagctgggcagaaagcatccaaacaagaactagagacagaactggagcgactgaagcaggtcaggatttgagattgatgacttctgagactctgtcctctagcggtcatatgagcagacctcccaggaaagcagcttactgaaatttttagagtatgggcttagggttaccccacaagttcctcctgccttcccatctcatctgaaggggtggcctgcccctccacacctgtgggtatatctcatcaggtgggatgagagactgagaaaagaaataagacacagagacaaagtatagagaaagaacagtgggcccaggagaccggcgctcagcatacggaggaccttcaccggcaccggtctctgcgttccctcagtatttattgatcactgttttcattatctcagcaagaggaatgcagtaggagagcagggcgatagtggggagaaggtcagcaagaaaacatgtgagcaaaggaatctgtgtcacaaataagttcaagggaaggtactatgcctggatgtgcacgtaggccagatttatgcttctctccacccaa

SEQ ID NO: 77612 - DNA, 1080 bp, Homo sapiens
tatatattgttttatattctgccaccttactgaattattgtttttctttgtctcatgtactttgcctatttttaaaatgttcctggtttgtgtttttaatctattttatgaacattatattgatctttatcatatattttatgaatattttttccagttgtcatattaatgctatataactgagattcttgaagagattatccattcttcctcattacaagataaacattttttgtttctgattatttacactgttaataattatttattatggatctttgtttacaatacatactgaagtgccagcttttcatcagacccatctgttattcacttaattatatactcattatataatacactctgttataaactcagttatatacggagttacatgttcagcacatactgattgtctaccatgtgccaggcactgatttaggtactgaggatggaataggggacacttatttcgcttctgttttgtttgtgcctcactttgcaggagttccactatatagaagaagatctttatcgaacaaagaacacattgcaaagcagaattaaagatcgagacgaagaaattcaaaaactcaggaatcaggtatgaatcactattcacaacttgtgaaaagatgccactgataaagctacatttttttaaaaaggacacagtaagaactttccccgtgttttcacctgagttcttttgtaacagtggtgacaaaagttcttttcaacctggtatagaaaattcatctaatgccatttgagtctacatttgctctgttctatgatttgcttcttatagaagtatcttgtagccaaagtcacgaagtagatgagaattaccccgaaatttcagacctttgacatcagtgtggttgtgctgattgccaggttcataattgtgatttcattttcctaagaaaaatctaatgatacatcttcctattaatgattgatcagtcttccataaagtcaccaagatatttttttaaccgtgaaaatgtaaaatgtacagaaaataatgacactcatgtgcctaccacccagacttaccaaagcctttatcattag

SEQ ID NO: 77613 - DNA, 1037 bp, Homo sapiens
gggattgtgaaggtggactgagaatttattttaaaggtaagctgacagaatatgttggcagatgagatacggagtttgagagaaagaagtcaagagttttggcctgagcagatggaaggattggaattgtgatgtcctgagacagggaaatggcagctgaggcaggttgacagcgaggacaagaactctgaattgtagtgttaggcaggctttggggtgcccgttagatatctggatggaagcgaataggcagttggatgagtctggcaggggatgaagcctctgggctggagtacacatttgggagtcctctgcttcatagaaagaccacccggcctcactcctcctcacataggaacaaagggcccattaatattgactcttgtcaacgcttagtatttgtaaatttcttaatttttgctaaaatcattttcttatttaaaacttttttcttgttgtggatatggatgtttaaatatttatgtcatcaaatttacctgtcctttctttatagtttcatctactttggggtgatgcttagaaagttgcccttgaaaattccttccacatgtaatacagtgtatttccaattataattgtcttagttaatttttatgtcagtacactaatttattttcttatttaaacaggcactcgtctgcgaaatgttcctgttctttttaatgacacagaaactaatctggcaggaatgtacggaaaagttcgcaaagctgctagttcaattgatcagtttaggtaagcaatgccagtagggatgagtgatggaccatcagctgtttttacgtttttcagggtttcaatcacagtgactcccatcaggcagagtctatatttaaagtgacttactcctttcaagatattttatacttatatacacttttatttatttcacagttatattacactttcatgaagtgacttctttcatgatatttgaaatatcatgtcagaaattatgtcaagaggtctgccaatgcctacattttattgaagatgattaaccctgactgtatctc

SEQ ID NO: 77614 - DNA, 1020 bp, Homo sapiens
ctctgactgtccccacacctgtgccttattcctgatgttggcccctcagttagcccagctcatttcttccccaacaatgggctttcctgggcagctgtgggccagggagcatgcccagccctggtctcaggcaacgtgggttccagtccccttctggctatttcctagctccatgggcaacttgggctctccaagagttgggtgcttgtctagaaaatagggttgctgtgtggtaaatgctaagacagaggcacacagaagatgttatgggagcccaagagggagtggacggatagacggatggacagaaatacatccaggaatctgttaatggaaaatagtcatatatacatatattggatactgcttatacgggatacacacgtgcatgtgaatagagatgtttcaggacacattctcctataatagtctctgttgacagtctatttaattatttaaatgtaatcagttagtcattcaatatttaattttaaagttatcaattgtaataaaatatttaatgcttagttaaaaacaaaacaaaacactagtccaaggtcactgatgatgacataactatccaggtaataatagtcccagctgtgcccagcactccctgccccctccaacaacagtaggaggtgggtgcttgctgcccaggctggctcatgagtgggaggaagaacagtgtgttagcttggaaagggccacaggaatcctactgacgtggctgtgtttacgtgcctcctccccaaagccctctctgttctcacacatggcctggtctgtcccaaaggcctcagagtggggcccatcctgaagccagagcagccttcgtacccccaccccaccccagacacaagcccagccctgaaaaacactctcgcttcgttgggaagcagatgctggattcatgctgtaatgccctgttctcatggagagacacaccaccaccagtggtcctgccctggtggaaacggccgcttcccacaggaagtcagccggggcaggtgcagggcc

SEQ ID NO: 77615 - DNA, 1052 bp, Homo sapiens
agagcccgtgtccccacctggcgctgcctctgcatggcccagctcaggtgtggctggggacggggagaggaaggaacctggaggccctcagcaagtgtgctttaatccctgcacacactctttgaggcaggtcagcattcccgttttacagatgaggaaactgaggctcagagctaacaaagtcacttgctcaagatcccacagccaggaagtggcccagaaaggaggtccccaggaggactgaacctccctttgtcccttcgcccaaatccagtgcatctcactccactcttaagttgagaggcgaaaaaattcagaggaaagagcccagaacagatttatttttctttagataaagttcatacagaatatgttacagtcaggagttctcagctttcaccaaaaggtcagaagttattgcagttgtgcccagtggataggatggaggaagggaaacttctagaaagctgcctgtgttcagagaaggaatcgtcaatgtttaaagttgtggggctgccctgcaaaggatgttccagggcaggtaggagtcaggagtaggagacaaggcgcgtagggggcgatagggtggcctgggcttgggcaggctggaggctgcctccctaccggaagcagcatccgggccatctggccaggacctgccaaggggacagcagagccagggccacagggtgccctggggccagccctgccagccggtgtctcagccccgccgtagtgcctgcagctggtgggccactttctccagctctgcttcaatggccgacaggctctccagctcctggtcctaggagagacattggggttcactcgggccagcctggccagtggcatggaaggcacagtaagccagaaaggcgctgggttagctgtgtggcctcggacaggtggctttgtctctctgtaccctcatccatcatggagacagtgataatgagcttactgtactgctctcgggatcattatgcacaagaaggtggctgatgccgggggccctgtccccacactgctcttggtggcctcttatccaggcc

SEQ ID NO: 77616 - DNA, 1024 bp, Homo sapiens
aagagatcgacaccatcctggccaacatggtgaaaccccatctctactaaaaatacaaaaattagctggacatggtggtgggcgcctgtagtcccagctacttgggaggctgaggcaggagaattgcttgaactcgggaggcgtaggttgcagtgagccaagatcgcaccactgcactccagcctggcaacagagcaagactcctcaaaaaacaaacaaacaaacaaacaaactctgatcattcacccggtgggatccccggcagctccttctccttcccgagctgtggctcatgggccattggattcagagaccttgagctgggtgctggctgccctaaaggagcacgacccctccagcctggtgaccgggaggcagagaagtgcagctgtccttgacaaaggcccagcctctgctgcctcaggccagcctggccacaccccgatgccacagtcatctgccccgcccaggcataagcctgactcaggtgatacaggcgaggcttctcccatgggtcctccccttgtgagaaagggtctgtgctgtgtaccttctctctgcacagccattgtcagtgtggtttggagtgagtgagcctcccgcactgctcaggggagagctggtgagcatgactccatggcctcctgctggttggggtcttcttctgattctcacccgcaggagcacccagacccccccttttcagaaatgattacattttcccttcaagagtcatctgtgacctggtggtgtggagggactgtcccctcctgcagcctggccgacccccttcctccagggctgtgtggaatcacctctcagaagctcactctgaaaagccactcacagggatttcaccaggatgttgctgttcctgccgacacctgggctttgtgacaaatgctgtttgcttcaagctgttcacaagcaacttcaccagaatcccaagctggttcgtacttaatttgtgtacatacatatgcataatatacatgaccatgtatgagatacagacaccatggct

SEQ ID NO: 77617 - DNA, 1049 bp, Homo sapiens
caggcctggtccacctctcattgcaagccccaagcactgagccagcaggtgccagggagccacccgccccccatcgcttctgcacacctcagactcaccccatcaccttggcagcaaagcactggctctgccgtctgacccctgatccaggcagccccctctgcagagaaaagggttggggagaagcctctgcagtcctggaagatgtggggtgctgggtgagaggcatcagcccccacaagtatgtttttgtgtcttaagatagcagtttactttgaaaaagtgaaaaaggcttccgggctgtcctctgcccagtgagatggaggacgctagagaaagtgctgagtgtcccgagagaggcccccgagccagtgcatggaggtccttcggcctggctcagctgggctgcaggatgcccactttgaggagggaggcacagggcttgggcgaggggcagaggccatcagaactgcccggcttttttggaaactgaggacccaacaactaaccacgtttacacgacttgagttttgaaccccgattaatgtctgtacgtcacctttcctagttctgaccctgagccctggggaacaggaaagcgtggctggcctcttgcactgctttgtctccaaaataaactactgaaatcaaaccgcatttcacacgtgtttacacatgttgctcaagtttgttatgtcatactcccagtccttaaaagacgtttaataaaacagctttaccttttaaaaataaaatttcaatcccagtctgcctcaggtacgggtgggggtgtgcagcgtgactcctggctgtgttcctgtaccgtttgtggcctccggggtcttgcgcgtccagggcccagataccgagtaactgccatgtggtgtcgtggtggcgtccataggcctccgtggtggggcgggggcggggctgtgggtgtgcagggcagctgcattttccaagagtggagatggaggatggagatttgcttcgtaaaggcctgggagctacatgggaggtagggaggggccagccacacccagggctgg

SEQ ID NO: 77618 - DNA, 2871 bp, Homo sapiens
gagaagaaaaccctgggcccaccggcactcactccccatttcccccacctcatgttattggcagccgctgagctcgttgctgtctctgtggcgttacctgtcctagatattccgtagaaatggaatcacacaatatatgagcttttgtgtctgggttcctgcactcagcatgatgtattcagggttcctccgctttgtggcatatgtcagaagttcattcctttttatggctgtacaatattccgtcgtatggatagaccagtttttgtagctgttcatctgtggatgcacgctggggtatgaataacaccacggtgagcgtgggtggacagcatccgtttgagtacacgttctcagctctggggtgtgtaccccggagcagaactgccaggtcagatggttattccatctccagcttttgaacccagcttcacttttgtctttcatggatcagccactcccttcccctttggcccctaagcccacaacccccaaaacttcactatttattgagcacctagtgtgagccctcccttggctgatttagaggagacgggatgcagttcctgccctagaattcagatgaatctcctcccagccgggcacatgctgtccacaccttatcaacataagtctgagatggaggcctgttgcttccttttacagaagagcaaacctgagacagagaggccaagtactgtttccgaagtccacagagctaggagttcactgtcaggtttggaacccacgtctctctgactccagaatccttcccagtgcagtgccccacttccttggaggccttggctgggggcaggctgagcccatgacagtgtgtgcctgtcccaggccagctgcgacaggcacaggacttgagtggcagaggggagtgccgggctgggagggagaacagagcagggtggcctgaccagcacatggaaaccttgaggaaagctgagcttggaccccaggaggcaggcaggagcagcagagcagcctctctggggagcccgcattgtttagggtgtgagttcatttggaaacagcattttttgggaaggaagactggcctgctgggccacagggccctcaccctcacctccttgggggtctctgtgatggcaggcaagtgggggtctgatcagaactcctcacttgtgcccggctctgcgccccagctgctcctagccatgtcccgcagctgctggcctcagcacctttgcctcccctgtgtcctccctggggccgctctccttctcccacccctcccaggggcccacatcctcctgcctccaagttccggcttcggtgctctgcaccatgtcttcccgggtccctgacacactctccatctccttcctccctgttaaaaggctttggttttagaggctaaaaaatatgggtccaaattctgccctgtgcttttgagctgtgtgactttagaccagccccaaccctctctgagctccggtttccctgtgtgtaatgtgcagtgctggcactggccttccaggctgtgatgagcccacaggaggtaatgagcctcacacacctcgtgcctggcggccctcagagggcaggacctggccagtggccgccccgtgctcaccacagtaggtctgtctggcttcctggcctgaagcatgccagggcctcgtggcagctggtgtggggggtctgtctgtgtggtgtggcttcgcagctcctcggcccatggcctgacttccttgtgtatgttggcagctggacaagatcgagggcgtgttcgagcggccgagcgacgaggtcatccgggagctctcccgggccctgcggcaggcactgggcgtgtcactcttcggcatcgacatcatcatcaacaaccagacagggcagcacgccgtcattgacatcaatgccttcccaggtgagtggcggccaggccacctccactgaccggcctccagagactgtcctcaggtgaccaggcaggtgaggcggggtgactgaggccagaaagccagctttctccctcaccacgaggtccggggaggtgcagccccgagaagcctcagcctcacctgcgcgatgggcttacggggtgtgcgaggagggagggagagctgcacgtccacctggggagcgccaggcacagtggccacagcacgcatgtccctcacctcctctctccacctgcgtcattggtggatcagcccctcccccaggccctcctcgatttaaggagcaggaaggaccttgaagggattacagccccctgcagtttacatgttgggaaactgaggccctagagaggaggaagctgttcaggccccacagcacattggtggcaggccagagactcccaggctcacgttgcctccaccaccctgaactgcagcgccgggcagaggcctggggaggagccctgggctatggagtctgttccctgctgccagctgggccctaggaacccactggcattgagccaggctctgccatgtgcccctcagctctcagtgaggggccctatggggaccgcaggagcagagccccagcacagggcatgaggaacgatggtgtgacatcacagctcgcggtcaccaggctgcgtgcctcgccctggggacaccaaggctcagtggcttgtttacctcccgcagcagctcagagacagagccgcgcttgatgccttggtgcctgccattccccagatgggggtcccccgttcctttctccatcctgacccttgtaaagcatctgctgtggaggtgaagccagccttgctagctgctgaggtgcaaaaacgttcaggaaatgcctcctgccttcagagactgtgcctggcaggtggggactcggggttgtttatcgtggaggtgaggcaggaccttg

SEQ ID NO: 77619 - DNA, 1181 bp, Homo sapiens
ttaagagcacagactctgacgggactgcctggggtccggcccaagctaaggcgagtcgcgtcgcctctctgagccttggtttcttcttcctgccccagaaggattccggagtccagggagttcctgggtgagaagcacccaccgcagttgccaggtgtgcagtatgggcacggtctcggcagccgggtgccgaggcccactggggacccatgaacgccttcccagttcctctgtcacctccttgctttccagaacgtcatcagatcacttgctttgagggccccaggcatcttgtcctaggatggctatttggttttggataaccagacaacttcggaaggatttctgagattctgcaaccaggccgagagcacttttgtaaatggcgtgccatggggcgtgtggcagtgcagcagccaagctcccttgctgctgggcctgtgctgtcagcctgaggcagcagctcctcccgtcgtcggcaccacaatctcacagcgagatgtttttattaccccatttactggggcaagaaaacaaggcccagaagggttctgttatggcttagggtacacagtggagagtgggcagctccaaggtatccaccagggtctctctgactcagtgagggccttgggctgcaggatgagtggctgagctgccccactaggcttagcctctggcccccactggcaagagtgacccaggaggctcagaaaagctaagtggctgggcgcggtggctcatacctttaatcccaacactttgggaggccaaggcgggcagatcgcttgagcccaggagtttgagaccagcctgggaaacgtagtgagatctttaatccctaccaaaacaaaatacaaaaattagcagggcgtagtgttgcttgcctgtagttgcggctactcaggaggctgaggtggtaggttcatttgagcccggaaggtcgaggctgcggtgagttgtgatctcgccattgcactgtagcctgggcaacagagcaaggccctgtctcaaaagaaaaaaaaaaaaagaaagaaaagtgctaagggatgagtgtctcttacagccaggccactcctgccccctagaaagtatttcttccagatacgacaccaaggccttgaggctgtgagcaggggggccctgtgtgtcctgcaaagccggggtgggagatgcgctgg

SEQ ID NO: 77620 - DNA, 1051 bp, Homo sapiens
tgcagtgcgggtcgcaatcaggtctcatggcatcagagaggctcagtgatctttgcacgttcacaaggctgttcacacggtgcaaggctggggtttgaccccagatctgtctgactccaaagttggatcttccaggaatttaggacttctgacctcaccagtgattcctgagcacctgaccccaaagaatttaggaaaggctaccctctgctgtttgcccgaagtccagagagccagcggctacttccctaaactcaagagccctctgccagggagcctgctgttctgaggatgcatgtgtgctgctcttctggggggctttgctggtctcttcctccctgtcctgggctggcctctccaacgaaccagcctccactccagtggcagtgctcgtgtccctcggggggctgccccagaacccagatggcctgtctgtctgtctgtcttttgtgtcagggtcctctgaggagccagcagtgtgctgaggattagacagagcacaggcgtgggcaggacctggagggaacatcgccatccctcaggatgttgacacatgtcccctgggaacatatcaggctttgggaacagatttcaacagagcctcagtgcctggctgagaatattatgagatgttctgtgcaagagacggctttcttctaagcttcagaatcctggggcttcttccgtgcatggctttgctctgggggcctcggcagcccatgcaatggaggggatttggcatttgcagactgagtgtcctctcaggggcaaggccagcagccgtgatggcagaaggacccatccagaagtcactgtcttggattatcacttgttgacctcagccttaatctcctcatctgtaaaacgggaaggggtcagcctagagacactgcagggcccttcccttcacctctgaggtctgcagtcacctcctccttccctcagcacatggctgctagtcaggaatctgccaggactgacgatttccaaaaatagaaaagagaaatgcggtcagcaccaccttttccactgggacatcagcccctcctgg

SEQ ID NO: 77621 - DNA, 1754 bp, Homo sapiens
tggcatccatgcagaggctttggctggagctgaagtcaggttgtggcttgtgccatccaccaggaacattttgtgttctctgcctgtggttcgcattcacagagagactgtttccctccctccaccctgtgccagggtagagattagcgggttcctttgctctccctttctatagagtgggtttatttcttgctcgtctttaccctgaggacgcagcgcaggctcccagctttatgcaggttccctccattattctctccagcttgagccttgtttctcttaggcatgcatgagtggtacctctcaccatgtagagcgggaggcagcaaacttttttttgcaaaaggccaaattataaacatttccagctccatcccaattatttaatgctgccgttgtagtgcaaaagcagctgtagatatgtaaatgagtggcacggctgtgttcaaatgaaactttatttacaagtgcaggtggccgggcttacagcctatagtctgctgagctcctctccagagcctcttaatagtcagtgatacagcatttatcaaacctaccatgtgcccagccctgcgtgagctgctggggatccagtcagggactaggcaggcacccagcttcctgccctcatgagcttgtattctggtgggagaaactgcacacaaggagagaaataagaaaagggtcaactgtggcctgagataaggggttctgaggggaagagaatatgtcctgggataccactgggtgaggggagccacttggaaagggcagctcaggatttccctctgcagagatgatactcatggcaactggaagatgacttgggtcaccatctgtagcattaggacacattctccccatccccttcgcctcccaagagagagagaggagatgaaggaaataaggctaaaagcagtgtggcccagctcgtggctgtacggctgagttgctgggatgtttgggggctaatcttatcatttattcttcttttaaacctattttttaaatccataagttgagaagaaaacacacacattcttcctttcattgccctccctccctgtagaacgttggtggtagttctccactggtgctattgggctagtccaggaacagactgcatggggcacccaaaatccagggtgctgtcgtgagtgagggcttgctgatacatgctgggagcaacgccctggtctggtgtgttagaggaaccgactctcttggagctggccaccaggtttctttccctgatgccttctcacttgcctcagctttccatcatctcttgggtgactggcagccacaggaggctgctcctactccctccgacccctgttcagaccgcacatagagaggaactgagcccagaccatctctcactgccctgccaaaagggtcttctggccagagctcccaggtcagaattagccagaagggccaggtgcggtggctcatgcctatatccccagcactttgggaggctgaggcgggcagatcacctgaggtcaggagttcaagaccagcctgaccaacatggcaaaaccccgtctctactgaaaatacaaaaaattagccaggcgtggtggcaggtgcctgtaatcccacctactcaggaggctgaggcaggagaatcacttgaacataggaggcggaggttgcagtgagccgagatcgggccacagcactccagcctgggcaacagagtgagactccatctcaaaaaaataaaaagaaaaacagaattagccagg

SEQ ID NO: 77622 - DNA, 1005 bp, Homo sapiens
tggtgtgccgcccggcatggaggggctgcagtgctgcggttgccctctcagcccttcttcccctagatgcctcttctctttccatggacacatgcagagcgtggatactttggaaacgtgcaggtgttcattttcctccgagggcaggtggccttcctagctgggcgtgtggctcccagactcaaggctgtattttcagggtttgggacatcatggtcccagcccctgcccactgggtgggagccaaatgctggaagcatatttttatatgtggctatataccaccaagagatattcctccaagttatgggctggaagaggctgacattttttaaaatgctgtttattccctgatttaagaaaataataatgctttaagtctatggaaaatatattaaattaagaggagttatattttatatcaactcctttctgtttttacccaggtcactccatctctaaaagaaatttactgtcagatctcctttcttatccactgtggttgggtttttctgttttctcctttttccttctggttgcaaaatgctgggccagtttccgtctcgacgctgggaaccattaacagcagagtgtgggctcctatcctgtatctgtgaggacgaggactccttgcctgtgtgtcttcttgtgtggctatttctaggttgccagtttgccataaaatgcataccaggagaccagacgtggtggctcatgcctgtagtcccagttctttgaagagaccaaggtgggaagattgcttgaggccaggaatttgagaccagcctgggcaacatagtgaaactccatccctaccaaaaaaaaaaaaaaattaaaaaattacctgggcatggtggtgtgcacctgcagtcccagctactaaggaggctgaggcaggaggatcgcttgggcccaggagtttaaggttgcagtgagctgtggtcatgccactgcattccagcctgggtgacagtaagaccttgcctcttaaaaaaaaaaaaaaaa

SEQ ID NO: 77623 - DNA, 2079 bp, Homo sapiens
gttttaggaagttggactcactcttagaatccactgggtgggcctggagaggggcccaggaatgccaagctgtgaagggcgaggaggaattggcagggggaccaggcgcggcctgggctggagcatgcagcagagatgcagtgagcgtggtggggaggccacctctggagctccacacaatgccctcaattatgttaagtagtctgcaggtgaggggtcaggcagtgtccatgtggaaacagttgtgtcaccaccagctagttctttaatctctctgaccccagtttcctcctcatgggattattttgcaaactgtggaggtgatgccggcaaagccctcggtacagcgccagacgcatgctaagagctatattgtcactgcgattattattaagccagtgtatcacatggtgggaaagtctttattgaaccagaaaaaatggtcatggcttatgaagttaggattcaggttacaaaatttgtacagctctctgcgtgtaaatgtacgcgtgggtaaaagtccacagtggtggggtagtagttgtaatgtcttgtcaatatgtacattttttacttttctgtactcttcggattttacacagtgatcatacacgagttttgtaattacagaaatgttattagacaatgtaacggcagggctgtggttattgttcacacacacgagcacatgggactgcagaggttggggacggtcagatccaggagcgtgggggcactgaaggcccctggggtggggcgggctgtcacaggacgtgcacctggggcggctgcccaggagctgtgctgaccaggcctcccttctgccctagacgacaggatctgctcgccacccttcatggagctcacgagcctgtgcggggatgacaccatgcggctgctggagaagaacggcttgactttcccattcagtgcgtaccatcccagctccacctgagggcaggcgctgtagaccgcaggccagcataggggaggggctgggtttatagtgccctctggatttaagctcacccgaggatggatgagcacatggccctgggtcccacctccacccacaccatagaaacgggtcctggtaggggacacaggtcaacgtgctctcctgcctggcctgggggtgtctacccacacgtcaccctcagtgcagataccaggtgtccagagtctgtgtctcagctagagttcctttctagacgtgccaagtacctgccttgtgggtgaacggcctcactaatttctctctgcttttctctccccaacccatagtttgcaaaaccagagtggctcatggcaccaactctcacgaggtgagtggaagaagatctgactgttgtccctgacccccatcctttcagctcatcgtgtctcactgctaccctgccggattcctcactgccactgctcctgccctgctgttagtcctggctccttggtagatagcctccttcccttccctggactccagaggaatcgagcgggagtgctgtggcttcatgcactgtctgcaacctcacctcaatgcctgtcctgtccctaaggcaggaggatgtgctggggacccacctgtcctctgtggagcctgtcgtagctgtggcagccataacaaaccccaggcactgggtggcttcgccacatttattttctcacagccccggaggctaaaagtcccaggtcaaggtgccagcagggtcagtttctggtgagggctctcttcctaccttgcaaatggccaccttctcactgtgtcctcacacggcctcttgtgtgtgtgaatggggaggggcagaaagcaagagcaagctctctgatttcttctgataggggcactaatcccatcttgagggccctgccctcaagacctcccaaaggccccacctccagataccaccacagtggggcatgggcttcagcgtaggaattctggggcacacgttcagtccataggggagcttgtgcgagtcatgcctcagtccggcccgccctgcagggctggctatcctttgggccatcagtgtcatctcttcgagggcctgttttgtggcaggcaccgggctgggccca

SEQ ID NO: 77624 - DNA, 1102 bp, Homo sapiens
tatcttgttcctggtcttaggggaagtgtctagtctttcactggggagtctgggtttttctagaaggttgaagaagctcccttattttcctagtttgtggagtgttcttgccatgaaagggttttagattttttcaaatgctttttctgcatccattgagatgatcatgtggtttttgtcctctattgatatggtgtattgccttggttgattctgtgtgttgacactgctattgttatgaggtttgccacagagcagagtagcatgctgtcaggaaccccctgagccagggagctccatgggcactttttctgcgagggaggctgtagtcaacagcaggggcctgggagtcagatggtctgggtatgacctcctggctgtaccactggctcaccatggaactctatgcagggaaatgccacctctgtgccctagtttcctcatctgtaaaattctcaggggacaggagtgcttccttgtggggttcttatgagggtaaatgagttactgtgtaactacgttgaacagtttctggcatggaacacatgcagtgttttgagacattggctactggccactagtgacattatgtaaaagcttggatgggccagggtggggagggacagttgaggagggcattgaaatctgaaagccaagctgattcacctgctctaaaaactccggggggccacagggagtctggaagctcttccaggaggtggcctgtttgaccccagcagcctccaaatcttcctgtgggaggaggggccaagggtggagcccaggctggtgagcgcccgtccgaagcctgcctatggcagaaccctccagtttaaattcaggcctgagcaccatatcctttgggactgggttgcaggggcggtgtgtttgcagcgaggaggcttttgctcagactgcttcctcccttgacagccatggagggcctgccagccctcacagcattcccgccctgcctggggccttgtttggaaaatggctttcagctgagcaccagctcccctccctccccaccctgactttcctgacttcccctctcctgtgctgccaggtgagcctggctccttgtcctggctctgccgtt

SEQ ID NO: 77625 - DNA, 1059 bp, Homo sapiens
gtttattttgtggagtgtctctcaattcaggtttatctggtgttttcgtgactgggtcaaggtcatacattttcagcaggaacaccacccagcagtgccagtccctccctagtgcgtcatatcaggaggtgcatgaggacaacgatgtcttctgtctgctcagcagcagttatttggttaaagtccaccaggcttttccactctaaatttctattttttcctttgtagttggcaagaaccttctaagaggattctttgcagactgtctctcatatgtttgcccttctcttgtagcatccgtggatgggtgttgccattgttactgtggtatttaccgaacagtcatcatacagaattataagaactgtgtcccaaccaccccagttgccctagaagtgacaggatccccttgcagctttgcagacatccacagggcaccaggtggcaccttgtggagtgtcagcataatctcacgtgtgaacaaagggaaaggcaaaataaggaaaagagaaaagtgtcagatatgttggagaatcaggattacatgtttctttgctgcaggacttctcagagccttagtaatgtgttaatatgaatctttagtctgggggcagtgttgaatttcattaccgattgtaagatgcactgatacttcatattctataaaaaagaaaaaaatcctaagtaagttgtgaaatatcaattatgagacacatctcaatttcagagatggaaaatatgaaaaacatgccatagaatcagtgaagttctgcagaatttagccttttccatccagttaactatagagtcccctcctctctttgaggcttctcttgagagactgttgcactcaacacactcaggaattccctgactgggtgccttctggccgccctcacttccggccctgcacaggtctgttcttgagttccctgtattagtgtgtggggccctcattgctggtgcttctcgaatctgtttaactccagcctcacttccctgaggcagccactgttcatagtttggaacttatctttctagacccttcctattcataca

SEQ ID NO: 77626 - DNA, 1035 bp, Homo sapiens
gcaggctctttctcccatcagcagcccactctgccacccagggccagggtccagagatggaagccccaaagccaaggcatggctgtgctaccctagggtgagcgattctgggcacggctctagctggctcccaaactggctgagaaggcaccatgtatgagaaggcacctgggccgtaattgcatggcgtgggtttgtgtccctgtcttcagggacagcaggtctcagaccattgggcaacaggctggagagatccttgaaagccctgactgctttggggtgatgggtggctctcctgttcttcttctcttagaagttcccatgtgtctgctctgggggtgacagatggcctgtttgggatcccaggcctccctggggatggggggtgcataccgcagattgaatgcttctgcctgtggttttacgggaatttaattagggctcatcttagaggccatttgaaacctgggttgaaattgagtagtctggatacaaagcaaagagaaagtaacattccttagagcctggagaaataattccccaaaaagcttttgccttgggggtgggtgtttgtgattggtggggagctgctcccagaggcaggaactggctctcaaccctcggggagctgcagaggggtggggacttggagtcaaggcctcagaccctgcccattgccaccgccacccctccaaccctccgccaattgtgtggcctctctgagctgtgcgtctgtcagcgcttaggcaggtgcttagtgtgccaggcactgggttaaatactttacagacagtacctaatttaatccacttaatgaccctatgaggaaggttctgatttcatctccgatttagaggtgaggatactgaggggctttgatcttaagttacttgaggtcacagagctagtggggcagatttgggatcagaatccacacagtgtgggtctgctcttagccagtggttcccaagccctgtccctcacccctgtgtgtaccccttccacacccccagttcccctgtggctgatggagag

SEQ ID NO: 77627 - DNA, 1177 bp, Homo sapiens
tgggtgggccataaatgttgcacgctgggttttccttatcgtgcacgccgagcctgggcttgtattcttccaggagggcggtcagaggctgggacttcctggagccctttcctgacccccagtggctgtccattcaccagcatcgctgggtgggtccctgctgcatgcccccaccagctgcagaggcagagagccttcctgggaagcacaccctgggcccccctcctcaactgcctgctgttcctggaggcactcagccctttcaggcgtactgtaaatggccataattacccttgaagttccctcagataatcacagcaatccagtgacacgcttttgtgctgggagaaggagcttggtgagacttcctccggttgtcaccccccctgccccggttgtcaccccccctgccccggcagtaagactgctctgttttcagagactctggacagctgcagggaaaacagagctggtgggggacgggtgggtgcttcgggactgctaggatcctcattgatgagcagtgggagggagacgaccagagcccctgctttgcggtgggggtgggcagttgggacatggcacaaggggaggctctcccaggaatagcaggcagagcccttggataagggtctgtgctcaggtgggccgtctgtctccctgcagagcatcagccgtggagggcctctcccaccccagctctgcatccaggagacagatgaggcctgctgctgggagctcccagcatcgctgtctccgggcagcctgtgtgaggtcactgccttctcagttccacattcccagagctcattcttgtctcattcagagcctggaggggaagcagggtcatttctctgcctcggctctggcagcttcaaacccacccacttcgtatcaattagcattcaagttgctttaacagcagacctaaaatcatggtggcttaaatgcgacagaacttcctttctctctgatgtaaaagcccagaggaaggccatccagcacgggcacaggggctgggaccctggctccttctagctccttattcttctgtggtctgcccatctggtcctgggtgatggctgtatttccagccctcacatccaagatctagacattaggatggagaggaagatcaagaaaaaggaagcaaatgagaagaaggcctagttctctt

SEQ ID NO: 77628 - DNA, 4192 bp, Homo sapiens
gcgaggcctcccctaggttacgccggccaccactgaggccagaggaagtctttaaacattcagacagaaaggagcccagggccagatactctgccgcgaaatccaaggagaggctgatttcagagcagaagtgggaatatgagtctctggtttttgtgttaaaagtggcttttggcttaacaagtggtcactaggaccaaaataagttcacttaagaaaaataattccaaatggctctttctctctgtccataaggctcactaggaaggcagcactggggtgtgtttccccagcctgtgcaggcctcactgacgggctgtggagtgggtgagcagagggcaggggggctggctgggcggaggaatcacgctggcatgtctgctgcccccggctctcacaaccaagtatcacaaacagggaggcttttaacgctgcaggaatctcccagcccagggggccaacagctccagtcagggcgtcagcagtggctccctccggaggccctgagggcgaagcttccctgcccctctcccggctcccagtggtggtggtggtgggcaccttccaccctccttggcttgtaggtgtgtcactgcagttgtctgtctccacacggcctcctccctgcgtctgtgttcagatttctctcctaagaaatccagccaggggattcaggcccacccatatggtgtggtccacccatatggagtcctaactctgttccatccacaaagaccctgtttccttataaataaggccacgttcacaaatgctgaagggttaagacttgagaggacacaattcaacccgcagcagctggttgaggccttcttcaggccagctttttccctgagacccccacatcacaccagcattccagttttgtccttagaatcatggaggttgggagcaagggtgggctccttcgctatgtcagctcgggttggtctggcccacctgggtggcgtggggttctgcccattattttattgagttctgttctggacagcagtgtcttccccccatgtaagttagggttattcccctaagaagatagtaagttccttagagactggtttttgtcacggtttctcttgcatttccttcgtgcctaccccaaagctagtaggtacagaagtggagtacttgaggagtgttgggtggctggtgcccaccctgtggcgtgtttctctccaccacaccttcccgcagaccctctgatgactcctggcctcatcccactctcccgcccctgcctcagagtccttatcagtgcggggcatggggccgccactcccagaggagccagtgcctggagtggatctgcttccgggtgaggttttatctggagtcaggcggcctgccctgagcctggttgcagtttcctctctgtcttctgtgtggtgctctatttctgagtttggcctagtcaagcctctctctcagatctccaggtgactgctcgaaatgtcccagtgctggaatgcaccaccctccaccaaagctagggctggaggataggacaggaacggatggacgtgcagagggcgcgaggggtgagttgctacctggccctacccctgctctaaccagagcagcatgcttccctttcaggagtacatcgatgcccaccctgagaccatcgtcctggacccgctccctgccatcagaaccctgcttgaccgctccaagtcctatgagctcatccggaagattgaggcctacatggaaggtagggacacgtgtggcaccacatccgtggcaggcagccacctttgtggtcacaaagtggccacggcctgaggtgtggagacagaggggtcttgtctttttaagcactttggggcaggaagcatttgaattccatggtgcagtcattctggggaggtcctttcattctcctgtgaccagcagtgaggaaacaaaagcctcagggtgctcttgcggaagggggctctgagggttttgttttgctgtgttgaacccatgggtgacattgaagtgtcccggtaacacagtggctggagagcaggagtgtgtgtagacagctcagtggcaggcaagcaagtggagttacgtaactgcgcggaggacacaaacagaaactgaaggcctttaatcaaacacgtggagatgtaatgtggctgctggacctcatgggtccactctgttctggagggcaggggcctccctcttcactgcggcgcctcccctgccagctgcaggctcctgtccctgagggctcaccctgacgcctccccaccccttgggcaggcagagccagagaactcaaggccacattctcaaggtgtttatgtgagaaagactttgtggagagattcatgttaacagtaacctcctagttcactgcttagtccaagtgtgccctgctgagagctcttgtttaattttaaggaaaagtgcttggcctgggccctccggctttgtgaggatttatcctggggtcaaggaggcagcccctgctccctgccctacagaccatgattgaggcctaacctggctgccttgaaccctgacctggatggtgacttggccttgggcataatttcctgtgatggtgaccggtgggaccagtgggtaccatttggctcacagctccagaggcagaccatctgcatgggagtctgagaccaccatttattggctatgtgttgtgttcctgcctttgggttaggccttctccttgtattctcccttttggtactcttagaagtgggcatgataagccttcccattttacagatgaatcccagaggctctgagaggttagcagacatgccacgtcacgcagcattcaggtggctgggccagcatccagccaggtctgtctgactcaggctccccggcccctattcctgagcttgactttcatgtccatggccagagggccctggatctagaagaacctgaaatgggtaccactgaggaccctggcctggagagtaggtgagtcctcggttccctctctgaggaatgtgccctgcagaagagctggctgctggatttggctgtcctggaagggctcccgaggcctctttccctgaatgcctgacacaccgctgggtgcagagaatgggggtgtcatgctggtgccccatgtaggcaggctttcttagcacatgccagcagcctttatttgctaggcctggagtgattggcctctgctgtgcacttcatctccctttgcactgtcttcctggatccatccagaatcccagatgggaagaaagagctgtatgttccctcctggggtcaccttcatctcagtctgccatgggtgaaggtttggtaaaatttgggaaagggaatcagcctctttccagaaggtgtgcttgttggacactgcctgtgtgaagagcaggaggctgtattagaacatgagaaggcccagctagcagaagaaggtggcagaccagcagccacatctcatgtcccggacaagtccattcgaagagtgatgggtttgggtgggattcgaggaggtgccgctgaagggccttttggagccaaaagcacaggctctggcatgtgggttcctgtctgggctcttgttagccacgtggtctcggacaaatcagtcatttgagttctgctggtgttctggaagatatgggtgatacctggttcagccacggggtcaggggtcaggatacctgggatgatgtctgcagagcacttagcatgggaccggcccactgggtcacccgggaacagcagctgctccagctgttcccaccacgatggcaggaccccagcatcctaattgagtcttcacatccatcttagatttttaggagtagaagcccagggctggggatcaagggtgagcctgggctcagggtgggtgtgtgcacggtgtgttcaaggagcaggaacccggtgatgaggtggaccgtaggaagtcacatggtgagaggaaggcccaggaggtacctctgttgcccgctcgcctggcttggaattgggcctctcctggaggcagttaggaatcaggtcaggaattttaagcagggtgtgtcctagttcactgggagattagaaagtttaggagctacccataaggggagagctgtgggtgttccaggagagggccccgtcctcaacaggtccagggagagctgttgaccaaaccctaacgcatgcttggttctagatcagcaggaagtgtagg

SEQ ID NO: 77629 - DNA, 1051 bp, Homo sapiens
ctctgacagcattttccattagaaggagcaaatccctgtgtctcactccctgctcatttcctgcctgtgaggatcgaggaggaaagagtatctctgacgttcatctcattctgctcagattctcagtggcagcttagcaaagggccagttgtctctgttggcatcattccatgggcttggggcctctgaaaaccctgagagagcttgcgctgtaggtgggcaccgtgacgctctgccccaggtgtgttccagccctcatcctggcaggggctgaatgtttctgcctagagccaggctgcccttgttagctccaggatcccactcttggtgtcctttagctggcaggccctgcgagggaacatgtgcttacaatttgccatggagacggcgctgcccttcttcctctgagtggtgataaaatggtacggaagctcacccacccagcagattggtaattctaagagacttgtgaaaaatacacgaggccctcagtataataggtaagctggaaagcttggcacaaagtccgcttgtggatagtgaggtgactggaaaaattctttgccctctctgttcccatcccagaagagatcgtgtttaggaagaattcttctgttaatgctgatgctttcatccccagtcaaaagctagttgacgcctgcttgtcagatgttttcccctttggtttcatgtagccgctttccctcatgagtttggcttaacttcatgtcttaatgaatctgagttctctctttaaaggtcactgtcctaacgcataaacatggaatcagaatcgccctcatttattcagagctgagcggagacttttcttgggacttcgaggggaggaaggagcacatctgtgttctaagtggcctcggttgctgagggagaattgggtcatcccatccacgtgctcggctgttggcccccttttggaaggaaggcagcgaatgcgtgggtggccctcccgttacctggaatgcctctagctggtggtccatcccgttctagaatggctcccctgtgcagccttcaagtttacctttac

SEQ ID NO: 77630 - DNA, 1631 bp, Homo sapiens
ccctggctcctgcgtttgaatgtctctgggcctgggaggcatctggctccgttcaggggcctaacagctctgtttttggtttgttcgtcacatcacagaatcaaataatctagaacttaagaggcagaaaggatgttataaatgaattattctagcccacacatcttacagatgggaaactgagatacagataacttaagtgactttcagaaacacacataaagtgaatggcagttctaggacttgtaacccaagtttcttgactctgcatttgtttcaacttgcacagtgccccaggacccacgcgctcgggttaagttagccaggtgtagctgggctgcaaaagattatctgacagtgatgggcaggcagaagccttggctgactgtcaggactgttacataggttgcacgctgcccagcccagtggtaggctttgtgaatggcaccctgggtagctaggcttggtggtcctgtcccagcgtacagtggatgctgctgcaacctccttttggctcttgagagcccacctccaaggtttacctgcatgcatctccaactccaaccctatgccagcctggccacctggcacattctgttgcacctaggcctagtgtggatttcccaggactatctgtggcatgtggttttctgtaagctgtaatcaacaggcaggtgttctgggaggtgccaggaagacttcttctgggggatgttcggctggccttggttgatgacaagttaatcaacaggggttggtttcacggttgcagtggtctgccaagagggttcattacttgtccttcccagaaagcattgcttggcctggccccaccccctccccatgtgacctgacctcccagggagaggctttgctttctgcagaaccacactttctgccttcgaaagtacaactgctcttgacactgttatgtctgttagtcctccccctgcaggggccactccattcagcagctgccttgggagccctcctgtgcataagtgcagtgctggccctgacacgctcttccccctgcgccacgcggaccctcctcacagaggccctgtggactgtggccttcagttatgtcatgtatttactgtcctaaggggtgtgtgtcttcatttgctttcatctgtcttgctccagggctgggaagagatgcagagcctctggtccagctgtggctttgagagaacaaacaaccagtgaggaccatgggttgggaggaacagtggaaagggagctgcagtctcagctctgccactctcccttgcgaccttggcctcgctaccactgcctttcccctttccaaaaagatgggggctggatgaagggtccatctgggttttgctagttctgaccatctttgcctttccctctgggaaaggaaatcgcaaactggatctactattttttttcttggatgctctacctcatgcagaccccaaatggaacacacccggcctccctggactgtcaggctggtggcctcgccttggggtagtgaacatgagaaaggcttccctttttcctgaaatgccccagagcaaccctggccctagttagagttgagatgcttttcatttcgccaggccttccatgccttgggtctttgactggagggctct

SEQ ID NO: 77631 - DNA, 1514 bp, Homo sapiens
ggttgttgttggcgtctgctccagggaagcttccccagcccttcccagggctccagcgtttcccctaccccttgttgggcctgggacaccgagtttgaccagcttgcacatggactgtgagtctgatggatcctaagtgtggcttgccctgcgcaccactgctcggctctcagcagtcctgaacgagctggcacatgcatttggaacaagtttgtgaacagagtccctctgctgctcagccagccgcttcccatcttggggggcagccatcagttccagtggcctggagcctttccagggggttctgtgggactgaacagagacagtcttcctcgctgcacagcccctgtacaatggggctgtacggtatgccctggaagtgatctcatcttagtcttttgcaggcagcctcattctaactgctgcatgttaaacggcctccctgtcctttttaccaagccagctctctactggtgtatacctagggcatttctgatcatgttttagaaacatgctgtagtgaatagcctagtacatgtatttttgggtgcacaggtgaggaattctgtaggataaacacctaggaatcgggatgctgagtttgcgcattctgcattttggctgttgtccggtttctctctgcagaagcagtaccagttacactgccaccaaccaaggactggtccctttccaccaccttaggaagcgtctctaatcagtttaccttggcatggagtcacagagtgttggagggtgccaggatcctggcagtctcctcctcttgcctgttggttttgctgctgggagctccaggccctgggaagggtggtgtcatgctgcctcacttggcttgcccggaccctgaatctgggccatcttgcccctgtctggtgctgtgttctcaaacttcacttttctcttccgcactccatgtctgaccaccccagcctgagctcatgggtttaaatattggctcacaggagctgatagacctagaggcagattgcatcagagttttctttttgccagctctaccaaatcacagagatcactgtataaaagatgaaggcagcccatcagttcttcctgaacagtgaggtccagcacacatacccctaaggccagcaccacatctgacacaccaccaagaccgcatccatccccagctccatcctgtggccttgcaggctgctggactggtcactccataacccatagctgtccttgtcacttcccagctcaggaccctgttgctttagggtcaagtccaaactcctcagctggtccgtctcctgctctctaccttgtcctcacttttcatgttgagactgccgtccgccccagccctgccaggcccccagcaggcccgtgaatgtgctggactccctcaccccagacctctgcttttgctgtcccctctgcttggagtaccctttctcccctggcccatgcctgtggccctttgtggttgacatcaccaacctcagcaggctcctccccagcccccaaccctg

SEQ ID NO: 77632 - DNA, 1407 bp, Homo sapiens
gctgcagcccctctgcttgtgtgtggacggtcagggtttttcagctcaaggtctgggggcatgttgagttttagaaatatcaatgtttatcaataatacattttccccaaagttttagaaataacttttatgcacattatttctgggtttcttaacctcaacatgattgacatcttgggctggataattctgcactgctaggggctatcccaggcaatacagggtgcttagttgccttcccggctgctcattaccagatgccaacagcactccccaccctgcccctcatgacaaccaaaaatgtctccagatgttccctggtggagggagcccatgccacccctggtcgagcgtcactgcattttgtaagagatgggtccagcagctctgagagctcaggtgggccagtcaagttgtttctgatttttgtgtggacactgaggccccactgggtgcagtttctgggttttagtgtttggaatcacacaccaagaggactaacatcttgtcacttcttttcttcagtaatattagtacctgcggcagaaaggacaccctgttttctgtttcctcctggtttgtgtgagtggcatgacttcccaacgtgtttctgtgctgcctgtgcaggctgtgtgcccgtgataaagcccactgtgtctgcctttgtcttcatgtaataaatcccattgccacctcaccagccaagagcacagccggccgggtaaaccacgcgctgggcctctgctgacctcggccctctgggatggacagagtgaggcatgaggatatcctctgagcccctccctataggtccctgccccaggcctcccacgcctcctggcagccagccctggatctggccctggcccctacccgtttgtctctccactgatctgtgagatcattcatcagtaactattatgttcattcagcaagtcttagtgagaacttactgtctgccagagttctcctaaaagacattacagatgcaacaatgaataagacctggtggacgcagcccctgccctgctggagctgtatctgagtgtgagtgcatcggatgatgggaacaaaacataggtaaatagaggacaaggtaacacagccccagtgatggcgagtactaggaagaaacacaccgaggcctgggagaacagggaggtccttgttactgatcctctgaagagctgacattgagttgaggcctaaagggcaggacactcaggaggggagcaggcaagggagcagcacctgaccaggcccttcagtgaaacaggatggaggcataaggacccgcagtagctgggtgcagctggagcacggtggatagggctgtctgcagtgggctggcaggagccaggctgagcctgggcctggtggcctcctgggagcgctgggtagctcttt

SEQ ID NO: 77633 - DNA, 1051 bp, Homo sapiens
ctgattaatgacacatctctcgtcccaggccctgccaactttgcacttttccttcatgcccttcggaagttcgtaattctttatcagtggctattgtctgtcccttcactgcggcagggattgtgtctgctcccagcagctggtgttcccattgccgcctgcagtgcctaagtgtttgggtggcggcgcatgcccagtgctggtcatgcgctggggcggcctttcatggggtgccctgatggccttgcggagggaggacgtggctctgctgggctgcttggagcggggagggaggaggccaggagcgttaatgaggcagatggcgctgcctgatgggcatgtgcggcgatgtctccaggtgtcagcgaggttggagagggagcagcaaggccggagcttgagggctttttcatgccaggctgtgcagcttggactctatcctgcagggagggtggggcggggatggcggtgatatgatcagatataattggcaagagagaggccctgcttggaaggggagattgccagtgcaagatgaactctgagcagctgaggacactgtttactctttggagcccaggtgcgtccaagttgaagaaggagctcatggccccaggctcagtgttgtgcccatcctcagccccaggtgcccctgcatgtggtcctgagcatcccctccctccgctgccatgaaggctggcctctgagcagcttgagccttgcccagcctacacaggacaaagttgcactcacctcctggctcctctcagtgtgtaatcatctaaagtggatctgggaaggaagctcctgccccgaaggatgccggaagagaatgcacacttggccacactggttcttctcatgttgtccctggaaggaaaccatgtgtagccttcagtagtgcctccccgaccccaccatcctcctgaggggacaggaagtgagtagggctgggagctggtgggagggggtgatgtttggggccctccctgctagtccgccaagcgaggccaggcttcgccacagggatagacagctcccctcacccagc

SEQ ID NO: 77634 - DNA, 1216 bp, Homo sapiens
cctttggagaaaagggtgcggggctgcactttccagaggccccaggagagaggaggcaggcagggttggcacagagaatgactgagaggcactgggatgggggctggggaagaggcttccttctaccaccggtcactgggctgtcagcattgatcgtccccttccctctgccataagatgcaagttcagagccagaccacatagacccagggaggcggacacttgacctcagtcgtgccctttgttttcagatttttgttttaaattttattctctagacattaacaaggaggcatgagtgtggtttgaggactgggagggatagggatgctataggcagaggcaggggaagcagcacccagagctggggtcctcccattttgttgtgagcagggaaaccgaggcaagatgctttgccccagcagggactcagcttgaagggccttctccacagtccatactcaggtcctgggagggaggaggaagtggtttggggctgtgtgggtggagaaaaatgaatttctgagatgttcctcagggccccagagcactgcactgggctgcctctgtgaaagttccggtccccagggagggaagaaattcccagagccaggaggccgtgcctgcttctggctgccctggtgggcaggtggaggctgtgggccagaggcttactgcagaacattaaagctgcttgtcacagaaccttcatcactgccccagagttttggattttttttgtttttgtttgtttgttttttgtgtgtttttgattggcttctaaatggcttggcttggagactcaattgggatgattcagttgtttttctgctccaaggttcatgtggagccagcagcctgttgcccctgaggctctgcctgaggtttggttctcagtgtgcagaaccaggcaggggcccccagggcctgcccacgtgggcaagtggggccggcatgccgagagggtccctgcctcaggctcggggacactaggggcctcctggcctggtgagtggctttcccaggggggcaacacgagccttctcctcgctgtggcgcccagagccacctgacaggtgtgggtgcagggtgggaagggaggggcccaccgtcctcttctgctgccccttctagccctggaattgcccctgaaggggtgctgtgattgtgatccatgggccatgtggggctgcctcgggggaccttcctggggttc

SEQ ID NO: 77635 - DNA, 1655 bp, Homo sapiens
tgtgcaaccctttcccctggctcaggtaggcacaagggatggaacccttctgctgcacttggtaaaggggacccccgagggcctttgaactgagtcctgccttggtggagaaccctgcctctgcccattactttgacctgggtactcacctttgagcatggcctgaggtatcttgctgagtcccttggctgcttccctctccccacaccacttccccagcggcctcccaggtcctgatcgcacagtgacctgcccactgccctggggttctcatgctggctactgacttgtcctgtgttctctctgttgtggacaagaacgtgattctgtcctctagaaagcggctcagaggtcatgaaaaacaaagttgtattgtcagtgaaagtgcagtcaagatggtagctgttttcaggtgtgcctagtgggatggggatgcctgagatggggtttctagcgtgtgacaggcgcagatttggtgccctgcttttcttcaccaggacaaagggaatcttacccgcctcctagtcacccggtgctgccgtcctgccgacactgttctctccccgtgtgttcggggtcagccgccttggccccccttgcttccttggggctctcaccccgttccttggccaactccctgctgcacattcctgcttcccaccaggaagtggccccggacacagaggcagcctgctcctggcatcccctgcttgggggcagggcatgtcccacgttgtgccctccagggcgtctgccctgccagtggccccaagtccattccacttgctgaacactgtctccttgatcggactggagactgtgggaaaaacatggtcgggctcctctgtgacctcgtggagcctcagtttccttatttgtaaaatgggtgctaggaataagaaaagctcagaccatgttgggaggagtgtgctggggttcgaggggaacaagacagaggagatgtgtgccctggtgatgtgctgcttcctgagtccctgccctgtgccagggctgggctgatcagcactcacccatgtgctacatttgatccccacagccctcagtgcagactcaccagccttgttgataagcaggaagtggaggcgtggaagcatgtgcagcttgtccacagggacccagcagagccgggggtcagtcttgactttctcaggtgagccgctgctcatcctgagggcttgctcttctgttcctctctgcctccaacctacacaactgtcctggggtgtggtcccagctgatcccaagtcatacagcgactttcctctcccctgagccatttgctcctgcctcacccccgtctccttcggaaggcccctgagtgcccagttcatgtgcctgtggtgcccttggggcttattctctggaggagcacagccatgcctgggctgccacgcagacctttggggcagggatggtgcatctcttgctgagtccatctgggggacgatggccttccagatgcctgattaccgttacctcagaaagcactgcagagcagttaccgcttaccaagccctgctcgaaagcgcttcatggcggttgacccacttgctcccatgagctgtaaggttcaatgattcccgtcctgtggaggaagaagcagctgcaggacaactagaaagtggtccaggtgg

SEQ ID NO: 77636 - DNA, 1998 bp, Homo sapiens
atggccttgcttggtcattttccttcctgggccgttggtgtcctggtctttgcagcagggagcgtcttccccggcccctgggcttgccgtgaggatgagccggcgccaagtctcaggagatattgggaagtgtctttcccttccccttcctcacccaagagccccagagatgggcagcttctcagctagcctggttttggttttattttatgttgttttgtacacaggcctgtcaccatggggagggaacagcattccttagtagtttcttattgtgaggtctaaaggatattttttttttctatataggggaaatcccttaacatctttcctggcaaacagtaagaaagaggagttaaagacaccagcagacaagagctgctgcgttccgggggtgcaacggagaggagtttagtaagggaccatcacagggtgtgggcaggcccgagagccagcacaggacaaagttccccggtgctaacaagccctgagagctgtcaccacccctaggcctgaggggactaggggaccaaaaatgtacctggagccataggggaggcggtagtgttgagagaggggctgccctgctccatgggggctgtgactgctgccagaaatatggcagggggtgggggcgtgaggatgctgcaaatacattccctccctctctccttcttgcccatcttctgctgtgcctccagttggcccgacttggccagaggacaaggcagccaggtgattgtggcctgagaggacagctgcctagggcacagagcaggcgtggggagcggggttgcaggggcaggcagcggggaatggagtgagaagcgcagccttagatctgagtttgtgtccccacttcaccgccttcctgctgtgagaccctaggcaggttttaaaagtctccgtcctccacttttctcattcgtaaaatcacttctcatagtggttgttaaatacaatgaaagaaatgcacgcaagctttgagcgtggtgcccactgccagtgaccatttgtagttgtcattatgatgtctttcgtaacatttttaaaacagtcagccttgaatcctggagggaaacccacttgggggtggggatgagagcaggggtggggcttgtggccttctctggcctctgctaaggccagattgggggtcagccaggtgccgggctggcgccgctgcctccgaggcactggccttgcaggtggtggtggccgcgtgccgggagggagacatgtggcgggtcaggaagcgggggtcaggctgccctggcttttggcaggtgctcctgtcttggggtcaggtgacgctgactgttggccagaggctctggctctcttggggcctgatcttcccaacctcaggcacttgcaaaaataaacaccttccctggcatagcaggagagcagtatggaacagattgcaggcagccctacgcgccttcgcttctcccgatgagcccagatttcagtgtgaagtgcaagtggctggtcgctcaaagcggcaatttctagattcctgaggaccacagctttgctaaggctttttatagattagcagaagcagtatccacttagatctaagttctgatctggctgtgcgatgttagtcatttacataaccccttggaaccctagttttcctagggcagatggggtgtgttgagaaaagcctttctctgtaaagccatttctcagcatcacttgcctggcctgttgacactattgccctgattcctcttatgtgtcttctgcatcctgggtagcatggggcttggggaacagaagttacaaacgtggggtgtgcccttgaggagttagcaggagagaagagttgtggggtcttggagggtttgtcctgcttgtcctgtctgtattttccatgtcagccctcctcctgccccatctccagagtgctacagggaggctcgagggtcctctggtgatatgccccagggtggacaagaggatgggggcagtggactcaggtgctga

SEQ ID NO: 77637 - DNA, 1083 bp, Homo sapiens
ttgaacttttgctctgggactcataacaatcctgtgaggtgcagggaagggtgagtagcatcctcattttatgactggggaaactgaggtaccacacagctcagtgacctgctcttgttcagaagcagtggattggagatgggtttctaggcctgtctgcctggcccacccctccccagttccagatcctgggagagacagggatagtgtcagggcctagctcagcttggttaccaggctgggtacgattgggttaatcattttggaagtcaaagaggactctggggccactggggtttgcaggcctttgtgccgtctcccagccctgcccccacctctagtaagtctctgccttcgtccctgagggaaacagtggccccttgttttctctgagttctgaactccaagcgccacacagagcaggatccagcatgggccctgcgagatggcatgacttggaaacggagtgcccacagacctcaggccccggcgggcagcctttcattgagacacccttgctcctgctgggagggacaaaccagaccccgtcctctgaggagaacaagaagtccctgggaatgttcttttttctgggggcagagtgtggtcagaaaagcagaatgacaaccttgaaatgagttcctgtccccatcgcatctgggagacctgcctctgtggtgtccttccccccgggcatccccctgcacagtgtccttttctccgtggcctccccagtctcaggagctgggccctttctcctgtgggggccgcacccaagggcccatctcttttctagctagtggagggagaccgcagcctgtttgcagtgtgttcaggggacagaccccttcagggcagttgtggcatgtcaggcacctgaggaagagccactagagctgccagcagccctgctggtacccagcacagacgccacagcgagaggcggccgcacccgagagcagcccaggcctgatgtgtgtcccaagctgctgttctcacagaagggttttactggcatgaaaatgcttggaaaatacacaaaggagggtggcccgtttccagagctcagctgtttaccttcag

SEQ ID NO: 77638 - DNA, 1692 bp, Homo sapiens
gctgtgcttgtgggtgcttccctgcctctggccccctcagattgtatctcggaccacatgatagctccccccagcctcaatccctgcacatcaggaaaggacgtctagccagctgtgttgtcggcccactccccttcctgatgaaggcagaaggctcaggagcctgtgtcccggagccacagggacctgggggtgttgggggagatttgctggttatacagcctcagttcggttgttttgcctcttgacttccttgcttcatgtgtaaaatggtgacagtggcctctgcctcctaaggacatggagattatgtgctaaggagattaggtctgtcatttgctcactgcagcacctggaatataagggtcccggtagttctggtggaggtgattatcagaatcatgctggtggaaagccaaagaaggccagaaaggcctccgctgaggccagagaacatccagcctcatgtgaggaagaaagtcctatttgctgacacctgtacagcatggtcagctctagtcacagagggaggtaatcgatggctggccctggctgtgtgctcatcgcgactataggaaggatatttctttaccctcactccacaggcgaggaagcaggcttggggaggggagggatgtgcccttccccaggctgcacagctggaggctcagcccctgccctctaacccctgggcatccttctgcctggggagggagcacctctgtgcttgaggtggcttgggaagaagagcactggccagccatggaggagtgctgtgggcaagaggattccgcgagttccttcctccaggcctggcaacaggaggttcatgtgtgggatcctctccgctctccccgcaacacacacagggcggtcaggctttgttacgtggcttctgactccccaccttgtggatccagacctgccagcccttttatgctccctttttttctttttctgctagcctgtgattcgtactttccccccaggacaggactagattggtgcctggcaacagaggggaggggttagctcctatcagctctgactctggcctctcaggtgccactgtgaacaataacacagatgaagcagccccttggccaagatgcacgggatcgagggactcatctggcaggttgaggggactgctaggggtgagctttcctaggatgctggggaatagccacgtcgtgatgtggctctatcaaggctcctgccttttgctcctaagggctctgacaagttatcttccccttacaggataaatccccattcctctctcatccaaatactaataaactacaatgtgaaaaaaatcatagctaaatcctgttctcaaccttgcagttacctgtcggggcctgtttgccttaatctgcttttctccccttccctttcccttcccttccatccttcctttgtttcaacaaatgaaaaagaaaagcttggggtagggggaccagctattttatgaggacagatttggttgtgctgtattaaccaacagcctcagaatcttagctgaaaaccgtgggttattccgcactcatgccacatgtccacagggccagctgggggctctgtccatcttattcactcagagatctaaaactgagcagccccatctggaaggttgctggtcctgcaccagaggggagagagggctctggagaccttactcctgcagtt

SEQ ID NO: 77639 - DNA, 2812 bp, Homo sapiens
ctctgaggacactgactccaatcgtgcccccacctctttgtcccccgtcccctgcacccacgctggcctcctctgctcgggacccctgcacttgccttcttcttagttcagaacattcttccccaggtctctcctgggccttcttcttgcccaggccttccttagagaggccttggattcatttgccagtgctgctgtcacaaagggccacaaactgggcagcttaaatagcagaaatgcacccctcccagttccggaggtgagaagtctgagatcccaagtggggctccttccgaggcagcggggcctgttccagccatctctccctgctgggggtggattgccagccatctttggcgttcccgggaatgtagaagtaccgccctcatctctgccttcatctcctcacgatgttcctcctttgtgcgggtctgtgtctaaatttcccctttttataggagcaccagtcatcgtggactagggacctacctgctctggaatgacctcatcttaacaaaggtcatctgcaaagaccccatttcctaaccaggtcacgttctgaggtactaggggttaggacttcaacataccgttttttggggacacagtttagcctgtaccaggccttctctgacgagtgcccccctttcctatcatgccctctgcacttcattgatgttgcagccctcggtggtgcctccagtcgcttcctttgcttgtttgttgtctgtctcccacactaggctgtgagtatgagcactgaggacagggacctggcggtcatcttcacgttgcatcttcagagcttgagcaatgctaggcacaaacttactctgttcacttaattactcaatgaatgagtgcatgaatgaatgaatgaatgaatgaaagaaagaaaagaaaacaagtcctgttgtctttcccatgcatcactcacacaaactgaggctttgagaaaaccagaggagagtaaagaacaggcttttgtgtgtgattcatgaagcagtaacggtttctcttttatttacattttggataaagggcagaagcaagaagggtggctgtgactgcattcttgatgttttcagcatttgtcaagtgggacgtgtcacctcattttatttttgcacattccccagtcagctctactgagtgtaaatgcggggtgccgctctcacaccctcagttcccatgttggcagttggaagggagtgcagcctgcattgcgcgctaacttcgtgcttgccatctgggagggaagttgggatccaggtggtgcagtcctggatctgaaatcctctgtgggaagtgcagagagacagggtagctgggtttctggaagggggtagcagcctttgaattcatctggctgagagctcagatagaaatccatccctcgccacagctttgggacagtcagatgtggtgcaccgaagacaatctgctggggactgtcagtggcttcctttgttacccttgccttgtccactctcttgggcctgggagggtcagtgtctgtgactgtttgatccttactatgcttggctgtagaggaaggggcctgcaagatgctcatggcctgcttgggaggacaagagtcatgcccaggaagccgtgccagtgaccaagggtggtggctcatctcctgccttgtgtgcttgttgtcagagctgtggcatcttcagccctcaaagattgtggcctgccggcttggctaaaagcacagctgcctggagcctctgtgccttttgggcttcctggggcccatgtctcctctctgcaaggtgcaccctggggctgaagctcgggtggctcgggtgtccttgcctgctctgttgcccagagacggctttatttttcttaccctgctaggcccagggcatgtgtggcttattcctggggctgcttgggacatcgtggaattctttaacctgaagattctcacctctcccaccataccctccagagtccaacacagacacaactaagctcagggtccccaagggtccagaccccaggtggaggtgaggggcgggcagtgtgaggtgttggctctagggaagggagtggtaagaaaacatgggcctgccgcttactctcagtgaccttccacgagttccctcatctcatcatgtccttttttcggagcaaagcagggataacatgtccttggagggtggttatggaaatgcccaatgcccaatatatactgtatggataggtgaatggcatgaatccctccagctttggggaatcaattcagtccatgttggctggtttctagaacaactgggcatgatgccaggccacacaggggccacggggaggaataggacatagtccctgtcctcagggagggggcacaggctaaggagaactctctgcaactcatcagccacgtaagctcagtcagcttgagcgtctctgttctccctgagtaggcaccactgcgaggaggcagtgaagtgttctcaatgggagggaggagccacagccccatcatcgtgcctgggacgctgaggcttagaaatgccgaagctgaacctgaaggcggttactgtttggcgttagaggtgggagatccaatgggaactgtgattgctgaggttccggagggtctgagagctgacatccgcttggggaggtgcctgcagggggcctgctctgggccaggcttggtgctaaggcttcaccaacactgtctcgtggaatgctgatggcagctgtcatcggctgtattgtaccagtgaggaaacagtgtctcaagggggttgaagatcactgactgaaggcccaggtctgcccacagctg

SEQ ID NO: 77640 - DNA, 1021 bp, Homo sapiens
agcccagtgggggccagctgtggtggagcccgcctccccattctattcttggagaggaaaagcacagaaatacaggagtgaaggcacagactgggcagaggggccggagtcgccctctgaggaggcctgtagggcccccagaagagttttctgggtcagaatcaagagactcaggagcctttttgcattttgtgagcccagtcactttgcctctggtcagggtaggttttccagagcatcttcctgctccgacagggggtgggggagtgttgggggtgggtggtttgccatgggaacccccggctgctgcaggtgctgtgtggctgaagccacctcccagttcagtgtgctgggggcaggatgtgggggagggcacctgggaggaaggtgtcggggcagggcttaccagggacccatggggaagtattagacggcttttggggctacactttggatagggagctgggggctcccagcatcagagcccactctttctcccccattcctgagtttggaaaaaggctgccagctggtgcctcacccctgcccctcaccagaagaggtcctgtgcttgccccctgccccatcctcagtccccagtcccacagctgctgtgcagtcctgcttctctttctgtctcctcccctgcatcattcctgccctagctctagacctctccacctagctacccctgtgctgcccgagagccctcctgtgccccaccacacacccacatgcacaggcacgcacattcacacactccgttctcttccaggagaaaccctccctggttcctgaggccctggggaccagtgggtgtgtgtctgtctctctctagcgcctctttctcctctctgcctttccttagacacgtacctcttacctcctgtctggcctggcttcctccatgaagtgctgtttggttttctcagcaggagcctcccagccccaaggctcccactgttcctctaccagtcctgtcctggggccctcactcctgggtggtcactgttgactgatt

SEQ ID NO: 77641 - DNA, 1041 bp, Homo sapiens
catgtccaggaaatgccattttccactggatgcattttttagatagttgcttggcacttatgtctttgtcttcagaagaatggttttccggttttaaacacatatctggctgggtgcggtggctcacgcctgtaatcccagcactttgggaggccgaaacgggtggatcacttgaggtcaggagttccagaccagcctggccaacatggtgaaacccatctctactaaaaatacaaaaattagccgggtgtggtggcacatgcctgtaatcccagctacatgggaggctgaggcaggagaatcgcttgaacccaggaggtggaggttgcagtgagccgagattgcaccattgcactccagcctgggcgacaaagtgagactctgtctcaaaaaacaaacaaacaaacaaaaacccacatatatcccacttttctttcccttccaaaagagagtatatggatataatttaatcatttttcctgtgttatgtataattgtacaattagaaacaaccaaacattaaaaggtagggaattgattaaataaattatgcttgatttaccttttaatgataatgctttagaagaatatgcaatgttggctggacgtggtggctcacacctataatcccagtactttgggaggctgaggtgggcagatcacgtgaggtcaggagtttgagaccagcctggctgacacggcaaaaccacgtctctacaaaaaatacaaaagttagctgggtgtgattgctcacacctgtagtcccagctacttgggaggctgaacctgggaggcagaggttgcagtgagctgagactgtgccattgcactctagcctgggcaacagagcaaggctccatctcaaaaaaaaaaaaagaatatgtcatgtcacaggaatatattccttatagtttgttaattaaaaagtaggatccagatgtttgtgtagtataatttcagttttagcaaagataaatattaaaaacttggaggagtacgttatgtaatacaaatgttacaggctatctctgagattaagtt

SEQ ID NO: 77642 - DNA, 2709 bp, Homo sapiens
tgtccgaggcccttctccctttctttgcccaccagtttctccctctgagcgctgcagccaccccacaagccccagtgccctgtcaggcccatcaggacatgcaggtggggcactggcctgagttttggatctttgcttcaaagccgtgttaagtccagctctgccttgtcccagttcccagccctgtcgctgttaggggtatccgatcagcaccctcaaaactagagagatcgcagcctcaaacaaatccttttggcaaatggctgcatgttaggagggttttggtgacccaaacatgtgccaggcatgttccaaaacccccagcatcaaggcccactcagggattagggtcgaagctgcttggctggggagagagggactgtttttgttcttagccactttctgttcacatatggctatcattcactgaatgaacgtttactagaacagcagggtggcggagtagagaaaacgtgtttccagtttgctgtacctgtgtcagaatcttggatttgttactgtgagattcagggcacttgagtcatttgttctctagaaggttaatttcctcaacttataaaataacttgatttgtacctcctgcagtgggtgttgtgaggactgggtgagaggaagtctgtgaggacccagcatgacacctgcacatggcagctgtgtggtaggcggtcactgctgttgtcatttagtaggtggcccttaggattagacaccgcgggggacacaggctgggtgagatagggtccttgctaccaggaacatatggttaacagggggctgcaggatagatttgctgtgttttgggagttcctagcatctgaaccccctctgagtttacatctgaggattctcttccatatgtatcttggaggccagacaggaaaggccaggaactcttgtcacctgtagtgctgggtgcgagcacaggactggggcctgccagccagacccaccccctggtgctgggattcaggaagcaggacagggagcattcgtcatggtggctcagtggcagaggcaggtgccagatgggatgctgagccctgtgtgcccgggtgtgggctgggcaggggccttgcctgcctgcctgcctgccacagggcctactttcactgtgcttctctgggtgaacagcctccctggcagaggcccggtttctgagcgtggctctcccagcttcctgtgttttctgacctgcacagtggccttttagtgaggtcccttgctgctcaggtcagccccaggaaggttctggtgctcacatcccagaacctgctggtctctgggcctcagagtaactcatactgagaggagggaaggatgcccaggcaatactgtgcagagacagggttgccacttctggccgcagggaggagtcagagaagacttcttggaggagggggcatttgaaaggtactttgtaggacagagggcctggagggaggttcagatcctggccgggcagtggaagcctggcccttgccttatagcctctttgaaatgtaaatgatgctagtgcctgtgggatagggcctttgtgaggagtaaatggttgaggacagcgcctggctaatcactgatcaaaatagccccctcctgacaggggattaggttcatggctgtcgtatatacgagaccaaccatctccccccacactctgtattgatggggagtggtagagttacacttctgctctgagctcagtgcatagacatcctatcttgttgaatgtgcacgacacctcgagatgtaggcaggatccttccttttttacaggggagaagacggggccttggtgaggtgaagtagttcccagggccttccatccaggtgatggagccaggaccttgcttctagttctcctgcctcccaagcttggctgtttcctacagctgcatacggccccacccagagggaggcagtcaccagagaaagagaatggcagtgacccagagggggcacagagctacttcctgctcagggagtgctgggcagcctcctgcgggggggagaggggggcattgaatgggcccttcagagaaggctgggagctcaccaggtcctgaggaagaggagggactgcgtgcaggaagcctcaaggcacgagccagcttagcatttgggggaactccaagtatttggtgtatacagtgtctgcagggtgcctgggcaggggtgttgggccaagcggtgtggcaggggaccatgtgtgctctggccaggggccttgacctcattctgttggtggtgagggcctctgcaggtggggagtggcaaagtggaccaagaccgcctctcctccactatctcccctccctacccctgctctgtccttataccccaggccacagtgaaggacattgggccgaggccctgctttcataggaggaagcaaagctctgcttcatgtagctgaagcccaggctccccattgtccaccctgacacagaccctctgagtcctcagttttctggtctgtaagtggctatgaagtctgtcttgcttctcctcccagagaaatcatgagcataaagagcctgccagacgtgtggatatgcggttttaaagattaaggcagtttaaccaaaaagaacaaaacattggctgaattaatagaagtggcactgggcgttcttcccgtcagcctgagttggaggtggggtgcctcccagcaggggctggcaggagcac

SEQ ID NO: 77643 - DNA, 4863 bp, Homo sapiens
taagcaatccacccaccttggcctcccaaagtgctgggattacaggcgtgagccaccgcgcccagctgggaaagagtgtttcttctctttcaaagggttggctatttcgccctggccccttcttccccgcttccagatattttgtgggagtatcaggagctttggcagctgtcttgtgagcgtgaggcgacaggcacgtggacaaaggtctaccatggcgagcatggcagaatagaaacttgaaaggagtatgggttcttgctgatgtcaacctgttgaaacaccctggagactccactccctcctaacgttccgtccttatgattaaagccatttttagtcaccacttaaaaccagacacatcttcactcatgattctgagcttgttggaattgttttttgttatacgaaaaccaaatgcacccttgacgtaaagactggccatcattgaaacaaagctttgaaggccgaaggcgcttgccaaagagaaggatgccagtgctttgagtgttactaccatcgatgtcagaaatgtaggtgcccaaaaggatgaccgttgggcaccctgttcatttggacatgttatgtcagaaaacaaatcataccatgttcaccatgttatgagaaaatgtaaagcctcttcaggttgtaagtagcagctgtcaatatgaaagaaaaatcttaaggaaatgtcaataaatagaatttattggcctgaatgtctcagaaggtccagagataggtctggcaggtttcaggccattaagaactcacatgtattgtcatcagaaatatttcttcacttttcatgctccttgtgaaagtcattttgggtgggcttgtgccaagtcatgtgaaactggttgcctgcagcttcatccccttggcttaacagccctgcaggaagcagatgtcgggctggctggtgctggctggctctggttggcctggcttgggtcacatacatatcatatttgcctgctaggaatgccataacaggtcactgcaaactgcgtggcttaggagaacagaaattcactctcagttctggaggctaggagttggactcaggatgtcagcagggcactgctccgtctgaagccccgaagggaggagccttccttgcctctgccagcttctcatagtcccaggcacgccttggcttgtgggagcatcgctgtagtctctgcctccatccccacttggccgtcctgcctgggtgtctgtgtcttcacctggctttctccttttcctataaggacactagtcatattgaatcagggccaaccctgatgacctcatcttaatttgattatatctgcaaagaccctgttttcaagtaagatcatgttcataggtaccagaggttaggacttcagcttatcttgttgggggacaaagttcaacccatgacacctgtccttgggctggatgacatgatactctagctggccaggactgtatcacttgcccaccccaaagtgagtgtgggtcaaccccctggagttacgtggcttaaacgtcggggaggaaggttcttcaagggaactaagttgagggcagtccacagatggaaacttggcaaaggcagtggtggtaatggttcaccagcagcccggcttggcctgagggccccagctttccagtccggagtggtccattggtctgattcttctctcccagttcggtcccctctttcctgacttccattctttaactctgcaggagggggcgcttagtttagttggaggtgaatggagagggaagggagacccaaagcagggaggcccttgtgatttccctaccagccgcctgctctgggctggagcatgggcctcagatagcctaggtgctgggctgcatgtgcggccttgtgggagttccaccgagcagagcttctgatgggggttcgcagcctgggtgggctagctagtgactgagctttgatggtaatgaaccatcgtttgctgcttttattcattcactagtttttcatctgctgtgggagaaggctgtgggagtgtgcagtccgaaagaaatggaaaaacaccagtctcctgtttctgccctgtgctttccagttgaccactcatttggagatgtttctgtttgcttgtgttccccccgccgcccccccccgcccccggctgctgggccatccctgcttacctagcctttttctgaaggtcttgaagcccagagcacttaggaaagtctgagcactaaattgcgtcctgcccaatcaccatatcctgtgtgtatgtcttatctcctttatgacaggaacatggttcatagttgcctttatctggagcacatggggccatgtgggaaaggaagcttgagccaggccaaccctgtgcagaccctgctgtccccaccgtggggccccgggctagcgctgtttctctgagcctcagtttctacctcctcagaatagaaaatgggagtagcactaatggttgagatttctctcagccaagtgtctgtgagtgggtttgtgcatgcctgggacctgagcaatggccacaagaaagtcctgtttggaacttgtggtcagcctgggcgatgaggtcaagatgccctgagagtcaggagggaggggtgcggcttgactgccccagaccacactgggaggtttgcagaagaaaagagcgtggggtggggatggggtcaaaaaggactctgtgtgtgcctggtgagggcttgaggcccggctcacagaccactggtggacccgtcccgccagagcagtgaccgcttgggaggcagtgagctgtgagtgtggaaaggaagtcggaggcaacgtgggtcctcatttgggggcactggggagcgattgaaggtttttaggtagttgcagaggacagtttcagggaaggtattctggcagttctggcccagggtggattgggttgtgtccaggctagaaactggatcctgaaattagttctgaaagaataaaaaaaaaagtctgaattagagagtatagcttaattttaattactggtccttgttaattagttctctgattgcatgtaagccaaggtctctaattggattttcttagatagggtttcgctgtgttgcccaggctggagtacagtggctatttcacagatgcaatcatagcgcacttcagccttgaactcctgggctccagtgatcctcctctcacctcctcctcctgagtagctgggactacaggcacgtgccatctaattggtttttaagtgctgtcagtacgtttcagggagactctccacccactttgcgctaatcttcccccatcctggtgatttgctgtagagtctttgttatggggcaggggcagcatagcctacttccagcctctcagtctgcggcagtgctcttcagggtcaccaggggagttgaattaaaaggccactctgacctggcctctgtggtttcctggccggctgcatggaccagccctcaagcgctgcgggaggcagagctgctgactggcagggacaggggcctgaggtcttgcccagaggggtaactggcctctgcttatttgtgagaggtgaggcttggaggtttggtttgatcttgatgccctgtgcctgcaagggcaaggaaccagtgcctggtgacttggaactaaggcacagacttccatttcaggctcaaaagcagcatggcactgggctgcaaagtcagggatctggttctttaaggtagatcttacaggagggagaccttaaatgcccctttcttcctgatctgacagatcctagagccctggggcctgccctggccaggagtcctggtgctaaaccctgtcaggttggtggggaaagggcatttaaggcccttaccctgttaagatatatcctaaagaaccacaaccctgacttgcggcccacgctagtccgtcacggtgtcgggtttttcttgcttcttcctcttcctcctttgctagccttggtgcttgcggtggcccttctggccaggccatagacagaggccacacccttcttccctctctgccgtgttgctgtccgctgggccactgtcccacctcctctgagatctacagccccacagggttgggtgatggttgtcgccacattggtcagttctgcatctgggtcagtcccaggggcttgcatggctggctgtcagtcctttacctggggggccctgtggctcatccgtggccctcgagttccagagtttccatctgctgccaggccgagtgcagcatcctcaccagcttcacagccaagcagagggatgccagtgttcggcctaggcttcggtttaatttttatgctagactttctcagtaatcgccagcacaaacttattcatggtcccttccttgtgtctggatttcagctttcctatctctgcggagggggttggaccagattacacgtgggtgactcagatatacctgggcctgcatgcaatctgtttggcccacacaggaattttacattctttcctttgaatttgttgccagtgtttaagctggttgccccttaggccccaccattctctgttgtcccacaccaccagcctcatggtttacatttgccccatgggcgcttcagtttgtgaccctccatttgctcctaggaccccctcctcacctcccccccaacccctcccacctgaattcctcagtaccctctggctctgtcttcccagggtgatgggacagaagaggagggaggctagagcctagccatccacaagccgggttccagaatggttggatttgagaaatctggtgaaggggaaaagatttttcatttgcccagaactcagggtagtggacttggggcagtaaaggtctcaggaacagagttgaagccagaactgtaggaa

SEQ ID NO: 77644 - DNA, 2314 bp, Homo sapiens
atggaagggcttccgcccaatctgctgtcttccattccccatgctgagacatttggaggcacagggtggtttccggtctcattgaattggctttcacgcttggctatgaggcacccctaggggttccttgaaggggtacctgcttttcaagggggatgagttgctcaccactcccttcacctgagcagctctttcttttttttttttttcttttgagacagagtttcatccatcacccaggctggagtgcagtggcatgatctggactcactgcaatctccgcctcccaggctcaagcgattcccctgcctcagccacctgaatagctgggattacaggcatgcgccaccaagcctgcctggtttttgtatttttaggagagacagggtttcactatgttgcccaggctggtctcaaactcctgagttcaagcgatccgcccgccttggccttccaaagtgcagggattacaggtgtgagccacctttcccagccactctctcttgatctgtgtttgatctggggtctgcatgttagatttcatttcaggaaagacatttgaggtcagagagagtttgaaaaccatggtgtctggggcagaatcctgggatattcagctcccccatgcctgggaaattgaggcatgtgtatgtgcagagagctgtgggcctgccaggtgcgtgatgactgttggctgtcaggtcctgggggtggagtgtggccatcaccgtttgattggttccttgtccgtcaggtgtccttctgagtgcccaggcaggccgggccctgtgctgagcactgggcacatagctgagagcaaaactgccacatcccggtccttaaggagcttccagtttagtgggaagacagaatctgtcttggatggactttgagtctcttccagcaccgcaaggcgtgtttattaaagagctgggcattggactcgcctgcacaggtacctctgccagctctgcttgctgatgggccagtgacactcacttcctcccccacacgtgtgggcctacccgatgctggcgactggaggtctcggtaggtcagccatggggtcactgaggtcccgtgacttggctccctgggtctctaaccattcctcacctgaccccatctctccagaattactcttgtggacccccctcacatccagggcttggatttgtcacctttctgggtggagagaataaagggaggaaacacgaactgaggtggggtgcaggagccaaggcaggccctcaaagtgtgcatcgatgccttcaaaagccagctgcagtattcggccacctgcgatccctgggtgcccgccatcagcccttgctcctctctcttgccttggataggacagaagttgacacttgggggctcttggagaaccatttggagcacgtggaactcaagagtgaatcacttattttttgctgtgtggcagcagggcctccctagacaggacatattcgggggcttgcagccaggtaggggagtggaagtacctcctctcaccccacacacgggaattggagatgaggcagccgatcctgcctgcttgagtctcagctgtcattttccaggctggcagcaccagcaggagaacccgtgtgtccgccgggctttctttaaaatgcaccgagtgcaacccagtcctccttgtgtaaactttctccaactggccagatggtttgcttctatttaaggcagtgagagtatttcctacggcctgctgccccctggcctttgttttgccccgggaaggccattcctcgaaagggaagctgagcaggagttgcacttcccagcagcagggattgtcggcgcccacccccatggcaggcctagaacctttgccaagtgcctctgcctggagggaccgtgtttgtaacttgactccctctgtcccttccaaatctgcttgtgctgtgttttcttagatggtcatgaaggtctccccccatctcccaccccagctgccagcccggtgcctctgtccctccacatccacatcttttctgtttccaggttctgttgatttttccctctggatatttccttacccaccccccacccccgtccttctgttctgtgaccccggtcagtctcccagtcccccttacccattattgccaagcctctggctggcatccccagctctgggctctcccaccctcagtccagcccccacctggcagaatgatctttcatcgagaatatctgagtcactccactgatctaacctttcctggcctttcattgtctttaggttaaagtctaagccctggagaatggtttatgaggcccttcccag

SEQ ID NO: 77645 - DNA, 1387 bp, Homo sapiens
cgggagaggggcgggtggggaaccactggattgaagtaatggttctcaaactggagtgtgcactggaacccccagggagcacatcttcaaacaggtggctggccccattcccagggtctctgaaccagtaggtctgagggggctgagaatccacatctgtaacaggtatccaggtgatgttgaccctgcttgtgagcccctctgtctgagaaccactggtttttttttattattattttttattttatttttattttttattatactttaagttttagggtacatgtgcacaacatgcaggtttgttacatatgtatacatgtgccatgttggtgtgctgcacccattaactcgtcatttaacattaggtatatctcctaatgctatccctcccccttcccccctccccccaccccacaataggtcctggtgtgtgatgttccccttcctgtgtccatgtggagaaccactggttttaaacagtggtgacgaaaggtgtggttgggccagatgtgcctgctcagaaagccaccagagcgctttccaagtctttggggcatctgggagattgtgcccggcccctttcccagttctgagtgagggactgaaccctgggatgggagatgtagggctgtttcctgtaccaccagccccttggggacctgggtttggagggagggtggtggtgcgggcaggtattatattgaatatagagtgagccagaaggccggtgaggcttgggggcgaacttccagcccactgagtcactctcaggccgtctctggccccactgaaggatctcccgtccccctaccccactgggggttcctttggccctcacagaaggacagataaggcccccagggtaagaacaacccagaccaggcctccctgggtcagagagtcagccagggcctggtatcgagacttagaccttggagagcttgggattatgggagaatcaggctgttcttcagacaacaggccgccctagatgcctggcgtctgttgtaataaaagacctttagtggaaactaagtctgttgcctttggcctcctaggagcccagcaataaaatcagtgtaaatagagctaacatttgggagtggtttataaagcacttgaaaaaaatccctcatataaacccaaagacagtcctacaagctgcagggacaattaattatcctaccttttggatatggaaattgaagttgagaaaggttaaataacttgcccatggtcacagatcttttaaatggcagagctgggatttggcctggggactctgccacccaaatctctgtgctttctgctgtcttattccccttccaccacgtggcccctccaggcagagatgaaggcgctcccctggtgcaagctccagcta

SEQ ID NO: 77646 - DNA, 4305 bp, Homo sapiens
acccgcaccgcttccaccccgcctcgtgactcacaccccctccaccccgcctcgtgacccgcaccccctccaccctgcctcgtgacccgcaccccctccaccccgcctcgtgacccgcaccccctcaacccctgcctcgtgacccgcaccccctccacccctgtgttgcgacctacaccccctccacccctgccttatgaccctgtggacctcaaggcagagcagcaatgtgtcccgtggcctctgtgagagcggacccagttcttctgtccctacccagagtcccgcatggccactctggcttcgaccttccagactggccctcccagatgcccctgtggccatcaccccatggctcatttctgtcatcaatttatgattgatcctttaagggagctgatgggcttgcaggcccagggccctaacaggggctcagcccttcattccttctgttgctgggtgctcacccaggccccagtggcaggtcccctgctgccctctagggactctaagatgaccaagtctttgacctcttctgcgtcagtagctcagggagacagacaaccatggggccgcctgggaagatcgggccagggagctggggagggctctcgccgagctgatgggtttctcccacctgtcagtaggtagccccttgagagacagcatgtggtgatgccagaatcgtgggtcatgatcctttttctctccatcaaggtgcctagcgccaccaagcatggtgagaatgaccaggagggtgcctggtgggtgagccctgagtcgtgtggcccccatgggagagcatgaagccacggctgcctgtgctgcaggctggggccgcaggagactggggtccctgctggttctgcctctcctccctgcatggcctcggccgggctctgcttctttctctgtctgacagctgataggatctcatgggtcccgtttcactctcaccttctgtaaatccctgattcttcagaaaacggggctagaaaatctcccaggtgtactcgcacgtctgtttcctttcttagcctttcatcttgaagtcagcttggtgaggttgccctgttcatactgcagaatccagggatctgaggcctctcgccccctgggcagcaagtgagtaggagtgagcaagtgtgtgtgagtgagtgaatgtgtgagtgagtgtgcatgtgggagaatttgtcgatctgcttgaagcaggctctttgggtgctgtttcagcaggacagatttcgagagaacacagctagctctccacgttggacctcgcctgggtgcagtgtttctgtgtatagcaaatgcacacatggctgcctgtgtatgcgtggtggatttggagtctgggtgatgggtttgcacgctgcctctgaccttgaccagccttgtgaccctggggagtcactgtgctctgggcaagtcgcctgtgaggctcataatcctgacagcattactcatcctcggcctatggtctcccgggtggcatttgggagcacccagagggtgagccaggcgctttctaagctgtaaaagtgccctgtgatgtgagcagttatgtgatgtgctctcccagcagcacccagttttggaggctcaggaagcattcccagcagggcctgtttttagccttgaaacatcatgcttgaaaaatgcttgcatggggtttatttaactttaagtggggcaaattctgaaatgggttgtttattgtccaagttgaatttttaatttctcataaattccccacaaattgctatagtacatctttatttgttgaatctgtcagagttgtttatggcactgaagcctgggctccccctgtttgtggactgttgccatggcaacaccaggctctggaggaggggcactgctctgaggtggtatagaaggttctggaatgggctggtggtgtgaagtagagctgtggctgctgcactgagacccagccgtgggtggactgagctgcttaagaccctggttcctcttcaacatcactgcacccctcttggtccctcttcccttgggggtgcactgctgaggtctcctaattctgcttccctaagcccttgctgctcccagtgtggtctgggaaccagtggcagctgcactgatggggcgcccatgaaaaatgcagactcccttgcccccagacctgctgagtcagtctgcagttcaccaagctttcaggcaccttctcagcatgggtaagctgcagaagccctcacatgccacactgcccttgggtgaccccagaggccttggcctggcggttcttggtgtttgccaccgtcctccctgtgatctttctgactccttccccgacagttccctctgcttggccaggagtgggctttgcctctcaaccctgctgcacccaggccactctcctgctttgcacacaccagtctctactcacacagtcaccccagccttctctatctggggaactctggacatcttggaagaggcaactcttgagacacctcctctgtgaagccctccctcctttccccagaccgggtgatgttcagtttcactggagctctcctgtggcctaaacacctcacctgccccagcctcatcaggctgcctgattcacctccctagccgtgacctcactgggtgccccggctgctcctcccgtctgctgggtgctcagaccccagccagcgctcaggaaggtctgtggagtcattgccactccagtcagctggcttcacaaggctgagacttgagtctggacttcttccaagagcctgtactctctgcccggggagtggtagggaccgctgggcaccttcagtttctacctgaggcctgactggcagttggggctaggaccggataaggatgggtccttggactttggaaaggcgctgtgggagggaggcatgggaggggacagctgagaggagtcccgagctcatgcgcaggtgagtgcagaagttcaggtggcatttgtatgtcccttgagtatctgttctgggccaggcagcaccgaggctcgggagagtcccagtaaacaaaccccaaatccctctgccttcgtggagcacttgtgtctaggttgagagactgaaaacagaaagaagtgtgggtggcgagtgaggtgggggagggggactgggagaaaaatgaaggagagtaaggggctgagggctggtgtgggatttgggaacatggcttggttaaagctgaggagatgctgaccctttggccctgcaaatcctccatggcatgtacccaagagaaaggagggctgtgtccaccaaaagacacgtgtagaatgaatgttcccagcagcagcattcctgatggcctcaaagaggagacagcacgcatgcccattggctgtagaatgggtacgtacatgacctgtgttatcatctggccatggagttgtatcgaatacagcagtgagaatgaaccatggatgagtcccataggcatgaaacgtggccaaagatgccaggtgcagaggcgtattcagtgtctgattccatttacatgaagatcttgaccaggccaagctactctctggggacaggaggcaggctggcggtcacctttggggacaaggtgccgggtgggaatgtgaggagcctgctggtgtcttgcaactgtcctctcctcagtcttcctcttgggtgccagtttgtgaaatattcaagctgttcacttatggcatgtccttcctttcttatgttatacttcagtgaaaggcttataaaagaaagaaacagaaggggaaaaaagccatgagaggcagagagagtgctgttttctgtaatatatgcccttagattctctagaacattggttctcaagccaccgtacatatcaggacatggccaccgcccctcctgaagctctccttgccaggagtgatgcaggctccgaggatgaaccacctggtgagaagccagtagccccagcggcatctttcttgctcttcactggactggagcctctctgtaatcaagggagtacatgttctgtaccccctggcccagtgtctagttagaatagacagtgagcatttacagattgaatggttttttgtttttttcccaatggttttagcttgtctttgggaatatagggtctgtttctgggcatggagaaacagggttccctcctgtgctttaagtctaacctccaagccagagaggtggtactggcaggagataagaccacccgttgtctggatgctgttttccatgcagcagacatgggctccagtttctgtcaatcagtttattaaaacctgcgtttattacttgtttgccctgtgcc

SEQ ID NO: 77647 - DNA, 1911 bp, Homo sapiens
tttttttttttaaaggtcaccagccctgttgtctgggcagtaagcacctagtaggattgcttcagagttctagaatgcgcatgtaaaaattccaaagtgcgtttggcgtctgggctgggcttctatgagcagcccaggcagcagcagtgagaactcctgtgtgtgcctcgtctactgagtgccagggttagtgccccacttgccaggtgagaggactgaggctcacacaggtgggcttgtcacagcctagcatgtgagctgtggagctgggattggattctagaggtgtgatggcatagccagtgcctcttctgctccgaagactgcctgcctggtgagagtccagtgactcctccctagttccagctccatccctccaaggctgtgcagtcctgggtagtggcacaacctctctgaggcccatctaccagatggtgatgagatggatgattgagacgaggggagggcaagtgagaaggccttctaaaactcaggccctcgtaggagaagcgtgggtagcctgaggtcagggacagggcttagtgtgctgtgtggggctgtggggagtgggaagctcactggttttctggctcctgagatgactcgaggggtcttgtgaagctcacacccctgtctcactgggcaggagtttggcctccactgtgggtctctgccatctcaggtgggtgggggaccaggggtccctgggcaggagggtgtgggtcctggcttggaggcagaccttggctcactcccttccttgcccaggcagtatttttgccgcaggccctgccaagtagaaataagttatttacagtgttttgacaggatcatcggcagccgggatgggcaaggatgcctttgggactgagctaatggccaaggagtggggcttggagaagggtctggcgtgggagagagatgggagatgggggtggggtgggggcgcacatttactgaacttgttaaatcttgacaaatgccaggcctggccctcccttaagccagggctttggggcctggtgagggcaggacttgatgagttttcctgtcgaccaaatattccgccggatcgctcaggaccctcggttatttttgctgtctgagccctcagtgccttcctttgtccatcagggacaaggacccctgcccacccagtatatcttcttggggagaagatgaaacgccttggtgtatggtaggccaggccctggccttgactgtgagcctggcagcccctgcagcccctcacactgggccaccattgacctgctttacgacttcaaatagcacagacctgccgtgggaccagggcctcctgctagtgcctgacctctgtcctgcatgatgttctgaccctccagaagcaggtttgaaagtgcctttcaggaaggtctggagagcctcctgtgtagcttgtgggaacaaaatgtgttactccctagccgaaggataaccagcacactaaaatgtgaataaagtgtgactttattcatgtcctttgagcataaaaatggcacacacactgatgcattaaaaaaacttttttttttaattaaactttttttagagatggggttttgctctgtcactcaggctggagtgtagtggtgcgatcatagcttgctgcagctttgaactcctgggctcaagcaatcctcccacctcagccttcttagtagctgggaccatggtgtgcaccaacatctttgatgcagttttttttttgagatggaatctcgctctgtcgcccaggctggagtgcaatggctcgatcttggctcgctgcaacctccgcctcccaggttcaagcgattttcctgtctcagaccccagagtaactgagattacaggcacgcgccaccatgcctggctaatttttgtatttttagtagtgatggggtttcaccg

SEQ ID NO: 77648 - DNA, 1714 bp, Homo sapiens
cgtggtctggccctgatgtgcgctgtgtctactgggtgagtgaattaaggactgaggtattgtgctacacaggatgtggccaggcctcgagggtctgtgcttgctaaaaataactctagattattcttttgctcattaagtaatatgtacttgtggaaatcttgggaagtcaagataggctcacaaatgaaaacccagagataattattgaagcaatttttacataaaatatgctcctttttctatatgatgtgcattcaggttaggcttttctgtgtccctagttttgccacttgcatttgggggaacagttgagcatttgcctgtgccatttaaacaccttggaaattgctgttagagtggctgcaccagcttcccaccatccctatgtcccagcatctagaaccatttctctgctccagagtctcaagttctaggttatttctggtttgctgttactaacagtcctgccctgggtgtctctggacctaaatctttggggacctaagtcacatctcaggctgtttcattgggttatggtctagaagtgacttcaggattttgttgctaaagaagaaggggagaatgggggacaggttgggctgcagctagtcagctgtgtccagcacacttgggccctggacttagaactggacaggttacttgccccctctaagcctcagtttattcttctgtaaaatggaaataataatggacccagtctcatagagttccaggagtgaggtcatgcagataaggaacagcacagaacctgtttacctagtttgtcctcagaaggagctgtttgtgattatttactggtgccacctccaccaccatcattgtcatcctcagtggcccagggaagcgtgagtctgaatgaggtgtgttgtgtagttaaatgatgcgatgggtagatgagccaaaatgaaaggatctcttctgtttgatttattttcatgagtaaaaaagccagaaatgtctgtagcataagttatgtctgtttggtttggctaaagcagggctgaccagggatgagtctcctgctgtgagtgagtgaggtcccagcttgtcctctggggttagagcagattttgctctggctggggtgcatttgggggcatgggctgatttatgttttccttctttctggatctccccaggtctagccatgatggggtgaaggcatcacccccagggagtgctgacccctgaccctagccccatgaccccctcccgtgctagttcattatgggcaggggaggtcccagggattccccgcacactcatcgtgacttttccaaaagctgtgtaaatccagagttgtaacttggctctgtctttctccttccccttgatccaccctcagctcaagaactcccctgggaagcacagtggctcccgtctttgcctcaagttctctgatgttctgcacaaatggtaggcagagacagccctttcagggacctgattgccctggtgtctagttctcctttcacaggcctgttttccagctcgactgtcaatctgagtctttctctttttgagctttatgcaatggccttagagtataccctataaggagatcccggcttgctggtgcccggccctgcagctgtgtcccagaaacttggcggtggtgcatggggctcactcagcacttctacagaagccgcctggggtggctcccagggttccggtgggaatggggtac

SEQ ID NO: 77649 - DNA, 1995 bp, Homo sapiens
tctgtcgattttctctgccgtgtgctgtggagccaagcgtaaagggctttgggaataacaatcgctgtggggttctgacgtctttggagctgggacagcccatggtagacttgcggtccacccatatcctgggcagtggctttctgaagttcacgtgagcctgactctgacctctccccagaccccatcatctccaaggaggaccgccacgggcttggggggctggctctgcacacagtgtttccatgtggtcatttgaggccagtaatggacacagattgctcttggctgtgcctcacttccctgtggggtccagagacctgggtttgagtttctgagtctgtttcctggctgtggatcttttccttcctctttaaagggatgacagcgcacaggattgaagacacctaagagatgctgaaggaatattaattgatttttactcatctgttgttatgattaatggtggcatttcagtggggaaaatacagctacagatgaaactgggctgttgagaaagatacattgtttcagtgtggagaatatagtattttttttttttttttgcctcccctctgtatcacttttgggtttctaacaattgtggattccagcttactccttccttttttaaaagatagattttatggtttttttaaaaaatttgaaatgcaggtatttttttccccctaaacattgacaattattttcattctccatcatttactatttgcttaggctatgtagataacaaataagacaaagttatgtgaaagcatgatccccatagtgttttttaataatgatgatacatgaggtgctgggaagggttatataaatgaggtctgctcatagcagttctccaatgtggccattaaaaaaaaatcacatttttcacattttggaagacagcgtggggaaatgctcgtgagttgctttgagtactgtcgtcatactctgagtggtttcatttctatccgttttattttggttcctgagctttttaggtttgctgttagaaatagaagctgtcaccgtgttgcagtcttgtgcagcttccgaagcctgtggcactcagttctagggtgattctttctccagcctttgatgcactgagtcaatttgagcaaatcctttaaaaaaaaaaaaaagttcccacatcccatgtcaagacaacagagctctgccagggcaggtggggctccctgtgctccagggtgcctgggtgccttcttgcaggcaggcttccagaaccccaggccctcctcaccacaccacgcagggttgggactggatctccctggtacctgccacccttgcttggctgtcaaatgtcaagaattccgtggcctcagtggagcgtgccaggtaagcattttacgtaaaagcaaagaaaagagatggaatgaagtacacaggggaaataggaagggatggaacgggggttttagaaagggccagaagcaagattctgctcttaaagtagctgactgtcctggcattctggggtgaaggtatccatagcattgctactcagagtgtgatcctagggaatctgggtgcagatggagaaactcggatgcaaacactggattcctcagcagtcggttcccgtttggcctggtgcagggctgagactctgaggaggaggcatcttgacctgagggccctggactgtgctccttgtccagctgggcgcagaaccatcgtagtcaaagccaggaatggagatgcattgcctcaggtcagttccaaagaccaggaagcgtccctgagtatttcagttgagtaaggacctggcatctccctcttcagccccttccctgctctcatatttttattcatgcttttagaactgctaaatgtcaggtgggtgcagtggctcacacctgtaatcccagcactttgggaggccgaggcgggtggatcatgaggtcaggagatcgagaccatcctggctaacacggtgaaaccctgtctctactaaaaatacaa

SEQ ID NO: 77650 - DNA, 5775 bp, Homo sapiens
cacttgggagggtccatgggggaactgctgtgggagccattttcagaggaagtgagttcaggcgctccccagcaaacacactgcctgagagggcaagacagccttcccccatgcctgatcctgtccatacgcgacctcaaactgtcacacagtgggtgtcacccccaccgctcgaggagaggatgagagatggacaggggtcggcgggtttcatttatgtggcattctgggaagatttagactaaaatctttaatccgctcggtctgtgggaggaacaggagactggagccattgtgtcagaatgtccggggcagaagaagcattgcgaaatctttctagacatgtatgctgttcatttaggtggtggcttgggggaggaagtggtggctggggaccagaacgaagccaaactggacactttacacttcagcatctaaaaataaaacctaccacgatacctctctgttcacctcctcctggcatccctgcatttggagaacttttagattttaagacattgagaaagactctgcaaaaacaggaagccaagccacttggctggcttttcaaaatcagctgggcttctgtgcgcaggatctccaggctgctgggccctgggagctgggggtgtttgcagtcctctgggttcaggtgctggtgactgaagaggacacacgtccccttgctgccagccgtcttcctgtgtttcctgtgtctggtccctgaggggcgtctcccgttctgtgcagccacccagggatgatgtggtgttaagtacccttttgaggtggggaaactgaggctcagaatgctgtgctttctcttggggatttcagctggccgtggtggagttgggatttgagtgcaggtctgtctgtctcaaaagcctgtggcccatggttttctgctgaacggtctcctctgcatgttcataggttctccatttactaaatgcttctgttcctcttattacctggactttggctgctatctaaaaaaaaggatgttggggccaagggtcaggactcaagactgcaaaacgctggtgaccggaggtcggttggtcatgggagttgtttctcttcctgttatttaatggcaacagtaacagtccttttattgaggactccagtgtaccaggcatcatgggtttactttaaggaagcatttgtgtgtaaccttcccgaggtgggtgtgggagcatatttaagaaagtggattttgcagatctcagtgtcctcaggtgcctgtgctggaggctgaggagctcgggagcccttcttccctgccacccctgtgcctcttcacctcgttcctcctcccacctctgcagaggattgtgcactctgtgaggcgcagggccgcctggggtcaggttcctgtctgtgtgaccttgggccagttgcttaacgacgctgtgtctttctgctcatctgtaaaatggggataatcatggtgctggtcccctggcaccattgtgaggactgagttactttgggtgaagtaattggcactgggcctggcacactggaagctggctgtctgcaggagaactgtacactatccacaggcagacctgaccgagtgtgagacctcagggcataaaaccctcctggtggtcaagtacagtggccagtcattgtcatcctggggccagggaggtatttccagttccctgcttgcagcaaaattcaaagagtacctgatggtgtcgtcagctgatagcacattaagaatgacctttgttttgggtggctgaggtgggtggattgcttgagctcatgagtttgagatctgcctgggcaacatggcaaaacctcgtctgagggttcccccccaaccacaaatacaaaaaattagttgggtgtggtggtgtatgaccgcttggggctgaggtgggaggatcacttgaacccaggaggtcgaggctgcagtgaactgagatcgtgccactgcacttcagcctgggtgacaaagtaagacactgtctcaaaaaaaaaaaaaaaaagaataatatttgataagagatgactagattactgtaattcttggcaaataattataaaggaatccaaagaatttgctgtggtaaatctctttccattctattttttaaatttgaataagtggtttctgttctcacatctgtaaaaattaaaaaatggagatgaaattgataaaccctgtcttattctagcaacaggcaatattcatctgagaattcatgaaataatttttcaaaaaattcccattcattgtatagatgtatttttaataagatttatttattaaattttacttatttaattttttttttttttgagatggagtctcgctcttgtcgcccaggctggagtgcagaggcatgatcttggcccactgcaacctccgcctcccaggttcaagcgattttcctgcctcagcctcccaagtagctgaggttacaggtgcctgccaccatgcccagctaatttttttttttttttttttttaagtagagatggggtttcaccagttgaccaggctggtcttgaactgctgacctcaggtgatctgcccacctcggcctcccaaagtgctgggattacaggcgtgaaccactgcgcctggcctaattaagtttatttttaaaggttatttcttatacaattttgcaatatatttctgtcttattgatcaattgtatacttatagtaattgttataataattcagtccaggagaaaacttctgacagagctttatgatcacaggaaatcacaggaaattaaaaaaaattaaaacattgatttttgtattttttggccctatagtatataataggataatcagtataaggctttcaagcataaaatacactgtgatagtataaacatctctgagggagatcagagtttgtggaggaaaaaaggaacactgttaaatttccaatggttaaagaagagcttgattatgtaatttaaaaatggatgatggcgaatctctaatcgccgtggtatttagataccattggatccatttaaaagagaaacattaacagttttatttttaaatgttaatatttacagtatgttggaaattacatcctctacaagtatttagacttatgatgagaaatttttcatatcaacttaaaaatgtgcaaatagatatgtagttttaaacatttattttgtgggggtttggtttgaagtccactgcttcagaacattaccctgtttacttctcagaaccaggcctgaggcaaatccttcctcggagagggacagcacgaggccttgctctcaggctgtccagaggccctgatggggctgggctggactgggctgactctggggcccagaactgtgctccgagacttgcttggcagtggacttgtctgcagacctggtctgttgggccacgtgatgatgatcatgaaagacacagcactgtctgctcagggctgctcaggcaggaaaggaagttgcaggggagccaggacccaggtagctcagaagaagaggatgtcctactttgtgtttagagcagggagttgggctgcaggacaagggaagagtgtagtaagggtcgtgggaccagatgctctctacctcctgtcttgagaggctacttgtcatgatggtgatggtggcaagtgcctgtttcctcagccccgtgctctgtagtatggtaatgggaatgctggacgcacgggccaccctgactccaccatttcagtgttgagttggtctcactgagtgctgagctgagggcccctcatagccaggccgtgcagatgggacgcagtaacatgcagcagtttccccgacacttgctatggataggccccaggtgctgggggctcacacaggcccaagccaggccccttcaactctctgtgatgtctgcagacagtggccaaggtaggcagggacaccagacaggcacagaggagggccctcacgcagcctggtaaatcaggaaggctccctggaagacgagtctggttagtggcaatgagcccatctacccaacagatcctaactgagaggcaaggcctgacagagctcaacccagttcctaggtccttgtgcttccttctaaaacacctagttgctaaaatgaccaagtgccaagcacggcactatgattacttcccccgtacacaggagccttggtcgtctgtgatctggggagtggggctggggctctcctgtgggccaggcagaaggcctgcatcagccttgctaggtgctgtcacctgggggcaccttccactccgatccaatctgtggggaaggctcaggaggagcggtttccccatccagggactcactgcctctttctggaatagtcctgaatttggtggaggaagaccctgaaagaaagacccacctgctgccgggccccctccagcctggacgtccttagggaagcatgttttgcagcctgacctctgccctggcctgttctctgggctgcctttccccagttactgtaaaagatcggggagaaggtgactgctggcatgaggggactcgaggtttgactttaaagtgcgaatgagcaagctgtaagtgtgagaagtgcagcagccagttagagattcactgtcctccatccacattccttgagaattcagacactatgaaacccagtctctggtgcggcggctgtttctcaagcaggcaaggaagtaagtaagttctcccggcttgcgaatgagtgaatggtgggcatacgtctttctgtccgtgttttctccagagctggtgctggctggcttgctggtgacctttgtatatgtgtttttaccccttcctgcaccagactttcagggaaggaggttgggtgggtgaccatcaaaccaccaagaaaaggcaagtctgagaaagagacactaagacccaagggaaggtccatgtgcctggggccgaggcagaactgggtgctgggcctctggaggcgaaggaactgtggggatgcccactggcagggaaaccgtggggatgcccaagcccaggggcagggcaggcctgtctgagctgtgggggagtggtgaggacgcaaggctgggcatgtaaggaggagtgggccatcaggggatggaggccatacctcctgacatggaataaactgggcgtaggggctggcaggaggcgaggtgttagaatggccttacagacaaggagcatggccagggccacacacagcagctggggaagggggtcctttggctgccaatggcttggaaaggctacagccccaggcttgagggggctagtgagagaccaggctggagagagtagcggtgccaggtgagttgttcatggggtgctgtgtcgggggcatggaggggcttctgcaggcgaaagctgggtgctccaacctgaggctatgggggaagagccatggggaggatacatggagggtgattagacagggctgcactggaaagcagacagcagggttttctgagaggggctgtggctgcagcctagtgaggggtgatgtgctctccaggggctcctgcagtgacagagggcagcaggagacagatggcagggtgtggtacctgggtagatgtgggaggtgagagggggaggatcagtccccagactcctcccttgtttctggccggagtgcctgggcatgggggtgcaggaggagcagccgccagggagggaaagcccatgccagcactggcgctttccgataggtgtgctgagtgcaggcagcggaggcctgtgttggtagctgctctcggaattcagagccagaggggactcacgt

SEQ ID NO: 77651 - DNA, 1034 bp, Homo sapiens
ggtgtgggaagggtgagggggcagtaggcacccagctagatgtccagttgtcttgtgctctgtgtagcctcaccctgggtggacttggttcaggtgctcattaactagaaaaagaaggatggatggaagaagaaggaagaatggatggagggggaaggaaggatcttggagggaggggaaaggtggacagatggagggagaaggaaggatggagggagaaggaaggatggatggaggggaggaaggatagaaggatggatggagagaagagggaaggatggatggagggggaagaaggaaacatcaaaatactctcagactctatgtgaggggcaggctgtgttatttgcactaaaggctgtacctggcacctaatgggtacttggtaaacctgatggtggcctggccatgtcctctgttccccacgctgtccccgtggagggtgactgtggtctgtgcagctgggctggcatcccatctccttgtcttacgggcctcatctgcctgtagctgcagagaggggaactcaagctggggactagatcagggcagtggaggtgctggcccctgctagaatatctaaggggctttcaaaaagcccactggggagctcttccagcccacccctgttaacttcagctccaggccttccctcagcggtcataggagagcagcgtccccattcctgcaggttcagcattgcaggccccaggtttcccctgctcctgggaccagactggggctggttgacgggtggggctggtaaaggatcctcctgacctccctcctggtagtttgtgggttgaacttgtcactggaagactgagatttgttttggggtaaggaggtagtttctggaagcctctcagcagctctaggtttttgtccaggctcttcttggctctggagaattgcatgttctgcactagatttttcttttttctcttcctttttttttttttttttttttttttttttttttttgagaaggagtctcgctctggagtggaggctggaatgcagtggagctatct

SEQ ID NO: 77652 - DNA, 1435 bp, Homo sapiens
ttttcccgagaggctgtggtggtgcatgtgggattccaccaccagaggggatgcagttttccgctgccacctcctggtccttccattgcactgaggccctggaggctggagaccaggccttccagcttggtgccacccttgcccacggtggtgcacctggtggtgaacacgtgggtgtggggagagccctgttccgggccagctcctgcacttcctgagtctcccaggcctcggcctgctctgcaggtaatggggtaaccactgtcccaccctcatgaggctgcagaaggtattggtgagtggtgagcttcaaggggtgtgtagcatacgtgggtggccccctcttttctgccactgttgcaacttatcctttttttggagctctgagcgacagaggaactgctgtggctcctgggagatcaaccccacttaagattgcagccgatcttttctctagattacttttttgttgctttcttattttatgtgttccatctgttttcagtgagagactgtttttttaggactaagggagggagagctgcctgggatgatgtaaaatgtggactgattggaattgacctcagtaaagagaggagagtcacacgctgggataacccagatgccagcagggttgactcagagggaaaccgaggccctggcccagagcccagtggaagtctgcgctcctctgtcaccggcctttcccattgtgcggttcacagtctcggtgatttgggacttgagttttctgtcctggagcagggccgctggagtttgggctggctcctcaaggtcctctgctgtgtgtcctgggtcaggttcccgtcagtgacgcttccttcagttttctcgtccctgcggggggaggggcaggatgattgggaatgaggcaggggctgaggtgtccacaggtgctcagaaacggtgcaggttgtgagcgggtggttgggtgtagcacaggttcctcatgatgctatctgtcactgtgctgtgggctgtggtggcccagggctatgctgttgtgtatctcccctgtccctcatgaaaccgtggaagcagatggatattggccaccattcctacaggaactgcagacaagctaagagacactgagggtccctgaatgcctcaaccagggtggttctcaaactggattcctcggggcccaggtttctgttgaggtgtcgggggtttgagggaaggtgggctgggtgcttcccacagtgggacctggtcagctctccttggcctctgtcttcctgtctcatggagtggctcctttgtgaggttccgctcagtgccttgctatcagaaggtgttgaggaagccctcactgaatgagctgacaaacagatgtaggaattggtgggcggcgcctcagctgtgccatgaaacaagggagcaagggtgcccaaaggttcctgtggggctt

SEQ ID NO: 77653 - DNA, 1449 bp, Homo sapiens
atgctgagcatggagcaggcttcagtggaagccattattcctgcctcttgatgaggaaggcacttgagctgctcttggtgggtgggcaggagtttgccagctgaggaagggtgcctggcagggggatcagtttgtgcaaaggcagacttaggtcaagccttggcatttggagattggggtccctcctgggagggtttgagaggctgctgctgcctccccctcgtgtcttctgagctgcacctccaaatgcccatgtggcaggtgttttgctaagaatttggggctgtggacacagggcacaagctgtgtccctgaaagagtgcttgttagtcaggataggccaggttaggctgcagtgacaagtagtgtcgaaaggctggcggaaataggtttactcacaactcattcagcatgcactctggatccagagactctcgggggctgtggtctgccctgcagtggctcagtgtgtatcccacttcttaagttcagcactgtggaccttttgtgctggataattctttgttttagggggctgtcctctgcattacaggggccctttcctcactggattctagtagcactttcctcggtgtgacaatcaaaaagctcttcaggtgttgctaaatctccttgtgggggacacacagttgcccatagttgggaaccagcgctagctggaggtcctcttcatcagttgtttctttctggttcccagcctggcttcgtcgccactcagcccgcgttgtttccaggtggcgggtctggctggctctgctggtgggtggcagcctcatgtgcttccttgtttctgaggtcagggaggcctcggtgctggcagtggaatgctttttccaggaggggacatggtcacctctgttcacatctcattgcccaaggcaagtcctgtggccatgcctgactgggggcagggacaacacagtggcactgagtgtccaggagggaaattgccggctttgatggccaccattgatgttcaccaccgagcattagcctggtggggtcagtgcaatggagtccagcagcctttctctctgcccagtgctgggtgtgggcagcttggggcagtggggcctgaggagggtgggagccaaggcaggtttctccagaggagctgacctggggggtcaggtggtgatgtggggatggcatttgaggaagggaacagtgtggccatcaacacacatgggtgacggggcttagtcatctgtttaggagccccaagtcctggggagacatcctgggcttctgtggggtacggtgtgggccctgccctctgcaggcagggaaaggggaccataacttggggctttttccccagtgcctggtacctggaggtgccaaagggtcttgttatttggggtgcctgaaatcagtagttactgaactgtgccacacgttgcttggatgaggatgtgcctggcttcc

SEQ ID NO: 77654 - DNA, 1059 bp, Homo sapiens
tgtggtgggcaaagtaaggcccctgccactccccaccaaagacagcaggttctaatcctcagagcctgtgagtgtgctgccttacatggtaaaagggtatgacatgactacagatgggatttttaaatttttatttttcagagatgggggtctcactgtgtcacccaggctggagtgcagtggctattcacaggtctgatcataacgcactgcagcatcaaactcacggcctcaagtgatcctctcgccttagcctcccaagtagctgggattataggcatgtgccactgctcttggcttacagatgtgaaggagtgaggcatcttgaaatagaaaatgttcctgcattacctgggtgggcctggtgtaattacaaggaggcaggagggccagaggagatgtgacagtggaagcagaggttggggtgttgtggccacaagccaaggaatgtggacagcctttagaactagagaaagcggaggaatcgatttctccctggagcctccaaaaggaagcctgcctctgacctcagaaccctaagagaataatacatttgtgttgtttttagccactactgttgtgatttgttacagcagcaatgggaagtgaatacagttttctcctaccctgctcttcttagggcttgtgggtgaatctgtgactgagaagggagggactgggtcagggtcaaggtcaaggccagagcccatgtgacccgacaccttgggactttcctttgacctgccatcccgaaaatatctgaggggccagggagatactccagtaaggtgccttgtggtttaagttttctgagatggggtcagggctgactcatgcctgtggctggggggccccaggaaaccccagtgcccatgacctggtctttgcctttgcttctcctggtgcttagcaggccttctctagcgtgccctggcagcctccctctccctcccctccagggcctggctcacacagcagctctactgaaacttccctgtgcctcctgctgtcccccaggtgtttgtgctatttaagggcctgtggcacacccgccagagg

SEQ ID NO: 77655 - DNA, 1726 bp, Homo sapiens
tgcagaaggtgcagagtgtgtgtgcagggacagcagggagaccgcctggtggcctgcaccgcagagctgtgtgtctcagggagtgggaagccctgcctgtgctggcctcagttcttccgctcttctggaattctgcatccttcttttgacatttctctctaatgcccagggtcctggctcttggctttggcttggtggcagctgtgaccccctgcatggggctctgagggattattccagctgtttggggactgtagccatggctcccagctgcagagcctgacaggcctggaggccggcaggaagaagatgggggctgtgcccgcctgccgagagctggctctgagactgactcttggcactggggtcctctgaggccccaggctcattctcacctcctccagagacccagctgacataccattctcatgagctgcagtcctgtgacccagctgatttctgtctcattggtggaaccctttagaggtggggtagggctcctaaaacattagccctactgccttccccacagattggcctctcttccctgcctgtgggcatctggcatctgcttgaatccttcttgtcacggggtgctcatcacctcttgactgccttcctatggaagccagcaacctcttcctatggttgagctgaaatctacttcataggaagggttccttctgcctggaaggtttgatattggacaggactgtcaaccgtgtggagaggggaggaacagggtgctggctcccccggcttctgggctggattgacccagggcgtgtctaccccacagcatcctgacatgccagaggctggaccttaggaagtgccttccgggcccttcactgcaggcctgctcaggggctgctcctcaggtcttggggcccctggggcaatggcatccatccttttggcctcctggggtcaaggttctgagggaggattagggcagcaggtggttgggtggagaggcagctctgtccagaacaaccctgttccagaaatcccagagcctcatccccaacagacccggtgggccccccaccatcacacaggtcccctttctccccaggaagtcacacagtgctgtgggatgaggagggtttcctgacagatttggggagagcgggcctgggtggggagtaagggagcctgggaattactggtatttggatgggtttagattgtggttctgcttcttacctgctgtgagtctttggtcaggatactgaactgctctgaatttccccacttgaaaagaggtgacaggccaggcgcggtggctcacatctgtaatcccagcactctgggaggccaaggcgggaggattgcttgagcctgggagtttgagaccagcaacctactgggcaacatagtgagaccctgtctctacaaaaaataaaaaaagaggcctggtgcagaggctcatgcctgtaatcctagcactttggggggccaaggcaggcagatcacttgatgttgggagttcgagaccagcctggtcaccatggcaaaaccccgtctctcctaaaaacacaaaaattaacagagtatggtggcgcacgactgtagtcccagctacttgggtggccaagtagctcctgcttgaacgcgggagaattgcttgaacccaggaggtcaaggctgcaatgagccgaaatcgtgtcactgcactctagcctgggtgacagagggagaccctgtctcaaaaaaaaaaaaa

SEQ ID NO: 77656 - DNA, 1027 bp, Homo sapiens
cttcaggtgccacacctgaagactgaggttaaatgggaggcggggaggagctggtgacactgactggatgccactatgtgccagcctcattcattccaccctctggcagtgtcctgagttacatgcccagccaccgtgctattttccaggccggaaaaccgaggtgtagagcccagcactcggcgtaggaggcacacagcaagtgaagccatccttgttgacatgagctggttgctcttggcatttgagtctgaatatcaaaggccctgaagattaaaaagagagaatgaagaatgatgtgcctggtgccttcttgggaagagcccgaggccagctgtggaggggagcaagactggttctgggctgggcttcctggcctggtgctttcctgggcagctggaagtgcttctgtgggagctgtctggccctggcgccgttgttggcttcattattttttgcctgcaggggcctgagtattctgtactgacgggaaaacatttgttgggctgacgctgtaatcacaccacaagggacacttgaaattatatctgtatttgggaagctaattttaaagaactttttctcttcataattatatgcaatcagccagctagtgttattggggattctctttttccctcttcagctgagaggccatctgccttcctcttcctgcctttccttccagcacacggtgagccatctccctgggagagggaccactggcccttggctgcctgcaagccccagggaaacctttccatggtgattgcggaggaagggatgaggaggaagagcaggggaggatgatgggggcctctggcttggctacaggatgagtccgttttcaagactggaggcgcaggttggtgatggaaatgatggagtgtagcgtttcgatttggacattgaagcagccagggctcttgtgaatgcaagtggcagaaaatccaattcagatgagtttaagcaaaaagaaaaaaaaaatacatttcttggcccaggtaaccaaactggcacaggaata

SEQ ID NO: 77657 - DNA, 1129 bp, Homo sapiens
gacgggggcctgagggttcgcacacagagtccagggctaggacgttgttcccaagaagggagtggagagtacctacccccacaagtctgagccccaggctggcctaccctgtgctgggcacctctgcttggggttccagaattctcggaggcagctgggtgggagtgctggtgggaagctccggaagggaggctgctcggggcctccctgtggctgtggctgcatgggcagccccgaagcggcttcctggaccccaccttgtgcctcagttaaacctgaatctggcttattcccacggccagcccgacacaggcagattctgagagtcctggctgcgcccagcagccagctgggtgggtggacatactggagggctgatgtcctatttgtgggctggggtttttccgggccttgggaaatgctgcctgagttcctggagaaggatgacatctttcctgccccactgtcgctgtcgctgtgcagaaccttggtgttttgacactgatgtgttctggagctaaacaatctcgtgttatgtaaacacaattagcctgttgctgtttgaccctgtcctgcttggggagggttgagaaggtgtctttttgctggatcctgggaattctgagagcctggagcagctgtgaactagtggctgggggttgtcggagctggaggggagtgttggtctggggagggccactcctgtccaggacactccgctccgatatactaagccagaccctggccccccacagctgagcaggcctggtggaactgcggggaggacatgctggactatttccacccggaaggggagaggaaatgaacggtgagtggctggtggccacaaacccaggatgttccatatatcagggccccagttccgagggccccgggcaaaggggctgggctggaggttgggagaagtgcagggtgacaggccctggttagagtatgggtcccttatggttcctttctgaaacgagtggggcaggtgagggcaaggcctgctcagagccccttgccccgggcctgcttaactgctgtgggtgcctctgcttggtgttccagaattttcagaggcggctgcatgggagtgctggagggaagctcgggaagggaagccgtt

SEQ ID NO: 77658 - DNA, 1104 bp, Homo sapiens
ggccctgtggtctctcctaaccttgctgggaatgtgacaggaaccaattctttggatttgggatgctctcctgggaaggatgggggagtgagtgggtgccccttccctgacgcagccatctgggacgtgggcagttctgtgagtgcttctgcatgtgcttcaggctgggaccccctggacagtgagacctatggagtgggccacatggctgcaaatctgtttccattgctgtgtgctccagtcctctcactctcaattaaccaacagatgtgatgagtcattggggtctcgtcagctaatgatctgagcagtaagtcgattgtatggctgattcctagagccacaggggtggatgggttctgacaggagcctcagtgctgagcgggttcggtaataaaggggatgtattggttcctgagtcagatccttggggcattctggcttcaggtgtaggtagactcaggcgacagtccaatagggcctggtctgtctgtctgtctgtctctctctctctctgtctctctctctctctctctccctcctctctccccccggccccctccctgcttccctggtctcttttacattggcttcattctcaggcccatgtggtgcaaggtgagtcctcaccctcaatccttattctcagccaggcactgtggcgttccttaggtgtgtgatctcatttgatccgcattaacagccctgggagggtggtggttttagcattcctgtttctcatagaagggctaagtaacttgcctggggtcacacagctggtaggggcagagctgggattcagagctggttgggttggctccagggtcccccatccctcatgctccaggtccacagggacagggattccttctgttggcctctgatttgtcatcctgggccacatacctgtctctgaaccagtctctggggctggggaatgcagcgcctcattcccttctacatggcctgagtgtgggcagggtggatccccaaaaggatgctgcaggggcactgtttcccagaggcaggggagggatgtttggcagctgaggtgggagtggacgtgctccctgtttctgggcttcagtggctggccagagtgag

SEQ ID NO: 77659 - DNA, 1392 bp, Homo sapiens
ctgtaactcctgagcttgatcgatcgcccgtctcagcctcccgaagtgttgggattataggcttgagccactgtgcctagccagcctattttctttttcttttttgttagtcttgctctgtcatccaggttggagtgcagtggtgtgatcttggctcactgcaacctccacctcccaggtttaagtgattctcggacctcaggtgatccttccacctcagcctcccaaagagttgggattacaggtgtgagccaccacgcccagcccagcctattttctttaagattttaaagtcctaacattcgtcatgggatccttgaaaagaaaaggaattatggccttgccactagaggcctttgccgcctccctgcaggaaggtgtgtcccgcggcattgggatcgtgttggagaaaggttttgcttcctgcacagtcagctcccaagcaccctttttatcaccttgacctgggcgcagccaagccgtggcctgtgcttgcggagatttgggtgccccatcctctcgctgctctggggaagcctgtagctgtggagaggccagtccaggccccagcttctgacctttgtctacatatcaggaggagccctcctggtgaggaatgtgcctcgttcttttgggggagctgacgaggtgcctgtagtgtggagggttaggggcaggggagtccctccagaaatgcacttaagcttgcagagtcaccctgccctgcattgttaagtggtataaggacagttagctccagaaacagcagtggctcctgtctctggagctctagcttcatgcctgacatggtgctgagcgctaacatgtggctctttgaagctgtcagtccgtatgtggagactgaggctcagagagggtaagtgactttcccggggtttcatagccgatcaccctgggggtggggttcaaacatcagtttgcacagtgccgcgatctcaggtcactgcaacctccacctcctggattcaagcgattctcctgcctcagccttccgagtagctggagtcacaagcgcacgcctccacgcccagctaattttttgtatttttagtagagatggggttttgccacattggccaggctggtctcgaactcctgacctcaaatgatccacttggcttggcttcccaaagtgctggcattacaggcgtgaaccaccgtgcccggcctcggcttcttactaggtggatgactgtgggtgtgtttcagctcctctctgggccttaatttccttgtcagtaagaggtgaccttgtgctcatgcataggagggggtcagcacatgcaaacttcccttctgtgcagggcagaggccatctctggaaggaagaagggggaaagtggccccttactcacctgtgtcaggtggtat
